United States Patent Application Publication US 2008/0050393 A1 - sequence listing, part 19

SEQ ID NO: 64153 - DNA, 2873 bp, Homo sapiens
tacttctgcgagaagacgacagaagggggtgctcagatcacatctcctcatgataaagaaattctaaaatgtatagaagaatgtgtggaaccctggaatggttcctggaatgataatttagtggataccagcccgctgaagagagaccctctgcaggacatttgcaggagatacatggaagatctgaaaaagatctgtttttacagggagttaaactcgaagaccaccttgaaatttgtgcacacatcttttcatggggtcggacatgactatgtgcagttggcttttaaagtgtttggttttaagcctccaattccagtaccagaacaaaaagatcctgatccagacttttctaccgttaaatgtccaaatcctgaagaaggagaatctgtgctggaactttccttgagactggcagagaaagaaaatgcccgggtagtgctagccacagatcctgatgcagacagactggcagcagcagaacttcaggagaatggttgttggaaagttttcacagggaatgagttggcagctttgtttggatggtggatgtttgattgctggaagaaaaataaatcaagaaatgctgatgtgaagaacgtttatatgttagccaccacagtctcttctaaaattctgaaggcaattgcacttaaagaaggatttcattttgaagaaacattaccaggttttaaatggattggaagtaggataatagacctcctggaaaatgggaaagaagtcctttttgcatttgaagagtctattggttttctctgtggaacttcagttttggataaagatggggtgagtgcagctgttgtggttgctgagatggcatcttacctggaaaccatgaatataacattgaaacagcaactggttaaggtttatgaaaaatatggttatcatatttcaaaaacttcctatttcttgtgttatgaaccacctaccatcaaaagtatatttgaaaggcttcgtaattttgattctccaaaagaatatccaaaattttgtggaacatttgctatattgcatgtacgggacgttaccactggatatgacagtagccagcctaataagaaatcagtgctgcctgtgagtaaaaacagccaaatgattacatttacttttcaaaatggctgtgttgctacccttcggacaagtggaacagaaccaaagataaagtattatgcagagatgtgtgcgtcacctgaccagagtgacactgctttactggaggaagaactgaagaaactcattgatgctctgatagagaattttcttcagcctagtaagaatgggactggatctggccgttcctgtttaggggtaccccccaataccgtcatgacactgtgtggggcatatgggaacagagcaacccgaagaaactgccatacattggaaccttgtggttagcattctctctcctatctcatctggccgagtatctttttccttttattttctttctttttggccaactggctagactaaacaaagtataagtttgaaatgaaatggtctagagggaaatgattcaaattttttcataattcaaacaaaagttattacactaaaagtattatagtaacgtattgtccttccgttaacagaaacatcacaattcaaaagtgagttttcttattatagtgtgattaagcctagttctgtatctcgtaattgtgtatagcatggtaaaagaaaaaaaaaaagacaggtaaatgttatataattgtagggttagttaaggaaattagtccataaaattggcaagaaaatggtactttccttgattgttatgaaaaagtgtcattgtgacatcacaggtattaatttacaaattagagtatttgaaataggatatttagcatttctgtagtttaaaacagatgttacagtgtgtggttttggcatgtctgtttcaggtgcccttggtgcagtataaatttactgtatgtatttaaaattctgatgtttactgaacataaaacaatagtggcaacactcctattggctttgttcttatcaaatttctcagtgccttctcagggtctggtatgaacagaaaaaacagtgttcctgcatttaccataatttaatcagtcaatttgcagatagctaaggaaaatcttccaaaatctgtaggtgcttcctctatatcaagtgagtttactgattttaaaatcttaggaatataaataaagatcttaataaaagcaagcttaatgtagttaaggatcttcatattagaattgtgtcatttatcaaaccttttattacagaaaaaaatctgaactgagaaaggagctctgaatttatttgacagtctaacttttgaattacatttttgtaagtagatttattcttttattttatgaagtaatgttaattttactaagaataaaacatccaaattttaagtattatgaaatactaaaactacatgttttaaaacagaggtccagtttattctaacatcttgctgacttctgtagaatttctgattgcatgactattatttatcttcttttagtgtagaaaataattttttacaaaaagtcacttttgggctgggcgcagtggctcacgcctgtaatcccagcactttgggaggctgaggcaggtggatcacaatgtcaggagtttgagactagcctggccaatatggtgaaaccctgtctctactaaaaatacaaaaattagccgggtgtggtggtgggcacctgtagtcccagctactcgggaggctgaggcaggagaattgcttgaacctaggaggctgagattgcagtgagccgaaatcacgccactacactccagcctgtgcaacagagggagactccatctcaaaaaaaaaaaaaagtcac

SEQ ID NO: 64154 - DNA, 1658 bp, Homo sapiens
cccacgcgtccgcccacgcgtccggtcattgcttagcaattgcaagaaaacaagagaaaaagcttctgctactagagtgtatattgttctcgataattctggatttgagcttgttacagatttaatattagccgacttcttgttgtcctctgaactggctactgaggttcatttttatggaaaaacaattccatggtttgtttctgatactactatacatgattttaattggttaattgaacaggtaaaacacagtaatcataagtggatgtccaagtgtggggctgactgggaagagtatattaaaatgggtaaatgggtttaccacaatcatatattttggactctgcctcatgagtactgtgcaatgcctcaggttgcacctgacttatatgctgaactacagaaggcacatttaattttattcaagggtgatttgaattacaggaagttgacaggtgacagaaaatgggagttttctgttccatttcatcaggctctgaatggcttccatcctgcaccactctgtaccataagaacattaaaagctgaaattcaggttggtctgcagcctgggcaaggggaacagctcctggcctctgagcccagctggtggaccactggaaaatatggaatatttcagtacgatggtcccctttgacttgatttaggagctctcagttgcatagaaagatctggtgagcaccttttcatccccagaaaaggagcacgtgaattgagtcgcctggcggctctgtacgcgctcagggaagcttagcttcttggtgcccatctacgtgcactggatgatttttcttttgaacattttgccccactacactgttttggggatagctgggttaagcaagttaaagatatttacatttatattggaattttagcaactttttttcaggttaaatatataatttcaagtgcttttaatgaacttatttttaattggctagggagcaaaaaataagtgagttctgcttttagttagttaaccttgttcttttcttaaatagtacactgcatggtatttaatattccaggaagcatgggattttattttgcttgattttgggcacatgaaataatagctctaggaaaatgcgcatcttaatgactctttgtaaagagaggcatttcttacaactgtgatgtttgcttacataaaagttacctcataagttaattctaacttttattcttgaattttatttcatttcaatagcttgtttcatttgcacgcctttgtattttgattgacctgtagaatggatgttaggaaactcaaaattgaacacagtgaaacaaatggtatttgaagaaatgtaatatcttttatattctatttatgatatccataatcaaatgagattattttaccacataaatgttttaaatatcagatttttagtttgcagttttaggaaaatgctttagatagaaaaggttcttatgcattgaatttggagtactaccaacaatgaatgaatttattttttatattcttacacattttattggtcattgtcacagatagtaaatactaaaaatttcaggtcagtttgttttgaaactgaaattggaaataaatctggaaatgttttgttgcactaaaataataaaatgaattgtactgaaaaaaaaaa

SEQ ID NO: 64155 - DNA, 2913 bp, Homo sapiens
tttgctgactccaagaggaagtcggtcctcctggacaagattaagaaccttcaggtggctctgacatccaaacagcagagtctggagactgccatgtcgtttgtggccaggaacacatttaagcgtgtgaggaacggattcctaatgaggaaagtggctgttttcttcagcaacacacccacaagagcatccccacagctcagagaggctgtgctcaagctctcagatgcggggatcacccccttgttccttacaaggcaggaagaccggcagctcatcaacgctttgcagatcaataacacagcagtggggcatgcgcttgtcctgcctgcagggagagacctcacagacttcctggagaatgtcctcacgtgtcatgtttgcttggacatctgcaacatcgacccatcctgtggatttggcagttggaggccttccttcagggacaggagagcggcagggagcgatgtggacatcgacatggctttcatcttagacagcgctgagaccaccaccctgttccagttcaatgagatgaagaagtacatagcgtacctggtcagacaactggacatgagcccagatcccaaggcctcccagcacttcgccagagtggcagttgtgcagcacgcgccctctgagtccgtggacaatgccagcatgccacctgtgaaggtggaattctccctgactgactatggctccaaggagaagctggtggacttcctcagcaggggaatgacacagttgcagggaaccagggccttaggcagtgccattgaatacaccatagagaatgtctttgaaagtgccccaaacccacgggacctgaaaattgtggtcctgatgctgacgggcgaggtgccggagcagcagctggaggaggcccagagagtcatcctgcaggccaaatgcaagggctacttcttcgtggtcctgggcattggcaggaaggtgaacatcaaggaggtatacaccttcgccagtgagccaaacgacgtcttcttcaaattagtggacaagtccaccgagctcaacgaggagcctttgatgcgcttcgggaggctgttgccatccttcgtcagcagtgaaaatgctttttacttgtccccagatatcaggaaacagtgtgattggttccaaggggaccaacccacaaagaaccttgtgaagtttggtcacaaacaagtaaatgttccgaataacgttacttcaagtcctacatccaacccagtgacgacaacgaagccggtgactacgacgaagccggtgaccaccacaacaaagcctgtaaccaccacaacaaagcctgtgactattataaatcagccatctgtgaagccagccgctgcaaagccggcccctgcgaaacctgtggctgccaagcctgtggccacaaagacggccactgttagacccccagtggcggtgaagccagcaacggcagcgaagcctgtagcagcaaagccagcagctgtaagaccccccgctgctgctgctgcaaaaccagtggcgaccaagcctgaggtccctaggccacaggcagccaaaccagctgccaccaagccagccaccactaagcccatggttaagatgtcccgtgaagtccaggtgtttgagataacagagaacagcgccaaactccactgggagaggcctgagccccccggtccttatttttatgacctcaccgtcacctcagcccatgatcagtccctggttctgaagcagaacctcacggtcacggaccgcgtcattggaggcctgctcgctgggcagacataccatgtggctgtggtctgctacctgaggtctcaggtcagagccacctaccacggaagtttcagtacaaagaaatctcagcccccacctccacagccagcaaggtcagcttctagttcaaccatcaatctaatggtgagcacagaaccattggctctcactgaaacagatatatgcaagttgccgaaagacgaaggaacttgcagggatttcatattaaaatggtactatgatccaaacaccaaaagctgtgcaagattctggtatggaggttgtggtggaaacgaaaacaaatttggatcacagaaagaatgtgaaaaggtttgcgctcctgtgctcgccaaacccggagtcatcagtgtgatgggaacctaagcgtgggtggccaacatcatatacctcttgaagaagaaggagtcagccatcgccaacttgtctctgtagaagctccgggtgtagattcccttgcactgtatcatttcatgctttgatttacactcgaactcgggagggaacatcctgctgcatgacctatcagtatggtgctaatgtgtctgtggaccctcgctctctgtctccagcagttctctcgaatactttgaatgttgtgtaacagttagccactgctggtgtttatgtgaacattcctatcaatccaaattccctctggagtttcatgttatgcctgttgcaggcaaatgtaaagtctagaaaataatgcaaatgtcacggctactctatatacttttgcttggttcattttttttcccttttagttaagcatgactttagatgggaagcctgtgtatcgtggagaaacaagagaccaactttttcattccctgcccccaatttcccagactagatttcaagctaattttctttttctgaagcctctaacaaatgatctagttcagaaggaagcaaaatcccttaatctatgtgcaccgttgggaccaatgccttaattaaagaatttaaaaaagttgtaatagagaatatttttggcattcctctcaatgttgtgtgttttttttttttgtgtgctggagggaggggatttaattttaattttaaaatgtttaggaaatttatacaaagaaactttttaataaagtatattgaaagttt

SEQ ID NO: 64156 - DNA, 2082 bp, Homo sapiens
cgcccacgcgtccgatttcatatccttcaggaataccagatggccagctgcaggcctataggaaggagttacatgatcttttcaatctgcctcacgacagaccctatttcaaaaggtctaatgcttatcactttccagatgagccatacaaagatggttacattagaaatccacatacttaccttaatccacctaacatggagactggtatgatttatgtggtccagggcatatatggctatcatcattatatgcaggatcgcatagatgacaatggctggggctgtgcttatcgatctctgcagactatctgctcttggttcaaacatcagggatacacagagaggtccattccaacacacagagaaattcagcaggctctagtcgatgccggggacaaaccagcaacatttgtcggatcgcggcaatggattggatctattgaggtgcagctggtactaaaccaattgatcggtataacgtcaaaaatcctgtttgtcagccaaggttcagaaattgcctctcaaggacgggaactggctaatcatttccaaagtgaaggaactccagttatgatcgggggaggagttttggcccacacaatactaggagttgcatggaatgagattacagggcagataaagtttctgattctagatccacattataccggtgctgaagacctgcaagttattttggaaaagggctggtgcggatggaagggcccagatttttggaacaaggatgcatactataacttatgtcttcctcagcgaccaaatatgatttaaaatatcttggagtcaaagactgcagtagagtggtattataaatttttgaataaagaatcagtttaatttttcacattaaatcctggttctagtttgaccatttaaattatgacctttttcaaaggttgtaaatactgcacggagaatgtattttttagacgttcctttaataacttaaaagacaaagcatacacaaccagcatattataggcatgtaaatacatgtgttcttaaatggatcttcacttggaagaaagtttttcgtccttctcagaaggagattagacacaacatatggtaaagccaaaagcaggagcttatagatttgcatgaaatgaaggcgttcttcagacttcttcataacccacgtgacatcagcacttccttttcccactggtattttctacacttccgagactccgtttctgtctgagcacggcaacacaatcattcctgtcagggtgttcacttgcttttattgtctgcatacatttaattgttgtaagaaacttggcacagtctggaaatccacatgaccaagcgagatcttcagctgtttgcccgttcttattacataaatcaatttgggcatcactggctacaagcaggcttaggcactccaggcttccaacttttgctgccttgtgtagtggagcttctcctaaaacatcctgctggttgaggtcagcgcccgtttgcagctgccagagaagaaagcaagcaaggccgcttcctgcggctaagtggacaggcgactgcttgcagggatccgggggtgcgttgaccgaggcccctgtctccagcaaatgcttcagaccatccacctcggggttgcaatccagcaacagcatttcccgcctaaggcagatgacaagagtccttggaagtgcagagaggtgagacactcgccgcaccccgacaggtaagaatgcgcaggctggccctagcacgggagaatttaaagaccgctgggacttccgggccggcccttggcagccgcgccccagctccggttacgcccgagcagcctaatcctcaacgacccggaccctgtccagccccgccacggccgcacgtacacaaacactggcacgtggagcccggcgccgggggcagggggagggggcgggcgcgcgaggccatccgccgattggccagctgtggatgcgtcaggccctcccacctcggggcggggcccgcggcggccccacggagcctcagcgcgcgtgcgcagggtaagtcagtgggcgtgagaggactggagtaggagcgggtggggctccgcggccgc

SEQ ID NO: 64157 - DNA, 1285 bp, Homo sapiens
cacacgtccggctaatttttgtatttttagtagagacagggtttcgccatgttggccaggctggtctggaactcctgacttcacgtgatccatctgcctcggcctcccaaagtgctgggattacgggcgtgagccacagtgcccagccaaaatgcgacacttcttccctgtctagcagtgcaagatcttaaagtcagattataaaacaagttgtattctcactttatcatttttctctgcagttctagggcaggtttatctgaattacttaagtccttcatagtatagtgagcataaaagaggacacaagccaaatgtatacttaaattaaatagcatgatttaatttagttggtgcttaaccctgaatcctcttaagttaaaaaaaaagttataattaactattaacgttaatgaatttaaaccttccagaaagcatgaatccaaaaggaaatgtccaacaggtgatatgaaccagatattttatggcctttcctgtttcagtctcaaactttctaaacatcaatggggaaaaaaaattctctagagtttttcagttttattcttctagagcacaattttccggcctgttactgagtacggtcttctaacaggtacacaattaactcataagtagacaacacaatggcagtatttgggatctgccggataagctgggcaaacagtcctctataaaaggcaaggtagccttcttcccggaacaccaggcgcgccgtctggacaaaagacttgtacttggtgccctcttcccggagcctcgtccttatgacttcgtgtggataagcaatgcaggaggcacagcccttagaaagagcagcagctgccataagtccaaaaaaacttgtggaatttttctcagtcccatttgcagaagaggctaatggagcttctttcagatacttctttaaactttcataaatagcaaagcagattatagtttcggaaattccagcatacgaggcagttaatcctctatagaagccacgaatgccttcggtctggtaaacgtaacgagcacactggagtgtattcatctgcttagagcccctcactttctgttctagctgcattcgggttttaaccatccatataggattcattaaggaatttgtgataaaagctgcagagccagctgagaaaatatgcacaatattgctgttaggcacgaaaatgccattaaattgctctttggctttggagtaacatgcaaagtatacagcccttgatggtgcaactccaaccaaatttggacccaagcctctaaa

SEQ ID NO: 64158 - DNA, 1564 bp, Homo sapiens
tgtgtcttttgttgggatactccacagcggccgctgcagagtgaaggcgctgcagcgctggtcaccaaggggtgccagcgattggcagcccagggcgcacggcctgaggcccccaaacggaaatgggccgaggatggtggggatgccccttcacccagcaaacggccctgggccaggcaagagaaccaggaggcagagcgggagggtggcatgagctgcagctgcagcagtggcagtggtgaggccagtgctgggctgatggaggaggcgctgccctctgcgcccgagcgcctggccctggactatatcgtgccctgcatgcggtactacggcatctgcgtcaaggacagcttcctgggggcagcactgggcggtcgcgtgctggccgaggtggaggccctcaaacggggtgggcgcctgcgagacgggcagctagtgagccagagggcgatcccgccgcgcagcatccgtggggaccagattgcctgggtggaaggccatgaaccaggctgtcgaagcattggtgccctcatggcccatgtggacgccgtcatccgccactgcgcagggcggctgggcagctatgtcatcaacgggcgcaccaaggccatggtggcgtgttacccaggcaacgggctcgggtacgtaaggcacgttgacaatccccacggcgatgggcgctgcatcacctgtatctattacctgaatcagaactgggacgttaaggtgcatggcggcctgctgcagatcttccctgagggccggcccgtggtagccaacatcgagccactctttgaccggttgctcattttctggtctgaccggcggaacccccacgaggtgaagccagcctatgccaccaggtacgccatcactgtctggtattttgatgccaaggagcgggcagcagccaaagacaagtatcagctagcatcaggacagaaaggtgtccaagtacctgtatcacagccgcctacgcccacctagtggccagtcccagagccgcatggcagacagcttaaatgacttcaggagagccctgggcctgtgctggctgctccttccctgccaccgctgctgcttctgactttgcctctgtcctgcctggtgtggagggctctgtctgttgctgaggaccaaggaggagaagagacctttgctgccccatcatgggggctggggttgtcacctggacagggggcagccgtggaggccaccgttaccaactgaagctgggggcctgggtcctaccctgtctggtcatgaccccattaggtatggagagctgggaggaggcattgtcacttcccaccaggatgcaggacttggggttgaggtgagtcatggcctcttgctggcaatggggtgggaggagtacccccaagtcctctcactcctccagcctggaatgtgaagtgactccccaacccctttggccatggcaggcaccttttggactgggctgccactgcttgggcagagtaaaaggtgccaggaggagcatgggtgtggaagtcctgtcagccaagaaataaaagtttacctcagagctgcaaaaaaaaaa

SEQ ID NO: 64159 - DNA, 1932 bp, Homo sapiens
tcagattcaacagcccccagcagcagccactgtggcctcgcaggcggtgcttccaaggctgtgaggcatcacgaagctcccggaggctttggccacttgcctatggaggcgcctaggggaggtggggaggggacctaagcccccacttttgtctacccagatgctgccttcatttagatgtatcctgttgttcagaagcccccactggccccaaccgcacctgccccggctcatgcctccctgcgtctgagagggcagtggtcacaggctgtgggctctcgcatctttgaaatgaatttattgttcacttttgcacacgcgtgttgtaggacagggcaggtcccagcctggggcctgctcccccaactgcaacatttccccaagcccccaaaatgggccgaaaggggaacatgggcgtgtctttccacattaagtagcaggagattcccctgagtaaaaggcattttcttaagtaggacgtgtccaggctccagcagcagtcctgggggtgggggttgtgggccttcaggccagggcactgcccatgacttcggagaagccacctggtgttccaggtgctgctggctgaggctcctgcagctcaggctgggcctctttccaggccagagacttctccaatttggttttaaaaagcaatccgtgacctgggcagtctgcagtctctttggaggctcgcttcttgcagcagccgcggcacaggctgaacacacatctgttgccctttgggtttccacactggtcacactttgcatattttggcttcagagaggggtcgaaggtcttgtgggggttcctcagctgcttcttttgcttgttcttggacaggacctccgtgccaccctcctcttcctccagggcccgcttgctgcgcgcacctgccttctccttgctcccctccctgggccccggccggatgtagggctggcagatccagtggaagggcaagtcgccggtgggcttcgctccctcctgcctggatatctcctcctgacaccgcagcttcagctcctggctcacagcagcgatgccctccagggtcttcaccttggccagctcctctcgcagctcctggtgcacctgcagcgtgtggtgccacagcttgaagaggtgggcccggacgtaggacagggggcaggggtgctcccgcacgatgtccagatactcctcggccagctcccacacggcagggctccggccctcgaacagggcggggttgtgcaggttgccctctgcgctcatgacgccctgcacacccgtgtcccggaggcagcgctccacgtcctgcaggcactggatgttcccgttagcaaacacagggatggccacagccttccgcacagccttgatatgctcccaggacgctgcacccgacaggggccccttctgctccttggtgcgtccgtgcaccgtcagcaactggcagccggccttctccagcatctgggcgtacctcacggtcttgtcaatctccgggaagacacggattttgcacgtgacaggaacagagagtttctcgtgggccagcaaaatcattctttggagcaggtcccactcgtcctgcagaaaggcgccatagtgacctctcttggctatcatctgtgggcagcccaagttcaggtcaatggcgtcacagtaatcctgagccaggagagccgcctgaacaaacacctccgggtcattggcacagaactgcacgatgaggggccggtcctcggggcacacctcgcagtacaggttctccttccggtagttggcgtcgcggacaaagacctgggcatgcagcatgggcgtgtagcagagctgtgccccgtggcgccggctcagcagcctccaggccagctcgctctggtccaccatgggggccacgacgtggcgggcccctcgcagggtgcggctccagaactcgaagcc

SEQ ID NO: 64160 - DNA, 951 bp, Homo sapiens
tttttgcaaagtttattggaaaatcaaaatttttttattaatttactggatttcctatacctaacaatccttaaaacaactatcaacacctgcaacacaaaccacaggcaaaatgaaaaacagatgccccagacagcacccacccacattggcacacactaattaaggaacaaaatcttacagggtgctgacataactcgctttaagcatgcaatgattcctgcagtgctccctggcaatcaacctctctgcaccctggggctggatacttcaaagtcctttgttctcttaaacaggttggaagtcaacatgggcaagttaaggacaagttagatgagatccccctagttcataacgtgagttcctcttgctctccaatgttcatccacaagtacagggtccaatcccctataagagatggcttaagcatcccaatggggaaacagcctggccagccacatgggcagattctatatatttccaagtcccgcaggccacaagactgaaagccatagagaattgacagctcaagcctcacctgaacaatgtgttgaaaggggatctctcaggacagacactttgatttcataagttggcccattttggcccaaatataccaaatagagatgtcatgtaatgtcactgcaaatccagtacaagatactaagagtacccgagaacctggggttctctttcggccatccagaaggtgaggtcagccaggagggtgcccattgctctctgaccaactgatctgccagaggaaaagctgttcagtatccaagatgcatcaggtccaatcccaggggttcctagttctccttctgtgcctgctgtaacctcttggccacagcagtgatcagtgctgccccttttccactgccatcttctgacagcatgaatgtcacatcacatcgaggggctagttccttcacagtttcctgcaatatt

SEQ ID NO: 64161 - DNA, 1480 bp, Homo sapiens
cctagaggtcaccaagaatgaaatcctgcagagtgttttctttgtctctccagttagcaacgtgtgcttcttcgccaagtgtccatacatgtgcaagacggagtatgctgtctgtggcaaaccacacctgctggagggttccctctctgccttcctgccgtccctcaacctggcccccaggctgtctgtgcccaacccctggatccgctcctacacactggcaggaaaagaggagtgggaggtcaatcccctttactgtgacacagtgaaacagatctacccgtacaacaacagccagcggctcctcaatgtcatcgacatggccatcttcgacttcttgatagggaatatggaccggcaccattatgagatgttcaccaagttcggggatgatgggttccttattcaccttgacaacgccagagggttcggacgacactcccatgatgaaatctccatcctctcgcctctctcccagtgctgcatgataaaaaagaaaacacttttgcacctgcagctgctggcccaagctgactacagactcagcgatgtgatgcgagaatcactgctggaagaccagctcagccctgtcctcactgaaccccacctccttgccctggatcgaaggctccaaaccatcctaaggacagtggaggggtgcatagtggcccatggacagcagagtgtcatagtcgacggcccagtggaacagtcggccccagactctggccaggctaacttgacaagctaagggctggcagagtccagtttcagaaaatacgcctggagccagagcagtcgactcgagtgccgaccctgcgtcctcactcccacctgttactgctgggagtcaagtcagctaggaaggaagcaggacattttctcaaacagcaagtggggcccatggaactgaatctttactccttggtgcaccgcttctgtcgtgcgttgccttgctccgtttttcccaaaaagcactggcttcatcaaggccaccgacgatctcctgagtgcactgggaaatctgggtataggtcaggcttggcagccttgatcccaggagagtactaatggtaacaagtcaaataaaaggacatcaagtggatacctgacttctcaggatccttattctagctacaagtcaaagataactcctggtccagacaaaacacctggcctatcacaagctgactaaaaatctgcactttgggccagcgcaggcaacagtaactctgacaggttcaaattagacctcacactttctactcatattctagtcactggacccatctgaatcagtaatccctactgcccggtcctggagtaacttcttagagatattataacaagtggcaaaaataaaagagggatttgctaagaatatcagaaaaggagtgttccaatttgaagagtattacaattgaaataacatcaaatatgtcacactaagcagccagtaacagaataaataattacaacg

SEQ ID NO: 64162 - DNA, 1779 bp, Homo sapiens
atttatgaactataaggcaagggcagaagactgtgaagagctgttacggatagaagaggatgtgcactggcaaactgagggcataataagttcatccaaagatcaggacatggatatagcaatgatcgagcagctgagagaagcagtagatttgctgcaagatcccaatggattaagcacagatattacagagagaagtgttttaaacctatatcctatgggatcagcagaagccttagaattacaagattctgcactgaatggtcaaatacagctggagacatctccggtgtgtgaggtgcaaagtgatctaacattacagagtaacgggagccagtattctccaaatgagattagagagaactcccctgcagtctctcctaccacaaacagcacagctccatttggcctgaagcctcgatcagtgtttctaagacctcagagaaatttggaatctatagacccgcagtttacaatccggaggaaaatggagcagatgagagaagagaaagagctggtggaacaacttcgtgagagcattgagatgagattgaaggtcagtctacacgaagacctgggggcagccctcatggatggtgtcgtcctctgccatctggtcaaccacatccgcccacggtcggttgcaagcatccatgtcccatcaccagcggttcccaaacttagcatggccaaatgcagaagaaatgtggaaaactttttggaagcgtgccgaaaattaggagtaccagaggaaaagctatgtctcccccaccacatccttgaagaaaaaggcctggtcaaagtgggcattaccattcaagcattactagacatcaccgtaacgaaggctctgttcacatgaaactaccccttctccattgggggctcagactctgctctcatccaggatcctgaactctgctccaggcacctgttcaaccctctctcccacccactgcctgtcacttcactgactccagttacattgaaacaattttcagtctaagggaggattttctacctttcagagctgacctccgactttaagacttgacaggtatttatcttgaaaccagagagggagctggaggaaaaaaaaactgagcagcacatcaatgccttttccaccctccttcatcctttccacactcaccgactgccattaccaaaacgccaagcacaaccgttttgcagcaagacgcattcgttttattaaaaccaaactcattatgtatttagtggggggaggggggcacaatcaggtttttcaccaccaaatttttcgagaggtttcttgagaccattgccttttaaaaaactattttcgacatacaaaatatttatataaatattatttattagtgagttgttattcatcctttggatgcaaattgtaaattaggaaactattttattactgcttttttgtggttaaacactttattttaatataaatgttgagttattttctatcctctttggtgtgcggtagtttaggtctcagtaatgtttctggtatatatgattccaaaaaaaagcgaaaaacaggtgcttttaggacacaacttttctggggaggcaatattgacactttggtttgtggaacgttggtcttatttatatttctgcattccatccagtttcctacattccagcagccctctgtcccccaatataatgaactgactaaaatcaagagagcaccccaaagttatttgtaaatagctgtgatggaaaaaaaaaagacatattaaacttgaagctaaaatgtgaacaatt

SEQ ID NO: 64163 - DNA, 1599 bp, Homo sapiens
catttccgtggaaatagccttcagagttctcagaatcgctttccccaaaacctgaaaatctccacacctatgaccttgtcccctctcgcctctgatcaggatggtgatgttgtggcgaggtcgtgctctcccaggtccatcttcaggcctcaggtgatcctgcctcagcctcccaaagtgctggaattacaggcgtaagccactgttcctggcccacagttactcgtttctttccttcaccgatggagctacatccgaacaagctcatcgtcggccgacagatcgcacgcaagtggtccacggatcgcacataagtggtccacagtcgacagaaacagaccgccacgatcagcaacttagcgtcgcctcccccggtctcatcttcttggcatgcccgtcgggcccaggcgggggactccggcgccgctgcttcttctctagctgctgctgcagtctctcctctttcttcttcaggtaggaggtcacgttgtcgaacgtggccttgtagagactgctgaagctggcgtctgcgccggcagagccttccagcatggcccagttcccacgaagaacaccagagactttctttaacacggtgctctcaggaacagactgccactggtcgcccacaggcctgtagagcaccaggggggcttcctggcagtcctggagcacccacagcccctgggtctcctcgaaagccacgtcccacacttggtgctggaacgccagctgctgcctgtacaccaactgctgtctgcgggcgtccagctggaagatgtagaccacaggagtgccgtcgcacaggagcgccacgcagttctcctggcaccagaatgcaatcctggacgcggcaaacttctggggggcctgggggtccaccagctcctgcagactggccaggtgacagcagtgcagctggcggccgctcctgtactcccagagcctcagggtgccgtccccagaggaggacagaagcagcccgggctgagttggcaccacggagatacggctcacaaactctgtgtgccccaagcagaaggactcgatgctatggggcgccgcggcccagctgactcggatcttctcgtcccggtcggcagtgaggatgaagcggtcatcaggactcacagccacatctaacagcatagacaggtgccccagctctagacggccacacccgtgtggctccagcaccgaaaaggagtagacgtctccagacttgtcggccaccaagaccttctcctccgaggctatgaaagtcagggctgtacacctccttgccacggtcctgacactcagacattgccatggttttgtacggaaaagaatcagacgcttactgtcatcggttaaagcaaaatagctgccagacttggagaaggtggacgccagaatcgcaccgctcccctggtccaagggcgcgtcctcccctttattttcttgtgacttcttttctgcagcactgcagtcatagatgaagaggctgtcatcatcactgcttgctatggaggtggccaggaatcggctgccgccccgcaccaccaacgtctgcccgcacaacgccagtcccacagagcccgccatgtacccgcccgc

SEQ ID NO: 64164 - DNA, 2964 bp, Homo sapiens
ttttttttttttagagaaaataatttaatagagaaacaatgaatgatactcttcacactcagcctcctgcagggaggacagacagctcttgcccaaggaagcatttaagggcagaagggctacaaatcaccaacacccgctgattatttaaaagaaactctcaaatacattcttttccaggttaaattcactttgtcctcataagtgcccatgctgtgggctgtgaaggtatcagccccattgaagagatggggagacccaggcccagaaaggggaaagagcttgcccagggctccacggcggcagggcaggcctagaagtgggtggcctagagggcactgggtcagactgtctccaagcctccctctccctgtcccaggctcaaactccagcacaaggcccgcgctgtggctagtgtggggcccagagggaacggaggtgggagagatgaggaccaaggaaccctcctgagtgctccctaggccagggcaggaacaaggcttgggcttcttaaaccccaaaagatccagctttcatgcttgagggattaacctaaagtaccaagatggcgggcaggtgtgagttcccagaaagactggtgggttctgtggggctgagtgcatactgtggggagggtgtgtccctgaggggtgttggagagccccattccagtgcaaagaggagctgagttggaataaggggtcccgggaagggcaggccaggggcacagctgcctgctggcagggcgagggcaagcacagaagtaccctgcgggggccccttgcccctcttctcggagccaaaaatgatagagggctgcatgccccaaaacggacaggcacaggacccagtaaccaccgagtaacaaaggtctcatgaaagaagtgctgttctcccagagtcctgccctcccctccagtatacagcacagccatcaaaccatctgtggggtgcagagtaacctgagggaggctggggactctgggatatgggggtctcagcactgtccatccaagaagcctgctcgccagggctgcagtgggccacttcattcttggcgtcagcctgggttagtgcccctctgctccagatggctcacatctgtccaatcattcttctagggtcactgaagggtgcaagagctacgaacagattccgacagtccctctttgtccagggtgtcagcttcccagcgagattccctcatcttgacctgctccttcaagtattcagctcgggccatgaggttctgaacctcagtgtgaagcagctcccgcctccggcccgggggctccgctgccagcaacagcagtagctcccccaggctgtgctggtacaggtccagggcatcctgctccccgccggcggcctcctccttggccatggcagctgaagccacttccagggcagctaggaggcgtggcttgtcccgggccatctctctgagcaggtctcgggcagaggtcccctgcctcagcagggcctgattggaagaggagacgatggccttgagctcctcagcccgggacacgtactgccccacctttgccttaattgcctccttccgctgggcatccacttcatagtgcagggcaggtacaaagaagtccagagccttgcagtagagtgataaggcagctgctgaatccccctcctggtctttcttcacagcctgcaccaccagggcggttgctcgccccagactctccccactgggcatgtgctccaggtccacccaggggtgcgcaaaaaagtcctggaaggagatgcgacggctggggtcccgctccaggagccgctgcagtaggtcccggcagtctcgggagagcaggggccgcaaggggagctcgatgacccggttgctacggatcttctcttccagctccgagaacgacctggaggcaaaggggggctgcccgaagagggcttctgtggaagggaggcagagcggaggctgggagggaatgggtcaagcctggcctgacgcccctcagcaggggccctgggccagcagtcagttttcatcagaacccttcagaagtggcccagagaggccttgcctgaggaaactgtaggcctcagggtgagaagcagggaaaagaggtctcaccatacaggatgacccccatggaccagaggtccacgcgggcgtcatactgccgctggcacaccatctcgggggccatgtagaggggggagccacggagcacgtgcttctcatcccacggggacatgtgttgtgcgaaaccaaagtctgccagttttaggtggggcttctccaaggagctcagtagaatgttctgtggcttcagatccaggtgagagatattccgttcatgcaggaattgcagggcgctagctaattgctgcatgaagacacgcgccaccttctcaggcagaatcctgcgggtatggatgaagcgagacaggtcgccccctgcgcaaaactccatgatgaggtagatattgtcactgtcccactgaaagtctttcagctgcacaatgtggggatgtcgaatgcccttgaggatctcaatctccgtgaggaggttctccaccgatgccttgttcagacttttcttggctacacactttatggctaccacttcacgagtgtccttcttggcgtaggccttgtacaccgtggcgtacgtgccgctgcccaggcgctcggtgaggatgaagccgtccaggcgcgggggaccccagccgggccccgccatcccggccgcctgcgcccgcgcgggcgcttcctcgctgcgggcggcggttccggcgggttgcggggcgggccgagcactgggtggctccacgctgcccccagcgccgcccgccggaaatgcagcgcgcatcggggacgcggatccgcccggctcccggcgcccctcccctgtctctgggcctcgccgggtcacgcgccccgccagttcctgcagggcccacgtggggatacggaggccccgc

SEQ ID NO: 64165 - DNA, 1589 bp, Homo sapiens
cacctgcaaagttgttcttggtgtgaaagagtggggtaaaggaattaaggagggaagtgtgtcttcccagatgctgtgccccctcacacagcaccccaccagctagtgcccaggcacacttgggcatccatctgtgtttgttgcctgaatgaccgtgggtgagaatgaaggcgtggatgaccagggagggtgggggaagcgactcaccactgcaggcccctcttgttcctgtgcagatgccttctcggatttcacactggctcgccagggctacccacggatggcgttctccgcctgctttggcggcatcatcttcaacatcctcgtgggtgtggggctgggctgcctgctccagatctcccgaagccacacagaagtgaagctggagccagacggactgctggtgtgggtcctggcaggcgccctggggctcagcctcgtcttctccctggtctcagtcccattgcagtgcttccagctcagcagagtctatggcttctgcctgctcctcttctacctgaacttccttgtcgtggccctcctcactgaatttggagtgattcacctgaaaagcatgtgactgaagccgcttagtgctgtggcctcactgcaggcaggagccccgcccctcctgccgggggaggcccagggaccggagcatttctgcaaggcccttgtgggcacgagagtgcggcccttgctgctggagatctgaggtcactgctgtgagctgggagaactgctgtgtacctcttgctgccagcacccaacagccttgccgtggggaccttggaaacctggctttgctctggacaaagggttccagagagaagctagaagtcccccttgaatgacccccagagcccctctgagaagggctggagtttgggggaaggggatggctggatgtgctccaggccatgctggaggtacccccgaggcacaggcactgcccgttccccttgcctgggcttcaggccttctggcaccttctcaggacacaagtggctgcccaaccctgactcagagaatgagggtggcttggacccctgggaatcaggccgccgagggctgagctccagagccgcaccatctgccacaaacagaattcgagacatacttaattttgaatttctccttgccacgttaataaagccaaaagcagcgggtgctattcgtggcaacacacttcactgaacccacttgcttccaaaacgatgccagcccgaggcactgctacgccagcagctgccacatgggatggtggctcaggcgctccctccaggattctgcccctgcctgtccacagactcctttgtgctggaacctgggctcctccagctgccaggcaggagtcggtaggactgtgcctgtgcctccctcagcggggccctgggcggggttccaaggcctgcgagctgggaaaggacagatgaggggacctcgtgccttcttgctgtcatgcaatgaccccgccttatgttgccgaaataagcaactcttaggtttgcctgactgccttatgctggtaaagaaaagggattcaactgtctcttttccaaataaaaaaaaaagtcaaaatttcaaaa

SEQ ID NO: 64166 - DNA, 1657 bp, Homo sapiens
agcggccgcgtggccatggacggcctgggcctccagttccccgagcagggcttccccgccggcccgccgctgctgcctccgcacatgggcggccactaccgcgactgccagagtctgggcgcgcctccgctcgacggctacccgttgcccacgcccgacacgtccccgctggacggcgtggaccccgacccggctttcttcgccgccccgatgcccggggactgcccggcggccggcacctacagctacgcgcaggtctcggactacgctggccccccggagcctcccgccggtcccatgcacccccgactcggcccagagcccgcgggtccctcgattccgggcctcctggcgccacccagcgcccttcacgtgtactacggcgcgatgggctcgcccggggcgggcggcgggcgcggcttccagatgcagccgcaacaccagcaccagcaccagcaccagcaccaccccccgggccccggacagccgacgccccctccggaggcactgccctgccgggacggcacggaccccagtcagcccgccgagctcctcggggaggtggaccgcacggaatttgaacagtatctgcacttcgtgtgcaagcctgagatgggcctcccctaccaggggcatgactccggtgtgaatctccccgacagccacggggccatttcctcggtggtgtccgacgccagctccgcggtatattactgcaactatcctgacgtgtgacaggtccctgatccgccccagcctgcaggccagaagcagtgttacacacttcctggaggagctaaggaaatcctcagactcctgggtttttgttgttgctgttgttgttttttaaaaggtgtgttggcatataatttatggtaatttattttgtctgccacttgaacagtttgggggggtgaggtttcatttaaaatttgttcagagatttgtttcccatagttggattgtcaaaaccctatttccaagttcaagttaactagctttgaatgtgtcccaaaacagcttcctccatttcctgaaagtttattgatcaaagaaatgttgtcctgggtgtgttttttcaatcttctaaaaaataaaatctggaatcctgcttttttgctctactagtacctctgtcacactagtcttatcaaaaaccagttcttaagatcaatgttaagtttattagttaatgtaaatttctcatcctcgaaaagggtgaacataaatgcctttaaggagtatatctaaaaataaacattaggatatctaagtttgatgtaattgtttcaggaaggaaaaaagaaaagcattctggaatgagcctacttcaagtaatcttagtttctaaaactaacagttaatattttcaattccagtatatcactttaagtagaaggggatgtccaagtaattttggttttctaactgttgaatcataagcttgacctgcccccagaggctttttggatgtttttatctgtgttttgccatctctttacactcctcgacattcagtttaccttaatcttcacatttttacaccttgggaagtggcaagcatcgctgggtttaagataaaggagtcacaaaaactaatcaaaataaaatttgcattatgacaacttttaatacactttagcattttatttgattg

SEQ ID NO: 64167 - DNA, 1909 bp, Homo sapiens
gatgaccctgattacgctcagcttggcacgaggtggcacgagggcgacgcggacagcatcagcctcgagctgcgcaagcccgacggcaccctcgtctccttcaccgccgacttcaagaaggatgtgaaggtcttccgggccctgatcctgggggagctggagaaggggcagagtcagttccaggccctctgctttgtcacccagctgcagcacaatgagatcatccccagtgaggccatggccaagctccggcagaaaaatccccgggcagtgcggcaggcggaggaggttcggggtctggagcatctgcacatggatgtcgctgtcaacttcagccagggggccctgctgagcccccatctccacaacgtgtgtgccgaggccgtggatgccatctacacccgccaggaggatgtccggttctggctggagcaaggtgtggacagttctgtgttcgaggctctgcccaaggcctcagagcaggcggagctgcctcgctgcaggcaggtgggggaccgcgggaagccctgcgtctgccactatggcctgagcctggcctggtacccctgcatgctcaagtactgccacagccgcgaccggcccacgccctacaagtgtggcatccgcagctgccagaagagctacagcttcgacttctacgtgccccagaggcagctgtgtctctgggatgaggatccctacccaggctagggtgggagcaacctggcgggtggctgctctgggcccactgctcttcaccagccactagagggggtggcaacccccacctgaggccttatttccctccctccccactcccctggccctagagcctgggcccctctggccccatctcacatgactgtgaagggggtgtggcatggcagggggtctcatgaaggcacccccattcccaccctgtgccttccttgcgggcagagagggagagaagggctccccagatctacacccctccctcctgcatctcccctggagtgttcacttgcaagctgccaaaacatgatggcctctggttgttctgttgaactccttgaacgtttagaccctaaaaggagtctatacctggacacccacctccccagacacaactcccttccccatgcacacatctggaaggagctggcccctcagtcccttcctactccccaacaaggggctcactatccccaaagaaggagctgttggggacccacgacgcagcccctgtactggattacagcatattctcatctctggccccgaggctgcctgtggggcgagtggagacctcccatcactgagacagatcacagaccacgagtgcctttcccggacctggacgttgcctccagagcaggcaccagctctttccctctctacacagaaatatttttgtaaggttctggggcagggagggagcatgaagtacgaggaaaacttgaattccagatttttagtgcaaagtatttatcatttctaccagaaataaacgttttaagtttttacttgactaatgagacccagagtttggagaaaacttttggccaatgctgccacctgatgtcagaaagtgtccccacaccctagcagtggcctatcttggaacaagaacttcgaaagcacctactgtgtgctcagccatttgaggaaggaaggaggagaaggaagatgttactagggaaggatgagataaaacttctgcacccaagacaatgagacagacatagctgcaaccgtagtaagccagtcagaaatagccagcgcgaaggcaagagatggggtggagattggaaccccgcttcagatctgggctcggctacttacctgctgtgcagccatgggtcaagttgcttgacctctctgtgcctccactcccttagctataaaatgagcttacttaaaaaaaaaa

SEQ ID NO: 64168 - DNA, 682 bp, Homo sapiens
atttgccatttctctatgggttggaattggagctcaaatatatcctccacttcctgagagaacattgccattgcaccttgatatccaaggctgtaacagcacctacaatgagacaaatttgatgacaaccacagaaatgccatttactactagtgtttttcaaatatacaatgttcaaaggactccactgatggataactggtattctttatcatatctgtacttcagcactgttggaactttggtaacattattagtggggatacttgtcagtttatcaacaggaggaagaaaacagaacttagaccccagatatatactaaccaaagaggactttttatccaattttgatatttttaagaaaaagaagcatgttttgagctataaatcacatccagtggaagatggtggaactgataatcctgctttcaaccacattgaattgaactcagatcagagtggcaagagcaatgggactcgtttgtgaagctgctctgatactagatatccttaaatgatgtttcaattttatatgttttctaagataattggatcaggttttctttgtgtgtgtgtgtgtgttgtatcatgagtgtttgggggataagtttttgttaaaacaaagtctggactatcttcatttactacatcattaattgatgttactctggagtttacaatt

SEQ ID NO: 64169 - DNA, 1299 bp, Homo sapiens
  misc_feature (1)...(1299): n = a,t,c or g
ttttttttttttactgccataaagaatattatttaatccatgagacatcgtccctacaaagttagcgttacttttaaaaatgaagaccgtgatataaactggtaaaaaacgggcctgatgcgcctcgagcactccctgggagcaggccctggggtggctccgcccagtgtcgttctacctgaggtctacttgtgtctccccccttgttctctgcccccagaccatggccaaagcctttcccacaatgtcccatctgagagccttatggatgggctcacagggcagaggtaggaggagaaagaggaaggggcatggtgggcacccagccctgggggcaactgagggcacagccacgtccccagcaagggcacgctccagtagtagtgggggagaaggcaccagcagaggcagcgctgaggacctgggaagaaaaggaccctgccccaggagatggtctcagcaaggagcgggatattaggaactgagacccaagactcagagaggcaggtgccttgggtgtgcctgagcttgggtcaggatctcacaggcctcacgccccagaaaaaccccgccttaaccaaccatctcacgcggagtcagcctcgcctggcaggggggcacccaggtccagagcccgggccctgtcttgggtctctggctctctggcacacagagagcgctctgcagagggcagccctcgcaggcagaccctgttccagcagggctgaggggccagccgtgtggcccagcggtcagtgcagcacctggtccagctcatacttctcgcagaagcggctggtgaaggggaagcaggtgaggtgctcgatccagggccagttaatggggtagatgtacagccacagcacgagggcggcgaagaggccggcaaaggccagcagtgacaccaggatgagtgcccgcttgcggtacttgtcgctggtgccgaaggtgatgtagggcaggaaggcgaaggccagcagcaggccactgaggaagccgaagatgtgggcgatgttgtcgatccagggcaggaggccacagatgaacaggaagagcncgatggccgagaggttgaggaaggccttccagggcctctccagcagcggccagctctggaagagctccacgaagaggcaggcgaggaggccgaactgtgagccggccgggcccacctctgcccggtatgggagaaagatggcactggcgaggttgcctgtgatgccactgaggatgaagatgatggcgatacggtgccannngnncngcttctccaggtccctcaggatggtcatttgaaag

SEQ ID NO: 64170 - DNA, 687 bp, Homo sapiens
ccgggacacacttcggcgagtgcttaacctacctcccaacaccattatggaatataaaactcacaccgacagcatcaaggcctgggaggagtttcatggcctggtgaacagcagcggccgctgatcggacgctccccctctgtctctcacactcaggggacaattcaagctttcgaaatacaaaaatcacattgtgagagtacacaagctggcaataatccttttctgtatgtgtgtgtttgtccgaaatggatgggaggcctccagccagtccttccattgctcactgaagggacgtccctgagccgtgcgctctccttttgcactcattcctggaggacggattccgctagacaccctccagcatcgctgactttataaagcggaaaaacggaaaacgtgactttgtaatagacaaacattgttttttaatggggttccatgggggggcgttcagcctttctgtttgctgtgtgctgtccagatgcctcttgggcgtcctgttgttctcttcccgtgttgtacgaagggtaccgtggccacgtgtacatgccagagctgttgatgagagttaccagtattatgaatgtctgtgcatccaggaaaagtgttctgttggagagtcccaaaatagctgtaaatgctctcttctagctctgccattaaattattgggacattttgtttc

SEQ ID NO: 64171 - DNA, 659 bp, Homo sapiens
acacattcttatatcagcatcaagactacataacagtgaggtgggtttttttgtagagaacatacagaaatttggagaaaggatcatcaagtattgacaaagtcagaaacttagtactgctaaggaaatttattttttggtcacttaatatgatactaataacttgtttaaaatctagttaactactgcattataatttattatattctattcacagggcttcattatttcaaaaatgttgtgctagtgggatccctacaggatcgctatgttccttatcactctgcccgcattgaaatgtgtaaaacagctttaaaggacaaacagtcaggacagatctattcagaaatgatccacaacttgcttcgacccgttctgcaaagcaaggactgtaatttggttcgctataatgtcatcaatgcattgcccaatacagctgattcactcattgggagagctgcacatatagctgttcttgattcggaaatatttttagagaaattctttctggttgctgccctcaaatatttccaatagtataaaagcattgttagcgactggacaattacctcattcaacaatgtttcaaataatgtattatattaaaatgtatgtatgctgataagttctaagaaatatttatacctttttatatggaa

SEQ ID NO: 64172 - DNA, 1455 bp, Homo sapiens
ggacaggatgctgggggactcggggtagggagaatgactgggttcctgcccttgtgtccccatctgcgctgcctgcccctcaggtctggtgacagcaggcagttaggctgacagctgccaggcgtggtgtcacagcactggccgggggccctgtgcagggagaggatgagggtggggtgggctcgggtgtggcacttggctccctgggatgtcgggagctgagcttttcatgctgcccacggtcccctcctgtgcctctccccagatcatcagggctgctgccgacagggacagggagactgtgcgggcgaaatccatagagatgaagttcctcaccggctacgaggtcaaggtcatggaagacgcccacttggatgccatcctcatcctgggggaggccttcgcctctgatgagccttttgattttggcactcagagcaccaccgagaagatccacaacctgattcccgtcatgctgaggcaccgtctcgtccccccacccgaggaaacctactccctgcacaggaagatggggggctccttcctcatctgctccaagctgaaggcccgcttcccctgcaaggccatgttcgaggaggcctacagcaactactgcaagaggcaggcccagcagtagggctgcgggccacgcccaggccggctccgcgggaactctctccctcagacaggccaaaaaccagtagcgaggtcgtggtgatgctctttttaactcctttgcccaataaggggggtggctgcctggagccccgtagccagcgctttccacggtttctgttgctaaatggttgtagggtgagaagtgcaagaatgaagatgaagccccactgctcggtcagtctgcctccgtgtgtcctctgaaataagcagatgaagatgaaagggcaactttgttttcttctttttcctgatgtgaatgttaagcagaagggagagagtccttactcccttccaatctctgttcagtgcaaaacccagaaacatgaacagatacgattgtgggatttttatcatctgtgtagtaggtgtgtgtatgtgtttctagagtgagatttgtgttttctgcccttttcctctccagccgatgggctggagctgggagaggtgctgagctaacagtgccaacaagtgctccttaagcctgcgaggcccaggcctgtggggctggttctcacctttgacagctgaatgttcctaaagaactgctgccccacagtgagggtgggagcagcggaacagggaatgccagacacaggctcgctgctgctggaaggcggggtgggacttccttcctctgtccggagaggcacaggtgtcaccagttccagccaaaggctcctcacaggcgctgtgaatttttgtacaagtcttgtaattatcgaatcaacaacttgcttcaatttaataaaaatgctcatgggaagtgcaaaaaaaaaa

SEQ ID NO: 64173 - DNA, 1483 bp, Homo sapiens
gttgacactttgtggtgatatccaactaatgctggcccagaatgcaaataatagagcagcacaccttgaagagtttcattaccaaacaaaagaagaccaggagatcctgcatagccttcacagagagtccagttgccaaggatttgcatgggcaactgatttgtctacagacttagaaagtcaactctctgttagttgtaaatgttatgaggctgctaatgaaatcttgcagtttagggacttgaaaagccaaaatccagaacactatgtacaagtattaaagagaatgggtaacattagaaatgaaattggtgtgttttacatgaatcaggctgctgcattacagagtgagagactagtgagcaaatctgtgtctgctgccgagcaacagttgtggaaaaaaagcttttcttgttttgaaaagggaattcacaactttgaatcaattgaggatgccaccaatgccgcccttttattatgtaacacgggaaggctcatgcggatttgtgcgcaggcccactgtggtgcaggggatgaactgaaacgtgaattttcaccagaagaaggcttgtattataataaggctattgattactatttgaaagcgctaaggtcattgggaacacgagacatacacccagctgtttgggattcagtgaactgggaattgtccactacttactttactatggcaactctacagcaagattatgctccgttatctagaaaagctcaggagcagattgagaaagaagtcagtgaggccatgatgaagtccctaaaatactgcgatgtggattcagtgtctgctcgacagcccctttgtcagtatcgagctgcaaccatccatcacaggctggcctccatgtaccacagctgtctgaggaatcaggttggtgatgaacaccttaggaaacaacaccgggtgctggcagatcttcattacagcaaggccgcaaagctgtttcagctgctgaaagatgctccctgcgaactgcttagagtacagctagagagagtagcatttgctgaatttcagatgaccagtcagaatagcaatgttggaaagttgaaaacactatctggggctcttgatataatggtgagaactgagcacgcattccagcttatccagaaggagcttatagaagaatttggccagcctaagagtggtgacgccgctgcagctgctgatgcttctcctagtctcaatcgagaagaagtgatgaaactcctcagtatatttgagtctcggttgtcatttcttctccttcagtccattaaactgctatcttcaactaaaaagaaaacaagcaataacatcgaagatgacacaattctcaaaaccaacaagcacatttactcccagcttttgagagcaactgcaaataaaaccgcgactcttctggaaagaatcaacgttatcgtccacctgctgggccagcttgccgccggcagtgcagcgagcagcaatgccgttcag

SEQ ID NO: 64174 - DNA, 1431 bp, Homo sapiens
tgatacgccagcttgcacgagggtgcggcccaggacgctcttcctaactcaggctctccccgccccgcccctgcagtgcaagtcctggtggatggagctccggtgcgcattgagctctgggacacagcgggacaggaggattttgaccgacttcgttccctttgctacccggataccgatgtcttcctggcgtgcttcagcgtggtgcagcccagctcctttcaaaacatcacagagaaatggctgcccgagatccgcacgcacaacccccaggcgcctgtgctgctggtgggcacccaggccgacctgagggacgatgtcaacgtactaattcagctggaccaggggggccgggagggccccgtgccccaaccccaggctcagggtctggccgagaagatccgagcctgctgctaccttgagtgctcagccttgacgcagaagaacttgaaggaagtatttgactcggctattctcagtgccattgagcacaaagcccggctggagaagaaactgaatgccaaaggtgtgcgcaccctctcccgctgccgctggaagaagttcttctgcttcgtttgagcagctatggctgcatagcaagtagtaggcaggaggccaaagacttctgagacctggggcacccgggcctttgcggcagctactggcagggcctggccacctcataggactcagttcccttctgaacactcgggggacatgggcctctaactgcccactctgatatgcctgggtgagcctaggagggaaggctctgatttggatttctccagtcaaagctcacagaaaaaaacctggcactttgattttcatgggatggtcctaacagggtcagtcacctccgagcagtttgggaacccagtttcttgtcctgggccctcaggtcagcctggctgaattaggacccttccttggcacaggggtgagaaagagcttggggaacgcttggcattatggagggctggaaggggctcaaccccgatttggagagaagtttgggatggagtgggcgagagattgagagagcgagcaggaaaagaggtcttggagcctgggactgatggtggataaggcctggaaagaagatgacgaggaggaggagagagggaagtggggtggatgaggagcaggctgacacctgggctgccctcaatccccaaggccagggagggcggggctggcccctgggaagaactgggtctctgggctccctaggcactgcccaaactggctgagccaggagtggggcaggaagtgagagtcaaggcccagcaaaaggagggggaggagctgcaaattagaacctgaaggaggaccgggttggggatcatccctttcctcaaggtcacacagcctagaagctagagcagtgcagagtctgcaaataaaaccttaagtctgtgaaaaaaaaaa

SEQ ID NO: 64175 - DNA, 585 bp, Homo sapiens
cccacgcgtccgctggaacgaggcccctccgggctggggatgggcctgatcgacgggatgcacacgcacctgggcgcccccgggctctacatccagaccctgctcccgggcagccccgcagcggccgacgggcgcctgtcgctgggggaccgtatcctggaggtgaatggcagcagcctcctgggccttggctacctgagagctgtggacctgatccgtcatggcgggaagaagatgcggttcctggtcgcgaagtccgacgtggaaacagccaagaagatccatttccgcacgccccctctctaggggggctgcgaggacacccccacaggcccggcacccggtcccacctggtgacactgggcttcctcccgccttcgtccctgttttgtaactgaccaagttgggtcccgggtggggagcctcaccctggggacatgcctgttgataacatgcatctcagtgtaggttctatttatatggcagatgacgtgaaattgtgatgtttgttacagagcttttatgtttaaagacttcaatggagaagtacggttcaataaactatttttcccgttaaaaaaaaaa

SEQ ID NO: 64176 - DNA, 2061 bp, Homo sapiens; identical to SEQ ID NO: 64112

SEQ ID NO: 64177 - DNA, 1990 bp, Homo sapiens
ttttttttttttccaggtgtggatttttattttcacaaaaagacaacaatgtcttccccacatacaagtatttacaaaacccaactgattcacccatctagaacctgggtttttttccacttctcaacatagttgggaacatggaaacattaatacccacacaattcccagagatggaatttatccatcaaacaaacagtgcagattacctaaaagtgcacttacctgcacaactcggtctaagaaccttgtgaaacaaacctcatggccaaggtttcatgaatctatttggtttcataccatgcaaacctgaacaagtgtgctgctacactaaactgaaaatcggttctcattttacaattaaaaaggttctcaacactttagcaactatacagaatatgaaggtttatttcaaaaaagattacatttttttaaaccaggatacacagatgcacttaatgtaacagtaccttctgcaaaaataggttacataatactcagaaatgcaatgaacaatcttattctctaaaaattagacagctaagacttcttaagtgtagacagccttcaaaatggaggctgaaaatgcttggtaaaaagaagtaactctagagccagacaccacagagctaaggctgcaaattaaaccactaccacacagctgcaaactactctttatattcacacagcgttaaacaaaacgacttcaattccatcttttcaaatgtgcctcggtgctgcaagaaaaaaagttgaatgatacacaaaactattaaaagttacaacagaactatttaaacatcttctccaaaattgagaaaagcaatcatgttaaatttttaaaaagaaaagtctgacagaactctcaagcaagtcagaggtcctcttcataagtagtcaagtaaagtttacaggagatttcaataaattatcttaaaaccttggcagagagctcattttcagaatcgtcgcggaggtccacccttaaatggcttaaatccggagccacttcctcttggcatggaattgccactgatttgtacaattctattaattggggatgcgttacttgaatgttgggttatcatgcctgctcctgcccggccgtcacccattcgcctcgtatcatgatagctaggcccttgagagggtggaccatgccactctttccttggtccgcttgtgtcccgtccatggcgttcaaccacatgtcgctcctcaggatagtgctgtgatccacctcctcggtctgtgatgactcctctgtctccctctctgctcccgtaccccgaagcgctgctacgattcccagggggagcgcctctcacactgtgccctgatacttctctcccagatcgttctggcctttcaactcttgtttcccgtttgtcagtggacatgcttccttcacttttccagctggtgggtctggaaggattgggccctgcctctcgaggatgtctaggatgagtgatatcaggcctgtcatgaataatcaccgttctcctttcgtctcgctcccctcgtacttctcgcctgtctgattctctaagttcatttcttggtggtggaggctcatttcttctggagtcactgaaatttttgggatatctttcgaagcttggatcttcccttcgtgcagtaggtcgtgcttttttcccctcactttgaccaacaaagcgatcccgcctttcaaaagatgaagactgtactgctgaactctcaggaaacctgcccctctctcggtgatcaaagtcattaaatctgttctgttggcgagagtagtcggatccatggccaaatcgtgcatctgtatctagagacaactttttattctcgctccagtaaggatcatctcgcctatgatctacatcacgtgggcgtttcaaggaattccttttttcttgttcataacgaagctgctgttgttgccttctgagttcctctctttctcgagcaatccgttcagcttccttacgacgttcctgtt

SEQ ID NO: 64178 - DNA, 2963 bp, Homo sapiens
caggaaatgaaagggattgggacaccccctaacactacccctatcaaaaatggctctccagaaattaagctgaaaatcaccaaaacatacatgaatgggaagcctctctttgaatcttccatttgtggtgacagtgctgctgatgtgtctcagtcagaagaaaatggacaaaaaccagaaaacaaggcgagaaggaacaggaagaggagcataaaatatgactccttgctggagcagggccttgtcgaagcagctcttgtgtctaagatctcaagtccttcagataaaaagattccagctaagaaagagtcttgtccaaacactggaagagacaaagaccacctgttgaaatacaacgttggtgatttggtgtggtccaaagtgtcgggttacccttggtggccttgcatggtttctgcagatccactccttcacagctataccaaacttaaaggtcagaaaaagagtgcacgccagtatcacgtacagttctttggtgacgccccagaaagagcttggatatttgagaagagcctcgtagcttttgaaggagaaggacagtttgaaaaattatgccaggaaagtgccaagcaggcacccacgaaagctgagaaaattaagctattgaaaccaatttcagggaaattgagggcccagtgggaaatgggcattgttcaagcagaagaagctgcaagcatgtcagtggaggagcggaaagccaagttcacctttctctatgtgggggaccagcttcatctcaaccctcaagtagccaaggaggctggcattgctgcagagtctttgggagaaatggcagaatcctcaggagtcagtgaagaagctgctgaaaaccccaagtctgtgagagaagagtgcattcccatgaagagaaggcggagggccaaactgtgtagctctgcagagaccctggagagtcaccccgacatagggaagagtactcctcaaaagacggcagaggctgaccccagaagaggagtagggtctcctcctgggaggaagaagaccacagtctccatgccacgaagcaggaagggagatgcagcatcccagtttttggtcttctgtcaaaaacacagggatgaggtggtagctgagcacccagatgcttcaggtgaggagattgaagagctgctcaggtcacagtggagtctgctgagtgagaagcagagagcacgctacaacaccaagtttgccctggtggcccctgtccaggctgaagaagactctggtaatgtaaatgggaaaaaaagaaaccacacaaagaggatacaggaccctacagaagatgctgaagctgaggacacacccaggaaaagactcaggacggacaagcacagtcttcggaagagagacacaatcactgacaaaacggccagaacaagctcttacaaggccatggaggcagcctcctcgctcaagagccaggcagcaacgaaaaatctgtctgatgcatgtaaaccactgaagaagcgaaatcgggcttccacggcagcatcttcagctcttgggtttagcaaaagttcatctccttctgcatccttaactgagaatgagcttttgtgggagcccacaccagtcaagttggatttgaacccagctgctctgtactgcacttagaatgatgtaatattccaggatgctgctgcaggtggcgtatcatcgtacacactcagtgacatttctatcacaatcattttatggaagatgtgtgataatctgtttttactggtattaataaacacatacaatgaagaaaacagataacaaattttaagaccaaggtaagataactaatcaaggccatttaatccgtcacattcatctcataatagaaacacgttcatattccagtggtcaatgtagatttcaagttgaaaggcagtccctttagttgggggctgtccagagctgcagcagggctttgcacggaaggggtggccctgttagagttgcttctcctctagtttgtaacttactggacttttgtggaaaatatcagcgtcgctaccctcagaaacaaactaacagcacacgttaggaggagtcctcatcagctgttctcattgccagtgagatatattcagtattgtagatactacactaatttccaacataagaggcaggaagagttttgattctatccttttttactaaacagttttattatgacactagatacagtaaatttttagaaaaaaataccatttacagtattattgtgaaccatttaacccttttgatccaaggccccggaccaaggggatactgtaatcaggttatgtacaccaacctctgcatcagttgcttctatagagcatcagccctcatgtttcattgtcttaatgtcggggagcagcctggtgtcctgccccaggtgtccgcatttttgcatggtaaggagaaggcttacttgcccttcagctcataaaagcagaaggtgtgctattcacagtaccatgcgagtagcccacagttaattcccggcagattctttggctgtgttttatctttaatgaacgtttctgactaatattttgttgtaaaccattaagtaatgtaacgcatgtaagatgcttagggtgcctggccaggactccgtggtttcctgttgtgacagtaataatggttataataataaaaatgataaaattgccatcattctatttttatccaaaagtataaattttgctttggcatgaaaagtggtcctcttgactgcattatgcatgcgaggatgaaataaacctagaagtggcagaacactggatttgtgtgtgtggcgctttagggtgctggactgtatggctgagggctggttgggttcctctattggctctgctcaaatgttgcaggatacatagccccaaagatggtctaggagcaatctaagctgtgttactccaaaggacatgaaaaagctcaagagtaaaattaaaattctc

SEQ ID NO: 64179 - DNA, 1553 bp, Homo sapiens
tccccgcacggtggtccctcgttggtgcgtggcctgacatccggctggaggcctcgggtgctccgaaagcggtaccttcgggggcccccccgcacccattgtttttccatggtttggactggatatcggtggaactctggtcaagctggtatattttgaacccaaagacatcactgctgaagaagaagaggaagaagtggaaagtcttaaaagcattcggaagtacctgacctccaatgtggcttatgggtctacaggcattcgggacgtgcacctcgagctgaaggacctgactctgtgtggacgcaaagataggtgatcttcagctttgcaaactggatgaactagattgcttgatcaaaggaattttatacattgactcagtcggattcaatggacggtcacagtgctattactttgaaaaccctgctgattctgaaaagtgtcagaagttaccatttgatttgaaaaatccgtatcctctgcttctggtgaacattggctcaggggttagcatcttagcagtatattccaaagataattacaaacgggtcacaggtactagtcttggaggaggaactttttttggtctctgctgtcttcttactggctgtaccacttttgaagaagctcttgaaatggcatctcgtggagatagcaccaaagtggataaactagtacgagatatttatggaggggactatgagaggtttggactgccaggctgggctgtggcttcaagctttggaaacatgatgagcaaggagaagcgagaggctgtcagtaaagaggacctggccagagcgactttgatcaccatcaccaacaacattggctcaatagcaagaatgtgtgcccttaatgaaaacattaaccaggtggtatttgttggaaatttcttgagaattaatacgatcgccatgcggcttttggcatatgctttggattattggtccaaggggcagttgaaagcacttttttcggaacacgagggttattttggagctgttggagcactccttgagctgttgaagatcccgtgatcattacctggggaggggttcctgaaaccttccacaatgggatctgtggactttcatttttttaagagacttactcaatttcatgactgtactacctgaaacaaagtgagaaaggacaggtgtatttttctaagtcatcaagataaatccttaagaattcagtctaaattagcaaccaggaaggaaaaatatattaaaaacaacaaaaaagtggcacatgtccaggcagtgtgaggatttgctgtatataagttgcctgctttgtatttttgaaatctctgcatcactcattggaagtgcttctgaagagagctgctctgtgttcagttgactggttttgtgtcctgtttgaacttgctgaatgtaaggcaggctactatgcgttataatctaatcacaatttgtcaatatggtcttggcaatcatctgtgcattactctggtttgcattaagcctgtgtgtgaacttactgtaaaacatgttttatttcaaggttctgcaaaaaaaaaa

SEQ ID NO: 64180 - DNA, 1199 bp, Homo sapiens
tgccgctagccgcctgggaatttaagggacccacactaccttcccgaagttgaaggcaagcggtgattgtttgtagacggcgctttgtcatgggacctgtgcggttgggaatattgcttttcctttttttggccgtgcacgaggcttgggctgggatgttgaaggaggaggacgatgacacagaacgcttgcccagcaaatgcgaagtgtgtaagctgctgagcacagagctacaggcggaactgagtcgcaccggtcgatctcgagaggtgctggagctggggcaggtgctggatacaggcaagaggaagagacacgtgccttacagcgtttcagagacaaggctggaagaggccttagagaatttatgtgagcggatcctggactatagtgttcacgctgagcgcaagggctcactgagatatgccaagggtcagacccttcgccagggcaggaccccacttctcagatacaaagatctgtatcccttgaggccctccagaggttatctgcccatcatctcaccatcatggaactcacccttgaatctccagtagttgacaaatctgaaatggcagaaaggggaagggaggggtggggtggtgagctgggctgatgccaaattcttaatctctcagggtcagagtcagaccatggcaacactgaaaggcctagtgcagaagggggtgaaggtggatctggggatccctctggagctttgggatgagcccagcgtggaggtcacatacctcaagaagcaggtaggataagtcactgccccatccagggaggtgagaagggaacctgagaggggagctaggttctagggtttgactataggggatgtctacccctaagcatggggaagggggcagagtgaggactgtgccattgattaaagtgggtccaggagcggtggggtgcggtggctcacacctgtaatcccagcaatttgggaggctgaggcaggtggatcacctgaggtcataagttcgagaccagcctggccaacaaggcaaaaccccgtctttaataaaaacacaaaagttagctgggcgtggtggtgcacgcctgtgatcccagctacttgggaggctgaggcaagagaattgcttgaatccaggaggtggaggttgccatgagccaagatcgcaccattgcactccagccagggcgacagagcaagactccatcttaaa

SEQ ID NO: 64181 - DNA, 869 bp, Homo sapiens
gctggagaaacgcgggtcgcggtcctgcggtcctggacttggccccagacagccggcagggtcgtggccagaacgccggccgggaccatctgcacaggcgctcgacagctccaagacgctgcggccaagcagaaagttgaacagaacgcggctcccagccacaccaagttcagcatttaccctcccattccaggagaggagagctctctgaggtgggcaggaaagaaatttgaggagatcccaattgcacacattaaagcatcccacaacaacacacagatccaggtagtctctgctagtaatgagccccttgcctttgcttcctgtggcacagagggatttcggaatgccaagaagggcacaggcatcgcagcacagacagcaggcatagccgcagcggcgagagctaaacaaaagggcgtgatccacatccgagttgtggtgaaaggcctggggccaggacgcttgtctgccatgcacggactgatcatgggcggcctggaagtgatctcaatcacagacaacaccccaatcccacacaacggctgccgccccaggaaggctcggaagctgtgatgggaaggaggcctgcacttggacctgacctcaagcctcagctccagtgggaccttgtaaaatgctccctgtcagagctctccagaatatgcttgttggagatccttcaggcagtaagggagagttttgcctccttacacagtggcctttgcttgcacctccagctggagatgggtgtgccccagaagtaagctttgcatctcttacaagaggggagctacaggggcagccgtggcctaggcccaaactctgctctgagaaaataaatatctgtaccacctgtaaaaaaaaaa

SEQ ID NO: 64182 - DNA, 1337 bp, Homo sapiens
gaaccaaaaactgaagattaataaaaacacatgactggagactgaatgtaaatcctatgtgactgaatgtgaattatatgctttggggaaatactgattattccaaggctaggtgacactccctcattcttccccaaacccctgggcccggaagactgaagaaaagtttggaagtcacaaaaagtagaaaataaactcttgtattgtagcacatttcatcacagcctgactaggaccagtgctcgactttctggtggcagggcccagagctcacggacaccactgacagtatggggggtgttctgcttggcaccatgtctggctttttggccagaagtcctttgcagagctgaatatccccttgccagcccgccagctctggctgggaggacttgctcttgggtctgcagcctgcatcaggagcctccactttccccagtgctggattatgcatcctgctctccagggtccaccttgttgctacagctgcatggcttcctgctccactgactggttcgagggtgccaggtacttctcctggatgcccagtgtggaagagaaatggaagtcggctcccattgcggcagacatcatggcttccaagcttcgctgctcttgggctctgaaacagtatccattggctttatccacagcctgcaggactcgctggatgctctccttgtcctggatgttgagagggataaaggagacaaggctatagtcttcgatgagctgcactagcttctcattgagctggcggtagtggcggaagaaagggtcagaagccaggtggtcaagcaggtaggagaggtccagaacctctgtgtagtagtccaggttgaaggccagcttcccataatgctcaatgaggtccatcttggaaaggaggttgatgtggggcagttccacgtgcagcatggtggccagggaggtacacagtactgaaatgaacttggcagggtctgtgcagtagtgagaatccacgaggtggacggcagtcagcctgaggtcccactgcgccatttgggagaagatgctgcgcaaggcgccgtgatgcgtgcagagctccacctggcctgggcagtcgaagaggaagtagtggccgcggagggggtcgagcttggcacgcagccagtccaggttggcttccaggtactccatgcagtagagcaggccgccgttgggccccaggcgcacgcgtgccatcacgtcgcccagccccaccagctcgcccacgtccacggcacactcgtacggcagcccctcgttggccgggtccaggttcaccagcgccacgcgccggcccagcgcgcgcaggaactcactcatgcccaggc

SEQ ID NO: 64183 - DNA, 1450 bp, Homo sapiens
cccagaggagagcacgggcagggtgtgctggcgttgtgagcgggagtgtcagagacagaaaggacaccaaggcggggagagcccagggagcatgagcaggcctgtttgccgagcagagcctgcaggccttgcagcaggagctggcttgggagtgtgactaccgtcgtgaggcggcttgtgcccagaatttcaggcagctgctggcaaatgaccccttcttccgggtcccagccgtggttaaggagctgtgcacgacacgggtgctgggcatggagctggctggaggggtccccctggaccagtgccagggcctaagccaggacctgcggaaccagatttgcttccagctcctgacgctgtgtctgcgggagctgtttgagttccgattcatgcagactgaccccaactgggccaacttcctgtatgatgcctccagccaccaggtgaccctgctggactttggtgcaagccgggagtttgggacagagttcacagaccattacatcgaggtggtgaaggctgcagctgatggagacagagactgtgtcctgcagaagtccagggacctcaaattcctcacaggctttgaaaccaaggcattctccgacgcccacgtggaggcagtgatgatcctgggggagcctttcgccacccagggcccttatgactttgggtcgggggaaacggcccgccgcatacaggacctcatcccggtgctgctgcggcaccggctgtgtcccccacccgaggagacctatgccctgcaccgcaagctggcaggggctttcctggcctgtgcccacctccgagcccacatcgcctgcagggacctcttccaggacacctaccaccgctactgggccagtcgccagccagacgcagccactgccggcagcctccccaccaaaggggactcctgggtggatccctcatgacagcctccatgggggattcagtccccagagcaggccgtaccctgctgtagtgcctcttatcccttccccgtctgccctgggtcagaggagcccccttgggcttcccagtcttgcctggctctcctccttggcccaggagctcaggatccctggggctggggaactcccaacttcgtgccctagatcctgcacctccccactcgaaagtgggtatccgaaaactaagccagggaagcggttaacttatctttgccaacatttgagggagccttgggccgctgcatgtcgttatgcagatcagactcatcagggggagccctcacctctgcctcaagcctcccgtggaaggcgagatggtcctggaggcagtcctcacctctgcctccctcgctcctccaacagctgccttctcccgggttccagcctctcagtgtgttggaaaggtaggggtgcggggtgggggggagctgaatcttcaatcggaataaaagcagccctccccttcaaaaaaaaaa

SEQ ID NO: 64184 - DNA, 668 bp, Homo sapiens
  misc_feature (1)...(668): n = a,t,c or g
ttttttttttttggatcactcaggcctcagaatgaggctgctttattggaagctattctgacatcactttccagactgtctcactgtcttgggaccaggcatgggaggcaggggtgggaatcttcttgtgattgtgggtggtggctggaggagtggagtggtgggaggcggctcagtcgcgggcactcctgcgactggcggatgcggtccggatggaataagccttcaggagcccaggacccgcactgctggagaagctcagggcattgctgcccatggttcccccgagggtcagcccaatgccaccgccactgctactgccaccagtggaattcatcacagctgggagagaaaagaggagggctctcttcagcgtgaggctccctaccagggaccccatcccttcactgcaccccaccctcctgccccagctgcccctctccctcacccctgcccccctccatgggccaacccagaaggagcatctgacaggggtagggctgctccccaggtgctcctggccccaccctgccctcttgtagtgcttcccaggccattgagcctggcagtatgtgctccaggggacctgtcaatccctgtagaaaggaaggagtctcctggcccctccagcgaattccaccacnctgcctagtggtnatcgatctcga

SEQ ID NO: 64185 - DNA, 2068 bp, Homo sapiens
gagtggcgggggcatttgctggagactgagcctggcgcggaggctatgggcagccaggaggtgctgggccacgcggcccggctggcctcctccggtctcctcctgcagactaacgctgctttactcaaccaccctcttcctggccagagaggccttccgcagagcatgtctcagtgggggcacccagcgagactggagccagaccctcaacctgctgtggctaacagtccccctgggtgtgttttggtccttattcctgggctggatctggttgcagctgcttgaagtgcctgatcctaatgttgtccctcactatgcaactggagtggtgctgtttggtctctcggcagtggtggagcttctaggagagcccttttgggtcttggcacaagcacatatgtttgtgaagctcaaggtgattgcagagagcctgtcggtaattcttaagagcgttctgacagcttttctcgtgctgtggttgcctcactggggattgtacattttctctttggcccagcttttctataccacagttctggtgctctgctatgttatttatttcacaaagttactgggttccccagaatcaaccaagcttcaaactcttcctgtctccagaataacagatctgttacccaatattacaagaaatggagcgtttataaactggaaagaggctaaactgacttggagttttttcaaacagtctttcttgaaacagattttgacagaaggcgagcgatatgtgatgacatttttgaatgtattgaactttggtgatcagggtgtgtatgatatagtgaataatcttggctcccttgtggccagattaattttccagccaatagaggaaagtttttatatattttttgctaaggtgctggagaggggaaaggatgccacacttcagaagcaggaggacgttgctgtggctgctgcagtcttggagtccctgctcaagctggccctgctggccggcctgaccatcactgtttttggctttgcctattctcagctggctctggatatctacggagggaccatgcttagctcaggatccggtcctgttttgctgcgttcctactgtctctatgttctcctgcttgccatcaatggagtgacagagtgtttcacatttgctgccatgagcaaagaggaggtcgacaggtacaattttgtgatgctggccctgtcctcctcattcctggtgttatcctatctcttgacccgttggtgtggcagcgtgggcttcatcttggccaactgctttaacatgggcattcggatcacgcagagcctttgcttcatccaccgctactaccgaaggagcccccacaggcccctggctggcctgcacctatcgccagtcctgctcgggacatttgccctcagtggtggggttactgctgtttcggaggtattcctctgctgtgagcagggctggccagccagactggcacacattgctgtgggggccttctgtctgggagcaactctcgggacagcattcctcacagagaccaagctgatccatttcctcaggactcagttaggtgtgcccagacgcactgacaaaatgacatgacttcagggaagcctggacacccgaggcacctggaccagctatgggtagttctgtgggtggaacacattctgtgtaagagccccactgagggctctgcagcggagtgacagcaaccccagagatgaggcaccagagagtgccactgcatgagacacctgtgaccattcgaagtctgaaatgcggggggggagtttcatttttaagtgaagaccaaaagccctttaaaaataatagttttttatcattttatagtaatcagcattttctcttttactaatatactcattccttttgcgtatgattggcctttggagctacatgctccaacaaactgtatcttaattgttaactgttaataattatctggcccagaaaaagagatgcagtgattttacccttcacaggaatattgaacttcttctgtaaaagagagagagaaacctctctctttcatgcaccacatggaaacagagtgtggccctg

SEQ ID NO: 64186 - DNA, 1030 bp, Homo sapiens
  misc_feature (1)...(1030): n = a,t,c or g
ttttttttttttaaagtttgttttgtgggtttttttccattttcttttcgctacccaggtatatgcagcaccttgtgaactcccaacaaggttcccagcttttaaacacatttaaacatcttggaaagacttattgaattcttcaagaatctaaaaaccagaccaaaacgtggttttgcttgtgaacattctggtagagaccgaagtgaaggcgggagtttggggttcatgttttttaaaaaaagaatcaatataggtgatgggaaggggtaaaggaatgcaaggaattcaggccattctgtgggagggggttactctctctcccatttaaaggggcccattaaaaagggagccaaactgaggatcccataaggggggagtcagccagggagcttgtggtgtggttttccccccaccccgcttgttgaatagggggttttttgccttaggggggccatgggccagggggtccccccactttgcttccccctcccctttgggccctgaggatgggcaagggggcaagtacaaggggggcactgaagggagcacggtcacgacctcctcattcccagaatcatcatcatcataacagtcggcatcttcctcctcctcatcttcatcatcaatgtcgtcatcatacaagtcgtcgtaaagcaaatctgagctgttgtcattggaaggcactttagttttgatgcagtattccgccagggttgtggggaccttcactccatccttttctgcttcggccttagtggctgaaacttgtttcctcacattctgagtaggattccacctttcagaaggcagttctccactctgtgggtcatctacaggcggatgaagaatcgaaatgcatacatctccattcttgaagtagccgccttcgtagagggtgttggggggtccgaagatggccacctcccagttgtagaggtcggactcgtccaccagggtgatccggaagccctccaccggttcctcctgcagggatttccgctcgagccgnaattccaccacactagac

SEQ ID NO: 64187 - DNA, 1852 bp, Homo sapiens
ttttttttttttgagaatttagctgttctttattgacatggaatttggggtggcgagggtagccacaccctccaggaggatgaggtaggttcagtgcttccagctcacacctttcctgggtcttccttcagtgtgacagttcggttaaagacaagctttccctgatggctgtctggatccacggagaaatatccaagacgctcaaactggaacttgtcgaagggttttgccagggccacagagcagtccactaatgctgcatccaccacgtgtagtgatgccaggttcaggtcacttaaaaatccaccaggcacctcagtaggatcttcagggttcttgtgctggaatagtcgctcatagaggcgaacctcacacatcaaaggctgtgacacccagtgaataaaggcctttggcttctctccagcatctgcccgtctgcaggtcacctccagactctctacacaaccactggggcccttgacaacatgctgcagctcaatgacgtagcctgtatgcctcaggcccacaggctggccccaagccaggcgcttaaatcctggctctggctcctccttgaagtcagtcctctcaatgaagacaatgggtgcaaagggaacctgatggaagcctttggtctcatcagctgggaagttgggcacctggatgtccaaggacttggcagcaggaaagttggtgatgatgacccgtagtgactccagcacagccatggctcgtggggctgtgtcattcagcacatcacgcacacaggcttctagaagatgtggctccattgtggtttgtgccacagtcactcccacccgggcacagaagttgttgatggcctcaggtgggaagccccgccgtcgcagggccgtgagtgtaaagagccgtgggtcatcccagtcccgcacagcaccagttgctacaagctggaggatcttcctcttagagacaacagcatagtgcaggttgaggcggccatactcccactgcacagggcaatagacgtccagtgcattgcaaagccagaagtaggaagagcgtcgggcctggaattccttggtgcagagtgagtgagtgatgtgctcgatggagtcacagaggcagtgtgtgtagtcgtaggtgggatagatgcaccatttgtcccctgtgcggtggtgtggtgtatacttgactcgataggctacagggtccatcttgccatcctccatcaccagcttcatccgtagtgtggcctcgccctctgaaaacttgcccttgcgcattgcctcaaagagcagcagtgactcctccatgggacggtctctccagggtgaaggcagagtattatggcctttgagctcctctcctcgctggtggcacacataagccagacccctgcggatgagctccacagcccacgcatatagctggtcaaaatagtcagacgcatatgtgactttgtaaggtgtgtagcctagccaggctaccatgtcacagatggccgtgaagaactttgcttcctccttctcagggttggtgtcatcaaaacgcagaaaacagatgccattgttggccttggcatagccaaagttgaaattgatggctttggcatgtccaatatgcaggattccattgggttctggcgggaaccgggtacgtacctgcccaccagtaatctccaggtgctgctttagtagattcatggtgtgtggagtgaccacatagcctggggtcttgtagttctcaccaggcttgtggaacttaagggcctccccccggagctgctccatcagagacagggtctggtcagcagtctcgccattctccaccacatcctttgccgtcctccggtctgtttcttctagccgag

SEQ ID NO: 64188 - DNA, 2249 bp, Homo sapiens
ccgcctgggaggggacccgggctgccaggcgcccagctgtgcccagatggatgggacagagacccggcagcggaggctggacagctgtggcaagccaggggagctggggcttcctcaccccctcagcacaggaggactccctgtagcctcagaagatggagctctcagggcccctgagagccaaagcgtgacccccaagccactggagactgagcctagcagggagaccgcctggtccataggccttcaggtgaccgtgcccttcatgtttgcaggcctgggactgtcctgggccggcatgcttctggactatttccagcactggcctgtgtttgtggaggtgaaagaccttttgacattggtgccgcccctggtgggcctgaaggggaacctggagatgacactggcatccagactctccacagctgccaacactggacaaattgatgacccccaggagcagcacagagtcatcagcagcaacctggccctcatccaggtgcaggccactgtcgtggggctcttggctgctgtggctgcgctgctgttgggcgtggtgtctcgagaggaagtggatgtcgccaaggtggagttgctgtgtgccagcagtgtcctcactgccttccttgcagcctttgccctgggggtgctgatggtctgtatagtgattggtgctcgaaagctcggggtcaacccagacaacattgccacgcccattgcagccagcctgggagacctcatcacactgtccattctggctttggttagcagcttcttctacagacacaaagatagtcggtatctgacgccgctggtctgcctcagctttgcggctctgaccccagtgtgggtcctcattgccaagcagagcccacccatcgtgaagatcctgaagtttggctggttcccaatcatcctggccatggtcatcagcagtttcggaggactcatcttgagcaaaaccgtttctaaacagcagtacaaaggcatggcgatatttacccccgtcatatgtggtgttggtggcaatctggtggccattcagaccagccgaatctcaacctacctgcacatgtggagtgcacctggcgtcctgcccctccagatgaagaaattctggcccaacccgtgttctactttctgcacgtcagaaatcaattccatgtcagctcgagtcctgctcttgctggtggtcccaggccatctgattttcttctacatcatctacctggtggagggtcagtcagtcataaacagccagacctttgtggtgctctacctgctggcaggcctgatccaggtgacaatcctgctgtacctggcagaagtgatggttcggctgacttggcaccaggccctggatcctgacaaccactgcatcccctaccttacagggctgggggacctgctcggtactggcctcctggcactctgctttttcactgactggctactgaagagcaaggcagagctgggtggcatctcagaactggcatctggacctccctaactgggccccgctggtcccatttgctcattagaatttcctctcacatcagtgggatacagaattcagtttctcccttgccaggtccttgggatggttgacccctgcctctgcagtagccttttgtgagtctgctaaggtagctctcacacacctcggctctggggttgatacctgagcctgcaatagagccctgaaatcaagagcatggcttgagtgtgtgaatatgatgtgtgcacatgcttaatgagcgtgcaagtgtgcacacgtttgtggagaggagggtgttctggcctgagaaggtaaagaagaggcatgtccagtatgctttgcagggtgtgtttgctcttttccatgcccatgcaacccagattggggtggagcaggaaggagctcttttctgttcccaagcctcagaactcttgagctgtggcttacttgctgtcttcaccaggttcaagctccgtgggccacactgctgctgtgccaagaaggtgtacagcctccccaggatggggcctcatacaacccttcatctgcactcaacatttaatcgtgtccttgctgtctttttattttcctttttgtttgttagcaaaaacctctatttagatttcaataatcagagaagtgtaaaataaaacagattatattgtacttgaccctttatgtctttaaagatagttaatgcaaccctgaggcttggggtctataaataacaaaagcatctggaaaaaaaaaa

SEQ ID NO: 64189 - DNA, 1278 bp, Homo sapiens
ccttttttttttttttactcgccagtttcattattattaaagaatccatttgaatgtcagctcaacacagcctcctataccgaggcattgtgaaccgcatctccccagcttctccaggcttttccaagaatcagggacactgtagcctgttggtctcagtgtatgacagacacggaggaagcacatctttagctgatacttaaacagagaccctgagcgcacatacacccgcgcacacatgcatggagcttcaccttctctgtcattctgcagtgaccaggagagcaagagctcccacctcccttcaaaacactgtgcccatcccgggcactaaggcctctttaaagcacggcacctccacgagggagggccacagccacatacactccacctggcaggtggacagcgtgagcatgtggaccatagcagggacaaggtgccccggccagccccaacgccctctgccgctgacagggacagaagccctctccagctgcgtgtgctgcagaggccatgcgtagcctccagctgcattctattccactccagtgcctgggccagttagcaccagtgtggaagacagtgagctggctccggacaacagggatggaggaaaggtcccacattcacattcctgatacgtggacaaggtgaggggccgcaatcgctctggcagcattttaaagatggggaagtagcagacacccacgcgtgaaggcaggagagccccaactgtggtggaaatggccccagaatggtagggccaagcctagctccagacaccccagagccctggagaagccaagactgagggagaaagcctgagggaggagcgccccagtccccagggaccggcctggtgcagagctgcagctgatgttcccctctgtgcagccccaccctctgcctcgctgagctccctgctgcgagggcctcgggtgcaagggggaggcaggtctctatctcatggagctgtcagatgagacatcgcgatcggagtcctcagcctcgcttggcggcggcggcgggtcgctaagcgggaccgcagtgaaagcaggagactttcggtctccagactgggtgatgagccggcggcaggtctccatctgcacgtccaggccgcgcttcatgctgcacatctccatgtactcgtgcaggtgccggttcatgtcgttcttggccgtggccaactccagctctatctggtcaatggtctcctgatactccttctcccgggttttgaacagggactccgtatctttaatcaccttctccagg

SEQ ID NO: 64190 - DNA, 1690 bp, Homo sapiens
  misc_feature (1)...(1690): n = a,t,c or g
ttttttttttttcagatttcacgtgtatttttgctaaaactgaaagctgtcaggatccacattggtgttaccagtttgtactgaagcctgatacaatacccaacagtattgctctggttttttcaagcacacactccaagcaagtggtcagtctggcttaattcattatggctttttttcagggtaagagattcacacgcaagagaataaggctacaaatgctccaaacatgggtccagaactctggctcttttgtgaggcctagagtcacagaaaatgccatctgttaagaagctgcttttgcataaaaaaatataaaaagttacaaaattccatcaaagacagatacacagtataaatcgttaggtgaacacagaaggctggtctcatctcctgcagtggcccatagacctgccctgaggtctggaagttcactgtcctgagggtccaggaactcctgcctgctggctgggctctaggaagaaggagggtttggctgggcccgcccagctccccatgacactgtcactgtgatgccactgttgtaccctctgtcttctggaccagtcagtctatgagctcttctttgaaacagtcttagacccagaatggtcatctcacccccagaagacatggtttccaagggtgggaggtgttagttatgggtgccgagccccacttcctgggcgacaaggcaaaggtcaatttctccctgcttcaagaatgaagagggaactggtgctccttgaaccaaagattcttggaagggtcattgtcaccaaagtggctggtgtgggcaggagcaccaagtgcagacaaacccaccggggcctggcggggcagccctgtcatggtttctgtctttgttcctgttagtgaaacagaagacccccgacccccgccacctagcagcatggaacacctgctgcccagatacagacaaggctctgctttgtctccttgtgctggtttttggcagagacgttaaagggctgaaggcctgtgggacagaaatggggagaaggagtgggatacccaagatgccctcatacgcagcgtggtcaacagtgctgagctgaggggcaagcctggtaggctgggctcaggcagaacctgaggctgtagggggcctgctgtgtccgcagccccctctgcaactcagaagtccaggcctccgctccaacgccagcgacccctgtgaggcgcaggggtggaggcctgtgtggctcaggttgccaaggcacccgccaggccttcagtcagagtccgagtcggaattctcttcttctgtcttgtgggctgtggtctcatctgcagagtccccttgtttgaggaatttggccacgtcgttaaagatcaggtagaaatcagttgcaaacacgatggtagcaaagaagccaaacaccccagcggctttggaagccccatccgagtacttggcgatggccgtgatggagatagcaaagtagatgagggccgcggtgacacagcgcaggaagtccatcatgggccagcacaagccctgccacttgtcattcagctgcatggcatcagcaaagaggaagtacaaggccagcaggaactccagcagaggcgctgtgaggaaggcagatgctgaggacgccacatagcagataaaagtggaattccnccgcnctcgcgagtggtcatcaggtctcattncnngcca

SEQ ID NO: 64191 - DNA, 1228 bp, Homo sapiens
  misc_feature (1)...(1228): n = a,t,c or g
tgcggccgctgttaccacctcagacactggtctaagtccagggcagcctgggatccctactcctcttgaccccaaaggccagcaacgtgggctgacacccctccccggggcatctttggacgggtcctgcatccagcagggatgtggtcatctctgtcctctcagggcctgggagccagcgggtctggccgagtgttagggtggcttcctggtctccttccttagcagggagctggccacagccaaggcgcccccctgcacaaacctcacgaagttgtccccggccagcggccccatggcgtacaggccctcctggcgggtgctctggtaggtgaaggggtccacgtcaatggggttcctcttggcgctcagcggctggtcaggatccactgcaaagtcagcccctgccccaggcaggaaggagaggtcggggtgggagccgatgaggaccagcaccagggagaccccaaacaccttctcgacaccctcgaggtcctggaacacggcctggcagtcttccttgaagcacagcagctggtgcctggggaggctgcggtaaccctcataggggctgggcgacaggatggactgctcccgcatcatctggtgcaccttgtggtactcggggtacagcatcttgggcagctggttgaacaccaggccagggtcgtccacggcccggcggaaggcatggatcaccgggatgttgtagtggcgggcgtagaggaccgcgtcggccgctgacagccccgcgccaatgatgaggacagggtctgaggccggggtcaccgcacccacccttgtggcggcctccagggcagacagctcatggtggatgaagggcagggcctccccggggatgcccagccgggccgggctgtcgaacgtgcctgtggcgaggaccacgttgcgggcccacagcgagaagggctgctgggcctggttcctggtcaggaagccgctcacctggaagagggggctggagtcctgggccccacagctgctgggatcgggggtcccccactccacggctgtgactacagcaccggacacaaagttatgccccagacccttcttgaccacgtagtccctgtagtagtgggcgatgtccccggcagtggcccggctgttgcgaagacctcttcgcttcttctgcatccagtccttgacctccgaattccaccacactgactagaggtctacagtgggnntcaggncnggaccccct

SEQ ID NO: 64192 - DNA, 1387 bp, Homo sapiens
  misc_feature (1)...(1387): n = a,t,c or g
ttttgttgtttaactttctctcttttttttttttttcaaattactagaattttaattagccaagggatagcagctggaggagaaataacaaaaaaatacatcttaagaatccttaagtacagtgcatatttacaatttaagtgtcatattttagaaggccactgtccatcagctcagtaaatgtaccagcttctaaagccatgatgccataggtccatttgttgatgaaattcctacccactgtcctcggggcatctgactctgggtctctgcactgggcatcaagaggacgctgctcggtggtttaagggcttaacaccttacagggtaacactgttaacactggcccttggaagcccaggtgcttttctccatgaaaacttccaccttggtagctcagccgacatagacaacacacaaagcgcagctctgcacttctgtccttatcttcacacagtgacatccacaccaggtggccaaacagaagagaaggcagaggcccaccaagagctgatgctgcgcagtccttgggggatcatcctccggtctcactggggacgaacccaggttctggagcctctcccctgacagacagcttgtcaccggcacttatgggtcctctgggatttcagacaatacccaacttctgtaggttcagaaagtgctttcaagcaggcagtggcacccacacccggtgggacacacctcctgggtccgaaaccactccatcatgtggctggtgtggccaccgtgcccacaggtcaggcagaaattggacgatccccgcacagccacgtgacagatggcacactggaacgtgaagcctttgcagatggcacactgcgtgccacggacctcactccggcagtggctgcagtacacgccgaactcgatccctttgtgagggtcaggaggacaggagacaaacttcaacacttcagctcgcttctctctcagaccccaacggtagaggatttccccatagcatttcttaaagtcatcaaattgctgggtattggcggggtccaggagccttttatttttatcatgctggtcgcgttctcgctcacggggatcactgtaggtcagactcccaaagcggagctcttctggtgaggattctccccaaggggaggacaagtgctctgcctctcttcccgctgaagaaaatcaaatgggaagggaagatggcaatcagagaaggcatggaaaatatctgaagagtctcataagacagcatgtggccaatggatttcccagaagaaatgttaagcgaggctgaatattctgagaaatataactaaatagaactctctcctacccttgccgaattccggcgcgctgggtgagtggtccacgatcnctggcctaggggtctcgatttccc

SEQ ID NO: 64193 - DNA, 2526 bp, Homo sapiens
ccctgatgaacattaggccagtgcggtggaattcctctctgcgcatctgacggaaggaccttcctttcccgttgtgaatttcttcgtgccttgtgcaaagatccccagctagagattgcatatcgaggaaactgcaaagacgtgtccaggtgtgtggccgaaaggaagtatacccaggagcaagcccggaaggagtttcagcaagtgttcattcctgagtgcaatgacgacggcacctacagtcaggtccagtgtcacagctacacgggatactgctggtgcgtcacgcccaacgggaggcccatcagcggcactgccgtggcccacaagacgccccggtgcccgggttccgtaaatgaaaagttaccccaacgcgaaggcacaggaaaaacagatgatgccgcagctccagcgttggagactcagcctcaaggagatgaagaagatattgcatcacgttaccctaccctttggactgaacaggttaaaagtcggcagaacaaaaccaataagaattcagtgtcatcctgtgaccaagagcaccagtctgccctggaggaagccaagcagcccaagaacgacaatgtggtgatccctgagtgtgcgcacggcggcctctacaagccagtgcagtgccacccctccacggggtactgctggtgcgtcctggtggacacggggcgccccattcccggcacatccacaaggtacgagcagccgaaatgtgacaacacggccagggcccacccagccaaagcccgggacctgtacaagggccgccagctacaaggttgtccgggtgccaaaaagcatgagtttctgaccagcgttctggacgcgctgtccacggacatggtccacgccgcctccgacccctcctccttcgttcagggcaggctctcagaacccgaccccagccataccctagaggagcgggtggtgcactggtacttcaaactactggataaaaactccagtggagacatcggcaaaaaggaaatcaaacccttcaagaggttccttcgcaaaaaatcaaagcccaaaaaatgtgtgaagaagtttgttgaatactgtgacgtgaataatgacaaatccatctccgtacaagaactgatgggctgcctgggcgtggcgaaagaggacggcaaagcggacaccaagaaacgccacacccccagaggtcatgctgaaagtacgtctaatagacagccaaggaaacaaggataaatggctcataccccgaaggcagttcctagacacatgggaaatttccctcaccaaagagcaattaagaaaacaaaaacagaaacacatagtatttgcactttgtactttaaatgtaaattcactttgtagaaatgagctatttaaacagactgttttaatctgtgaaaatggagagctggcttcagaaaattaatcacatacaatgtatgtgtcctcttttgaccttggaaatctgtatgtggtggagaagtatttgaatgcatttaggcttaatttcttcgccttccacatgttaacagtagagctctatgcactccggctgcaatcgtatggctttctctaacccctgcagtcacttccagatgcctgtgcttacagcattgtggaatcatgttggaagctccacatgtccatggaagtttgtgatgtacggccgaccctacaggcagttaacatgcatgggctggtttgtttcttgggattttctgttagtttgtcttgttttgctttccagagatcttgctcatacaatgaatcacgcaaccactaaagctatccagttaagtgcaggtagttcccctggaggaaataatattttcaaactgtcgttggtgtgatactttggctcaaaggatctttgcttttccattttaagcttctgttttgagttttgccctggggcttgaatgagtcccagagagtcgttcggatggtgggaggctgcctaggaggcagtaaatccagtcacagtgcctgggaggggcccatccttccaaaatgtaaatccagtcgcggtgtgaccgagctggctaacaggcttgtctgcctggttttcctcctacacgtggacattattctcctgatcctcctacctggtccaccccagggctaccggaaggtaaaatcttcacctgaaccaattatgagcagtctccttactgaaggtacagccggatacgtggtgcccccggggctggtgttggcagccggggggaggtgcctgagggtccccacggttcctttctgcttttctgaatgcatcaagggtacgagaacttgccaatgggaaattcatccgagtggcactggcagagaaggataggagtggaatgcccacacagtgaccaacagaactggtctgcgtgcataaccagctgccaccctcaggcctgggccccagagctcagggcacccagtgtcttaaggaaccatttggaggacagtctgagagcaggaacttcaagctgtgattctatctcggctcagacttttggttggaaaaagatcttcatggcccct

SEQ ID NO: 64194 - DNA, 1384 bp, Homo sapiens
ggcgcagagcgccacgggcagtgtggctgctgccccccaggaggcttgaggatgggtctcactgctctgaaaagacacaaccagaatggcctggggctcaggcccttggttgagtgggaatgcgttgggactgcccagctgagctatcagtcacgtgaccctgatgccaggctctccagggaatcaggaggaaaagcccaggtgctcttgacaataatgtggtgcctgctgccctgtgggctccctaatccccagaggggcctgttcagcaaaaggagcacaagcaggtgagcctgcatcctagtcttgaccatgcactgtgaggctgggaacaacccaccaggccacctcacccaaaaaatgcagctacgttggtcacagggtgaggatttgtaagaaagccaacaatagaatttgctgagtgccccatgcagagcaaccagacaaggggatgaagagggtgaggaggttggctgctgggaccagggtcatgactgcaggggcaaaccagggcctcacctttccaggcctccatcctccaggtatcggaattccgtattggtccaggtggaaaacttctctagaatataggcagccagacccacaggagagtcattcagagcagagcctggcggggagcggggagcaagggagagactcaggcctggggaccagagagctggagcttcaggtgtgatgtgtggcactggccgcagagggcggggctgtgtgcaggaagccacgttcgagcacaggcctgccttaactcctgggtgctcacatgcctcgcttccttaactctgcctcggcatcctcatctgataaacagggacgataccttcccactgtctcccagggcctggcacactgcctgctcagcttccttcaaactgaagggcctacgcctctgcatttggtggggtcccaatgagaagtgctgtttttaaaaaggcggggtttttcagtctatgtgctctgattcatgaaaaatgagaagccacctaaaaaagtctaaaataggggatcagttacaaatattgatatactcataagccaaaatactgtacagtcattaaaaatggctggaacaggctgggggcattggctcatgcctgtaatcccagcactttgggagggcgagaaaggtggatcacctgcggtaaggagttcgagactatcctggctgacatggtgaaaccccatctctattaaaaatacaaaaaaattagcagggcatggtggtgcatgcctgtaatcccagctacttgggaggctgaggcaggcaaattgcttgaacccgggaggtggaggttgcagtgagccgagatcgtaccactgcactctagcctgggcaacagagcaagactctgtctcaaaaaaaaaa

SEQ ID NO: 64195 - DNA, 700 bp, Homo sapiens
ttttttttttttgttgcagatagaaacttgtgctttaatatatctctgggtgtgtgagcatgagtgtgtgcgtgtgtgcaagtggaacagctgtctccagggcctcagtgcctggcctctgtccttgttctctgctcatccttgcagccaatgcaggccccctccctggcgggccggccctgcccctgggcaccccagctggcgggggtcagtctttggtacaatgtggacactttggtgtgccgggggcaaggttgggggggtggccacacagctctcatcatctctgcaacgccaagaggaagatggccatgggcccccacagctgtgggctggactggcagggggctccactgcccggcatcaccaccactttattgggatccgtctgcttccggggacactcccccttcttcagtgtgacgtcatctatggcaatatcccccaggtagcccgggcctcgaaccccctcaaaaataatctggaagggcccactggggctgatgggcacatgggcctgctgccacacattgcccttattgccactgagagaccaggcgtgcgtgtccagagcccctttgttccgggaccgcaccaggaggttgagggagccgatgtgtttcccgtacatgtggtagaagaaggagacacagtagaactttggcgctggatttgagaggggactcactaaccttggcac

SEQ ID NO: 64196 - DNA, 1410 bp, Homo sapiens
  misc_feature (1)...(1410): n = a,t,c or g
ttttttttttttacttttacataatctcatttaatttaaccctcacaacaaccctgtgaggtaggtatttgctccattttacaaatggagaaatcgaggcacaaaagattaaacatcttaccaaagtctgcacagccacttatatgctggagctagaatttgaacccaggtgtgcctccactttttaatactagaccaatcttttcacgggggaagtttcctagattaacaccctcacatcttttaagaccattccaaaacctgcgttctgttttgcagaagccctcactgtgtttctgctgccctgaaacagtggaggcagacaaaggtgagtgccaagtgaggaaccataagaagtggtagatctctgtggagtgccataagaaccctcaagagccttaacaaaggtagttgggggagaggggaagaggtgtttcagcagctctgctcccagcagccatttcctctctccagggcaaaggggtggggctgcgaggccagctgaccaagaaacccctccagctcctccagtccaagtccagcatctttcctacaactattctgccttccacttcgtcttcttccttgcctcactctatgtcatggttacccttaccaactggttcaggtaagatggagtgggccttagatactctcctgaagagctagctattttaaggaaagagcaattcaaggccattccagacacacatgggtctgccattatatttggtgaggaggtagaacaggtctaaaagctaaggcccttcatattctctaaccagagcctttggttacacagctatgagggagcagaactggaaaagaccttcatcaagggtagctgggccaccttctgggtcaaggttgcctcatgctgggcctgcgtactcctctatctggggctgttactggcaccactctgttggccccccacccagaaaccccagccccttatcttgaggcgccgccgccaccgcatcatatccccagataacaaatatcctccagtctaagtccttttcacaaactggggttcccctgacattgtactcctagagttggctcaaggggagctgtccagcccagctcaatacctcaaggacacacagggagttatctccgtttgggctgaagtcaatactatgaactggaagaagtggtcaaacacagtctaatgtgctgggcagagtgtctgactcactggagctactgttacatctgcatcccagctcaagagcctaacacccaaatcagcagctcaaagaaccaccgctgatcccagcagacagtgtgcaccagccctttcctggctcttgggcttcttatatccgtgtnccagggctgaactccttattttcctttctccanaggcagagccgagtcttcagtccctgttggtctttcccc

SEQ ID NO: 64197 - DNA, 382 bp, Homo sapiens
gttgcggggggtgtcatcaaagcagtggacaagaaggctgctggagctggcaaggtcaccaagtctgcccagaaagctcagaaggctaaatgaatattatccctaatacctgccaccccactcttaatcagtggtggaagaacggtctcagaactgtttgtttcaattggccatttaagtttagtagtaaaagactggttaatgataacaatgcatcgtaaaaccttcaaaaggaaaggagaatgttttgtggaccactttggttttcttttttgcgtgtggcagttttaagttattagtttttaaaatcagtactttttaatggaaacaacttgaccaaaaatttgtcacagaattttgagacccctagttctaatcgcga

SEQ ID NO: 64198 - DNA, 1050 bp, Homo sapiens
caattgatacacctatcacatggataccagattcactggactgactattacaacgtcgggactgggagaccagaattcggcacgagggcagcccacaagtccctggccggagcagagctgaagacgctcaaggactttgtgactgtcttggccaagctgttccctggacggccgccagtcaagaagctgttggagatgctgcaggagtggctggccagccttcccctggacaggatcccctacaacgccgtgcttgacctggtcaacaacaagatgcggatttctggaatattccttactaatcacataaagtgggttggatgtcaaggaagccgatctgagttgaggggttacccgtgttctctctggaaactgttccacactttgactgttgaagcctcgacccacccagatgcactggttggcacaggctttgaagacgacccccaggctgtgctgcagacaatgaggaggtacgttcacaccttctttgggtgtaaggaatgtggtgagcactttgaggaaatggctaaagaatccatggactcggtgaaaaccccagaccaagccatcctctggctgtggaagaagcataatatggtgaacggccgcctggcaggtgagaagcccctgggcatggggggctcagcacgggcggagggaggccctggtcctgggacagcaaggacggcacggctgccgtggggcttgtccctgagctttgcggcctcgtgccacccactgtgctgacgggatcaggacttgggtggctgagagctgccagagctgcagcctttcccaggctgcttctgtccccggctttctagatgcttctctcactccgggggctcttcgaccccgtggaaatgggtgtggctctttcttcccccatcggtacccactggtagcccgttagactctgaagatgtttttgactctggaaagcttggaacgtaattaatttttgatgaggaattttagtagtatggaaatctgttgtccaaacgtaaaccaaacctctcaaagtgctttgttttgttaaaaaaaaaa

SEQ ID NO: 64199 - DNA, 2342 bp, Homo sapiens
  misc_feature (1)...(2342): n = a,t,c or g
ttttttttttttcaggattagatacaatttaataatagttcaattccaaaataaaagttattgtaggtaagaccatgaaatttcctaacacttgattttaatacattgcgctaattttctaaaacaactcagaggaacccatatttacagtaggcagaatatttatgaaaaaaatctggcatcaggtatatttatatatatgtatgtgtgtgtatacgtatgtgtgtgtatatatatgtgtgtgtgtgtgtgtatcccgagattatatgaactaagaaacaagttgtgtatcttaacagcagtactagagcgcagagtttcagacttggatttataaatgctttcaacgtgtggtgtttggaaaaggagaagacatcatctgattttcaaaacctgaagtttttctcaggactgaagtcaaaatcgtaactgccacagagggaaaagggaagcttttccccttaattgttcatctgcgtcagaaagtccagtatccctgagataggaaccactgtaattagaagattggaatgaacaggtttctcccaaaggaagattgtttgttgctgaattatgcctactgccctgatcatcaggtataaactttgcatcttccaacctaatgcttggcagcaccaagacgtttcagtaatggttcatcataaacccagcattctccattttcatgaaataaccttgtctcccactgaatttccttctccttcctttctcgggcttctgctctttgtctttcttcaagcctgtgctttgcttcagttgctgcatcaatgtctctgatttttaagttgaaagtgacatccttccaaaggctgcgggattcatactcgttctgatcttccaacttcctcactttcttcttgattataggcaacttcttggtatctacaaagactgtattttcccctgttgcatattttgcatacatcacaccattccattccccttcaattgagcaaaaagacttcttgtcatttggagaaaaaatctcggcagtaattctgtgcttcttgcccccatagaagggtttagtgtggaagatgatatttgcactatagcctgttttggaacaattaatattgcattctcctcctaattccacccagggcactgtgaggatagaccttccatagccattggggaatgtgagaatgtaatgttcatcatagtctagacatgagacacagccctgccctatgttgtgcaccccaattgacatcccaaggaattttgatttggtccagatatgagcattgaattgtatcttcttgttaaaacactcagcataaaaggctgaaatgggtggatgatgggaaacctgctcagccacaaatgttacactgtttttggaaacccagggaactggtccttctgaaactagttctgtgttctcttcagtatcatttggtaatgtccaatgacactgaaaaatctcgcccaaaatgggattgtatggctttttggcaactgatcctttccttcccgcatgaaaggctgagaggtaccatttcacaacctgaaccattcgatccttgggatccttctggtcactaatgctcacaaacaggtccggatgtgcaaaaaagtctgcatacatttctaaaagagatcttctttcaagaataaacgttggaagaactaccttagtaagatccattccaagtctaacctgcgacaagagatgcatgataacgctcttgtgctcctccacagaccctgcctccgcatcatcatctctgtcatcatgtgaatcaaacaggtcagcatcacttgttccattggacaaggaagaattaagtgattctgtggtatctgggcgttttagactatttcccgagctgctgtgtgtcaggactgaggcagatccagaagaatctattaagcgctttggggatgagccactttgatggaattcatcagcatcataaaattcatcttcactgctggagtaagagaactctgggactgtatttggagacaagttcacgtggcttggagaagtgagactgctactcggtggtgaatggccactgcctgtactatttggtgtaggagtctgatgatgtcccaaggtagccaacacaggtccaactggtagggaagatggacgctgctctgacttacacaactgaacaggttctggaggtaacacagtctgggaaggcattgtgctgatcacaggttccaaaggactaggttgatatattgcatctacgggattaatagtacttataattccatctgcgtgattcaccgcattactctggtctttcgcaatccgcggacgcgtgggcgacccgggaattcgnggcnggttctcacca

SEQ ID NO: 64200 - DNA, 737 bp, Homo sapiens
cttatgcttcttgctccccgagggcttctttgcccgcgccccctttgccaggagttaatagcagcagtgaaactccacccccgctaccccctaaatcccccagcttccgggccccaccgcagaaggccggtgcgcaggccttgcccgccccgcctgcccctccgggctcccagccgttcctgcagaagaagaggcatggccgaccaggggccggtgggggaaagctaaatccacctccagcaccccctgcgagatcacctaccacagagctttcaagcaagagccagcaggccacagcctggaccccgacgcagcagcctggaggtcaactgcgaaatggaagcctgcacatcattgatgacttcgagtctaaattcacgttccattctgtggaagactttccgcctccggatgaatataaaccatgccagaagatttaccccagcaagatccccagaagccgtacacctggtccctggctccaagcggaagcagtcgggcagagctctgatgacatcaaaggcagaaattctcagttatctctaaagactcttcggtgagaaggcagatgaagcgaaggtcctggggttccaggttgcagaacaacatgtcagaccccacccaccccatgctcaagctgtaattcagttggcatacaggcttggaattgagaatttatttattgtaaatatgtgatttgcacgggctttaaagcagtattttaattgaaaaaaaaa

SEQ ID NO: 64201 - DNA, 1096 bp, Homo sapiens
gagattttgaatgtgaagaatgtcatggtggtagtatcacgctggtatggagggattctgctaggaccagatcgctttaaacatatcaacaactgtgccagaaacatactagtggaaaagaactacacaaattcacctgaggagtcatctaaggctttgggaaagaacaaaaaagtaagaaaagacaagaagaggaatgaacattaatacctgaaactataggaaaggttaatttgcctataattatatatacattccatagtcatcaaggaatatattgtgcagagagagtatccttgactgcttaagtcagccagttcagcatggataccaacattagcttttcttcttggttatatcatctgccaaaaatagagaacttatgatctattcatgtgtgtttcaggcttatttgggagaactaatttgaacttaatcaccacttcatctaattttagcaaggtaacagttgcccagggcagtacctggaattaactgtccatttcagtacatgtcaagtgcctttgttaggtggagaagaaatgtctctagaggaatataaatacctgatttcctggtcatcgagattcttgtactgttaaatgaatattgccttttactgctctttatggcttattggaataggagctcatttaagattgatcttggagagtttcttcttgtgattttagttcataagtatgtcacctttcattttatagtgttcatcattgagtaatggattaagtgaaaatccaggagtatccatctgcagttatgtgctgaggtgataattcatccaacatatttgttagcataaatattatgcttcagtttctgttgcaaattggtgattgtgaaattacagaaagtgattttctagtctgctttttttgtttaattcttgtaatgtaagcaataaatatggagtgtcagtagtctccttccaccccagaaatgtgttggtgtaacattctcgtttcttttaacaacctggaagtacctttcttgtgatcttcactgaggaattagaactatgatagaagttaggctgtggcaaatgggacattcgtagagtgggatagaggtggcagat

SEQ ID NO: 64202 - DNA, 1084 bp, Homo sapiens
tttttttttgacaagtaatattttttattattgaaaaatacacaaaggtgaaaggttgctgagcagctgattttccatagtacaacagagtattataagaaagagggaaatgtatctgttatatatggcagtttacatttctaaggcatttaggcttaagagcactaggtcttgcacagctaggtgcattgtcttgagtttaaatatactgaggcacaccaggcaggcaaaggattcaaaactatacattaaaaccttgttcatgcattggtgtcttaggattttattccctaccctccttattcatttttttcccacaatggggttttggagttgttcatagaacactggaaataatccgactcttcaagagtttgtttacaatgacaacacccaatgggacacaccaaacagaactacttcacagatacattctggtctcttaccaaaatgaagctcccagtaagaaaaacactggatttgcaaaggcacagtggagacaggtttaatgcattaaatataacatgaatcattcacaataacaagtttcgtgtttcagggaacttttgttaatacaacacagttggtcacacaaaatacaaatgcttctgttgatttgtcttggcaactcagatacatcaacagtgctaacagtttaacagctttgttctcatctgacagaaaataatggcagttctgcaaggcaaatgttaaacctgaccgtatgtatttattagttccacagtgttttgacagattataggagatggaactcagaggatgctgacacgctcaccgagggctttcatttctgtttcttcagtctcaggagtgtcactgtggctagcacttggattgatcaggtgtgtggggtactgcagcccctgctcgcctgcatacttctcccacctcaggtcatcactttcatgggtgatgtagcgctccccgattttgcattccagctctcgcaaatctaaccaggtctgatagtcctgtagccaagggtggctcaaggtcttatccacactgtagcgctttctcatttttacttgcagcaaattgttgataagatcaatggcttcat

SEQ ID NO: 64203 - DNA, 1749 bp, Homo sapiens
cccccttttttttttttttgaaacaaagttttaatttttattttacatatttatacataaaactttcaaggaaccctctgaatccaacagaatgttaatagcacatctaaaaaggaacttcaggtagtcaacattcacaaaatgttgaaaactgagtaaaatatacatattacggagagctacaacttcactacgaggcaggcatgtattttttgacttgtatagcaccgtcatttacagttcttctttaaaactacagtgaagaatgaaaagtagtcaatgggaaaatactgttccaacttaaaatctctaaacaaataaaaataaagttaaaactactctcttttattaaccatgatttgtggtggtgtcagtactgtacattttttgtaacaatattttattaaaatgcctgatattaagtggcacaagtaaaaaattaaaataaattaagaagcaaaggccaatcactggacattaagcttcagacattatcaatgactaacactgatatttgtttctgcgccacctttagcaacagcatttttacaaccacagaagcaaaataaattctagcttgttctctggttgaatggcttcttttcactttgcaggcattttctctgccatgtgcttctgctgactttcagcatgtctggtcaagtcttcaatgtccaccagcatggcatcctgctctgtgtgcagctcatctcggatgagaagcagctggaccaactcttcattcaagctttctatctgggaatggagatcattgactatcacttgtagctgcccaatagtcatgtctctcaggtcggtgggttttaaacttcttttcatcaagcattcacttatatgaggcatgtgtggcagaagatcagcgacgggagactttttcctgttctgtttctccacttctacttgcattttggccattggtttggccatggcaagggccattttggcttcagcttgcaatttcttttgccttgtaaggaagtccatgtcatccaaggattcagactcctcttcagtagtgtctctatcagaataggaagaactctgtttgctcatgggagacaagggggtgtccaagctggtttcagtcttactgtcatcagcatcactgtccttatcactgccactgtcgttgacaaagcatatctgcaagttcatcccactctgcagtcgggaggaaaggcttggcttcccacttttgctacagctggtataaattcctgggccatcatcaaagaagcttccaagtgccaacttctgtctgatagactctctctcatttttctgtgcggaggtggagttggtcctcgcctggccctggttccgtacctcctgctcccggaactgcagcccggccagatgcttctccagcgcctcccaatccataggtggcaccgggggctcttcggggacgcacgtcccgccgtctgggggctgaaggcagagccccccagccgccgggccgcggccactgcgccggcccccagccggctggggcttttggatcgcccggcgggggccccgggaacagctcggccggccagccaccaccacgttgccattgtgcctgaggtcctgggggtcgtgctggtggaggttgccgttgggcaccgggggcggcatggcggtggtggcgctcctgcccccgccgccgccgctgcgggtcctggcgcttacgtcccccggttcccgggccggagagcggtcatcccggtaccctcgctggtcgcg

SEQ ID NO: 64204 - DNA, 2287 bp, Homo sapiens
aagaaattggccctccagaaaaatgtattttgtgagaaatgtgaaggtgttggtgggaagaagggatcggtggagaagtgcccgctgtgcaaggggcgggggatgcagatccacatccagcagatcgggccgggcatggtacagcagatccagaccgtgtgcatcgagtgcaagggccagggtgagcgcatcaaccccaaggaccgctgcgagagctgcagcggggccaaggtgatccgtgagaagaagattatcgaggtacatgttgaaaaaggtatgaaagatgggcaaaagatactatttcatggagaaggagatcaggagcctgagctggagcctggtgatgtcataattgtgcttgatcagaaggatcatagtgtctttcagagacgaggccatgacttgatcatgaaaatgaaaattcagctttctgaagctctttgtggcttcaagaagacgataaaaacattggacaatcgaattcttgttattacatccaaagcaggtgaggtgataaagcacggggacctgagatgcgtgcgcgatgaaggaatgcccatctacaaagcacccctggaaaaagggattctgatcatacagtttttagtaatctttcctgaaaaacactggctttctctggaaaagcttcctcagctggaagctttactccctcctcgacagaaagtgaggattacagatgacatggatcaggtggagctgaaggagttttgtcccaatgagcagaactggcgtcagcacagggaggcctacgaggaggacgaagacgggccccaggctggagtgcagtgccagacggcatgacgtggtgcggggcagcgtggccccaccggactagcacatgatgaatgtaaagttggcacaatgaaaatgacatcgctttaatggccttgtgtttgggatgtcctgtgtatgtgttcagcattcttaattgctgagtgtctttttggcttttcttttggttgtaacttaagttatagcttaatttatatttaaatgttttaagtataaatcacctctagtctgcatatggaatctgttcatttctattttcaggatatacttttgagatgtcagtgattgcaccaacactttgtgcttctagtggctttgccataattcagtgtcaccaataaggcacagcccagttagcagcttagcccccctagcaaaccccaaggcacaaagtgggcatcctgactcatctctaggtctgtggtttctcccctcttcccttggcagagttattgagggcatgatctcagggctgctaagataacatttctgaggattctagatgatcctcttaaagaataaaagcacatccgtggatcggacatggctgcatgtgcctgcttaacagggccaacttagttcctactgttctgtgcccttcagtggatggaacgtgagtgtctgatcatctctcttggaagttttctgaaccttccaagctctgtggtgaggacaaaccagtgtttgaatcatatgctgataactgtttgcctgtgaccctcacaccttgttcttcagggttttaatgattttctgttgacaacttttgcaatgctttcccaccaaagtgcttacttgtaaagaaaactaaatccttctgtgtccccggcagcctcagtgcagcaacagaagccaagggagaatgctgctggtttggcccatggcacagccagcttctctgaccagtaatccggggtgacttgagggtctgcaaaggcatagaactccccagtgttttccacctcattctcccagattgagctcccttccaaaggatcgttcctctcattgcacagccatattacaaagggtttcctgctcaagtgatgttttggtaagaacttcgctgagttccactgtggattacagtttgtatggactactactgtaaattatagcttgtttggagggatattagtcattattttattcatgacaggtagactacaattcgaacttagggttacctcagtctttagccattactgcttatttcttttccccaagtcacaaaaaacttgtaagctgctgggttaaagcagaggccacctgtcagatctaccctacccttatttggttacatggcacctgagagtttcactcagaccagggatcttccttaggagggtcaaagtgcagatcagaccatgcaggtaaggtgaaccagctgcacggaccaggttcccgcaaaacattgcccagctagtgaggcataatttgctcaaagtatagaaacaggccacctggtggccac

SEQ ID NO: 64205 - DNA, 728 bp, Homo sapiens
cttatagcaaaagctttttacttttagagctatttatcccaagaactgtttattacacagaaaattacactttcacaaaatattttttgttatgctttgagcttatgtaaatgttttatacttacttaattttatttctgggctccaccaaggctatgagaacagatgatgcaaaagaaattatgagacacagtttcttctctggagtaaactggcaagatgtatatgataaaaaggtaagatttctttatggcatagtgtgtatatattttggctgcactgctaaaatgaatttattgccaaaattattttaagtgaataaaagttaatgatgtaatgatactttccattttaccgacatttaagtgattattgaacttctgtgcacaaaattttactcatgattttgactccccaaatgcctcttgagattttgctcaacatgatcacagaatttttctatttttttcccataataatttgtttgcctctcattatttctttaattttaataaagataccaagtgttaatttttctttaagaaaactagttaaaattttttaatttgcccttatgtctttaattttaaagtgaacacttcagattcatttatacaaatccttgttttaaaagaaatttaaagaaatttgtttttaatatttaatgaaggtagtaaacacagtgtcttactttggacttctctgtcatttgaaacagaactttattg

SEQ ID NO: 64206 - DNA, 2015 bp, Homo sapiens
gcgttggaattcgtcttattcgaggaactcacataccccaaataaccatcagtgcacaaatcattccatgctctttggcaccaggcaggagatgctgcaggcaggtgtccgtagttggcaaaaatgggcagtaggggaaatggagttgcttcaacctttctcagtcccggccctcactgcacccaccaagtcaagcagagctgggtgggctgagaccagcatcccagctggactgagcctggggggaggggctggagccaaggagcccccctgggtgggggcatcaggagcaggggcagggcctgaggactgctccccctgcatggagggcaggccaggatggagcccagggtagactttgaggaaggctcagtgggctcagcagaaggaaggctcttctcatagttgtggtttttcacagatggatttgggtgatctgagtgtggtcaggccctgccgttggggaatgaatgccacacggggtttgtctgtaagctgcagtgtctgtgattctgtgtgaactgacagcagggagctgaaggacaggccccggccttgggagaggacacgggcatgggctgctggatgcagggctcccagggctgtgaaggcagaggggtctctggaggcagacagggtgggctgggggccagcagcagggggcagagccccagccagggcagctgcttcctgcacatagacattcctcctgcgcagggccaagtgcccatgagcacagccccagacagacacggtggggagcttggagccctccgctcacctagaggagccctgggacacgcactggaaagtattctaggggcttcctgccttatccttctgtttgttcatacacttagtgaaagcagatcctgtactaggatgtgaggatatctgtcacctgcgtggtccattccataaacaccagattccatttcagttgccacacattttggggctagacttccctaaacaacatgccattgtgaaataatgcatatatttgtatttttaaatttccctgaaaatttaatctattctgttccatatgaagtctgtttcactaccttaaaaaatagatactccactagaggctgtgcttaattcaaatccatgtgtgtgcctgcattacatgtgtgaacacgtgtttctgtcgtgtgtgtcatgcacatctgtgtgttgcatagcataagccaaatgaaaatcatttgttcatgggattcatatgaggaacaaaattaaatttgaatacagtcagataactgccacgcagggcatttggggaaccatccccgaatgccctgatgtgatttccctcagaaaatccttgttattagaggagaaggtctgggcaggggcagcagcatctcagacatcaagtcaactttatcatctactacatcagcactgaagtccaggggcattgaggcactaactaggttccattttctttggtttggttacttattttttctttttgggttctcggtgtgcagaggctgtaaagagagcctcagggcggtgaccgctgcaggaattcggccctccagctcccctccagttaccaggagccgatttggaggccaggccttcccagctgagtgtctgtcagcttcattctctctcagctgtgcaggggaagagcaacaacagacaggtgaccttcttgggttgtgcttcacaatggactgggaaaaacatctttgaaatcaggaaatcaggccgggcgcagtggctcatgcctgtaagcccagcactttgggaggcggaggcgggtggatccattgaggtcaggagctcaagaccagcctggtcaacatggtgaaaccccgtctctactaaaaatacaaaaaaaaaattagctgggcgtgttggcgggagcctgtagtcccagctacacgggaggctaaggggggagaattgcttgaacccgggaggcggaggttgcagtgagctgaaattgcaccattgcactccagcctgggcgacagagcaagactctctcaaaaaaaaaa

SEQ ID NO: 64207 - DNA, 2501 bp, Homo sapiens
ggcacgaggtaccctgggagaaaaaaatttaccctactgtcaactgtcaaccactgggaatgatctcactgatgaaaaggcctccaggtttttcacctttccgatcatcacgaataggggaaataaaagaagaaacaactgtaagtccaccccacacttccatggcacctgcacaagatgaagagcgggattcaggaaaagaacaagggcatactcgtagacatgactggggccatgaaaaacaaagaaaacataatcttggccatggccataaacatgaacgtgaccaagggcatgggcaccaaagaggacatggccttggccatggacacgaacaacagcatggtcttggtcatggacataagttcaaacttgatgatgatcttgaacaccaagggggccatgtccttgaccatggacataagcataagcatggtcatggccacggaaaacataaaaataaaggcaaaaagaatggaaagcacaatggttggaaaacagagcatttggcaagctcttctgaagacagtactacaccttctgcacagacacaagagaagacagaagggccaacacccatcccttccctagccaagccaggtgtaacagttaccttttctgactttcaggactctgatctcattgcaactatgatgcctcctatatcaccagctcccatacagagtgatgacgattggatccctgatatccagatagacccaaatggcctttcatttaacccaatatcagattttccagacacgacctccccaaaatgtcctggacgcccctggaagtcagttagtgaaattaatccaaccacacaaatgaaagaatcttattatttcgatctcactgatggcctttcttaatttaagtggctatgggtatttctttcatactttattaaagtatcaatatccctctctccattgtccagatgaaaatatcctgatataatgcaccaaaaaccatgcagtttcggaacagtctaaagagaagtggtgagactcccagtggagacaccatcagtctccacggactgcataaaattgtgtgccacaattctaactcttttctgaatcttcttcccaagttttctaaactagcacagtaaacagacaaactaatgtgccgtatggcctgctgcaattggcttctctgataacaaatatgtaccttacaacatatgtcatgaatttgcatacaaagattcttgtcattcttaataaactgtggcacttggtatttgaatgtgtgtgaaaataagggaagtcaagagattaaatgctgaacttattaatggaatagaaataataaggaggctgaggctggagaattgcttgaacccgggaggcggaggttgcagtgagccgagatcgtgccactgcgctccagcctgggcatcagagcaagattctgtctcagaaaaaaagaaaaaaaaagaaataataagaaaaacttccagatttcaaagtaacaagaaagaagacaggttggccaaagggaggaaaggggggacataaattaattgactttctattcccaaaatgggctagttatatcaaataaatactcccactgccctttctgagtgagagtgtttctcataagtcaaaaatttctgtttactcattaactactctttgcaacaggctttcatatagaagtattctgtttatttttgctgagcctagattgagtaattcttagtttacagaagctccgagcttaatgataaggatgaaaagcagagggagcaatatagaagcaggcttgctaataaaactttttaaataattgacaagggaatattatggaatgtgatgcaaagtttgttccgaaattttatgaggaaattactctctagtctcactttatagtctttttgctatgactttgaagaccattgatttttgagaagcagaataataggattgcctttcattgccctatagtgcaaagaaggtatatgctttataaccaatgttgtacttttgcctagaaaaacaagatatggctttaaatagctacaatcatctttggatgtatatgtcactgctgcttcaagttattggatgcatttgaacctctgagtttgtctttcattttaaatattgtctgttcttttaaataaacaaccacagatgtcaggaaaaagtcttaccttgtcaactggttgctccactttttaaaaatgattgaatgataacatcatattaactgcgttttactatacttacagagtcacctaaggtcctgcgagtacaagggtcgacccccaaaggcaggggcagagcagtcatctgaggaggggaggtctcttggaccaatggggcagaatctttcactccagggcacataggccccaaccacctctggccaggcaaccttgaggagggaagggacaaggaaggaaagatgggatagaatttaaatagagaagaatgccattttatcactctggcctctgggtgaaataaagatcagtcttgatgttc

SEQ ID NO: 64208 - DNA, 1456 bp, Homo sapiens
gtcgtagaccatagtgcatgaggcggaattcccccgcggccatgagggaatacattgcctccaagcaccgactggggctttccagctcggccctgccgcgcctcaccgaggccgaaaggaggctgctcaagggcacggtcgacttctgcgcgctcaaccacttcaccactaggttcgtgatgcacgagcagctggccggcagccgctacgactcggacagggacatccagtttctgcaggacatcacccgcctgagctcccccacgcgcctggctgtgattccctggggggtgcgcaagctgctgcggtgggtccggaggaactacggcgacatggacatttacatcaccgccagtggcatcgacgaccaggctctggaggatgaccggctccggaagtactacctagggaagtaccttcaggaggtgctgaaagcatacctgattgataaagtcagaatcaaaggctattatgcattcaaactggctgaagagaaatctaaacccagatttggattcttcacatctgattttaaagctaaatcctcaatacaattttacaacaaagtgatcagcagcaggggcttcccttttgagaacagtagttctagatgcagtcagacccaagaaaatacagagtgcactgtctgcttattccttgtgcagaagaaaccactgatattcctgggttgttgcttcttctccaccctggttctactcttatcaattgccatttttcaaaggcagaagagaagaaagttttggaaagcaaaaaacttacaacacataccattaaagaaaggcaagagagttgttagctaaactgatctgtctgcatgatagacagtttaaaaattcatcccagttccatatgctggtaacttacaggagatatacctgtattatagaaagacaatctgagatacagctgtaaccaaggtgatgacaattgtctctgctgtgtggttcaaagaacattcccttaggtgttgacatcagtgaactcagttcttggatgtaaacataaaggcttcatcctgacagtaagctatgaggattacatgctacattgcttcttaaagtttcatcaactgtattccatcattctgctttagctttcatctctaccaatagctacttgtggtacaataaattatttttaagaagtaaaactctggggctggacgctgtggctcacacctgtaatctcagcactttgggaggccgaggcggggagatcacctgaggtgaggagttcgagaccagcctggcccaacatggtgaaaccatgtctctactaaaaatacaaaaaattagccaggcgtggtgacagtggcacctgtaatcccagctacttgggaggctgaggcagaagtttgaacccaggaaacaggttacagtaggccaaaattgcgccactgcactccagcctaggcgacaacagcaagactgtgtcc

SEQ ID NO: 64209 - DNA, 1486 bp, Homo sapiens
aacctcgcatttgagaagaccgtgaaaataaggatgacgttcgacacctggaagagctacacagactttccttgtcagtacgtgaaggacacttatgccggttcagacagggacacgttctccttcgacatcagcttgcccgagaagattcagtcttatgaaagaatggagtttgctgtgtactacgagtgcaatggacagacgtactgggacagcaacagaggcaagaactataggatcatccgggctgagttaaaatctacccagggaatgaccaagccccacagtggaccggatttgggaatatcctttgaccagttcggaagccctcggtgttcctatggtctgtttccagagtggccaagttacttaggatatgaaaagctagggccctactactagtgactgcaggtgacagggcgtggcggagctgccacagacacacctagctctgctcactgtgcagtggagatggaaggccagggaggagcaacgtggaacttccatgaggccccgtttgggaaaataaaaggatcctcttcacttctttcttaaacagcaaatccagccaggttcagattacacaaccagtgtctcactcaaaggagcagtggtggctggcgcgctttcgcactgtggcagccacgagagtctgtgcacgtctgtgctggaaagggtatggatgggaatcaagcctatgccagtgctgatgaagctggaggagtctctcctctgctctccactcagatgtgggacatcagtcgccaaaagccactcagccccagccacctcgcgtgagaccctcactgttcattgtgttcatctttgagtgctctctgccagccaggcctttcctgcaagctgctgtgcttccccgtccacgtgtatctctgctgtgacacactgacctgacgcacatttccagtgcagctgcagaagagaaatgggattggctcttgttttctgcaagttcatgttttgcattttatgttcttccacaattgatctgatgttcaggaaaagataataaaggcaaattagttagtggttgagacaggcatttcctcctcccgcttcttgactccacagatatattccagcagagagcaacacaccagtcatcaaaacccactggctcctgtgcggtgtcacagattgcagggttctgacaaggcaggacagtcaagagtggggacactttcagcttctacttttgccttctagggggagctttctaagtccccacatttaccccgagtcaccggaaaaatctgatttttcccccgaaagctcaatgactttaacgtgcttggctggtttgtctcattctttatgaaagaattttggggccgggcgcggtggcttatgcctgtaatcccagcactttgggaggccgaggcaggtggatcacgaggtcaggagatcgagaccatcctggctaacacggtgaaaccctgtctctactaaaaatacaaaaaaattagcg

SEQ ID NO: 64210 - DNA, 1736 bp, Homo sapiens
ttttttttttttaaaagtaattacaaattaagaatttatttataagttttcatctttttagaaataaaaaggcttaaaaaacaaaatggttgcaaaaatggttaagtagttttgttatatcctaattgcttaggtgtgctctgtaaattccaaataagtaaaataatataaaaatacattttcatatctttatagaacaaaaacaaaacattaaatgcttttggattttctttactcctcccacagatgagttcacaaatacaaaaactggtgtacatttatactcaagtacaaatctccaacagccaagtaattatagtttgttctgttatgtgcaaagtagattatttcatatttacttggtatggaaagcagagtacaggctcaatggacaataatcattaaacacagattatgtttaagaaaatgctgttgtaaaaatgtacaatagtacatacaattttggtaattatgcacttcttttaaagtaaatacagcttttagatataaatctttcaaaggttttctttgaagagctgtgaggtgactatttcagatttgatgaacagtaatttgtcagtaaacttctcaaaaaaccaatccaagaaagaattgttttctttttccctccatgtggtcggtttcattcttaaggaaggtctgatgcagtaagaagatgcatttcacaaacctttacacaagtttgtgaactgtcaactaaagacaccacctctgatgtggatggtttcattcaatccatgttcgaccagctttatatcttctagatcgtctttaatgatgctaatcaaatggctaaggccttcctgttgttgtttcaaatgctgcttgatttctcgtaacagatctgcatctatgtaatacctttcttcagatctgactgctccaaaatgattctgcatcctgatttgagacatcaattcatttagtcggcccttgaactgagtaggtgcatttagttcaccctgaatcgtatccagctgaactcgcaactgctcttcatcagcctgaatggcataaccactcttcctttgaatttcctgtttgattaggacctgtaaagttctatgggaaagatccatgagtttcctcttgtattgtgcaattttggctacagatgtagtttgattcttttgtagctcactaatatcttcagatatgatatctaatctggtttgatgctgcttagtcatctgatcttgaaccttcagtcttcggagaagttccttaaaacccaccattggtacaggaattaacctgaagaaacgcagtgaacaattttcagaccttaagcctattactacaaaatacaagaagtgaaggttttagtaacactcatgtaattttacatcaactttctagggctataaggcagatctatgactatgagataaccatgttataccaaagagattttattcaacctccctattttacaaatgaggaaatacagttcagtcaaaacattacattattaaatgaaaacgcaaatagaattttccgctcctagttagttctcactatgctatgctgccttaccataatcttttttttttcttatttttttctttttgttttggctgaagctttagctggacaataatcaatattttttaaaggccaggaaaatgaaaataaacttgcctcatatgtaagaattataattaatagctcccatgtttgctttcctagtagcaaatattagttcttaaatgaaa

SEQ ID NO: 64211 - DNA, 1231 bp, Homo sapiens
  misc_feature (1)...(1231): n = a,t,c or g
cccccctcgttgttaaaccccggcccggggattttattttgggggccccaaaaaaaaaatatttctctcccagcccccggaaataaaattggatcccctaaaacggcccccccttttttttttttttccttgaaataatgtttattccacgctgtcccgacagccccctctgcaggtcccctcggtgtactctgaggtgggaaaccctccctgggggcggtgaaggggaactcgggccacccccccagccagcagatgctccagcagccagagccccagcctggagctgaggctcttcctggggctcgccgggcccctgcaggcttttcggaccctcagccagcccggcttcctctgctttgggcagcagcaagctggcccttgggcacctggactgctcaccagccgcccagccatgggtcctgctctccaggttccttctagcagatccatctctgtcagagcaagggactcaggcctggaccatcttctgggctgtcactggggctctcagtggccatcccagctctgcgctggcccttctggagcgtgtaggcagacggccccagccgcaggatcttcccgctgcccaggcactcgtcccccttgtagaacacagcaaactgtcctgtggcaagggcacgcacagcctgcacagctgtcacccacacggtgccatcttgattgagggtcagcacacagggcactagtgccatctggtggcggaatcggaagtggcactccatcatcttgtcccggaccagtgctgcgggaggctcctccgcaatccagtgcacgcggctggtcctcagcaggtccctgtacagggctgggtggtctgtccggggggcctgcagaatggaatgtgaaggtggggacgccgaggggcacctggccccaaggccggcctcagtgtggtccctgggaacaactgtcctaccagcacacacacacacaggtaacggtgctggcaccgctcgaagtgttctacccacagaaattcatctcatcacccgccgggcctttgaatccccattttacagatgaggagactaaggcccaggaaggaagtaccatgtcagagtgggcaagaggcaggggtgagatccgagcccatgacagtgaatgctgcaggttcaagtctgactcaggccctctacctgcaaccacctgtggggcagcagcacggcccccttnanncnnnaattccggaccgagaccttgcagcgtc

SEQ ID NO: 64212 - DNA, 1501 bp, Homo sapiens
ttttttttttcagctaccattgtttttattgttactgaggctgtcagtgccgcctggaagcactaacactttttcccatttcctgcctcagcccatttcacaggtgaggaaatctgaggctcagtgagggacttcattccctttcatcttggtaaattccattttaccaggggtggggctgggtcgctctttatcggtgcctggctttcctcttcccaggggtgcagttaggggaagagtccatttcccctgtaccctcatttagccccaggattgccctgcccaaaagatgacactcctgcccccagtgtcctggatgggaggcctcccagccttcccaagcaatggctgtaatcctgtgggtacagagtctggctggggatcctgctgctctgctgggagggaggagtttggcctcattgggagactcggtccttgccccatcggtaccgggtgcctggagtccacctgcccctcacggagagatttctggcctcttgtccttgaactctattctgtcctgctcctggctctccagcggctccaggtggctgtgcttgtcctggaccatctttcccggagtctttagaaatctgaacaggagtttctgccccggttccttcttaatgatattaagcttataatagtggcgcagggcacgagacatcttctcgtaggtcatgttcacccggttcttgtgatttccccagagtctggcgagcccatttggatccacaactcggaagatcttggcgtccttgtcttcccacttgatgtagggctcatatcgggtatcaaggagcagctgatacacgtaatcccacagcaggcggcagtcagcgatcctgccgtcaatgggggcctgcggcatcgcggggaaggaacagaccccctgggtcctgcagccgagctctgcacagtgacataagttgagggactcctccttgccaggggtccaccttgccaggccagggtcatccaggtggccgaagttgctggtaagccctgggtctggtggctgcagcaggtggccccttcgggtgtccatctgagaggggccagtcacctcttccggggggactggagagtgctgggtgggcgtcttcagcctgaagatccctccaaaaaagggcccacacaccagggctcgccgctgggtcttgatgtactggagcagctcatacaggacgtcacctgagctgggcgcacggtgccggaagtcgtccttggtgaggatgcagagggcgcgtccgttcatctcgaacccgtgctccgcggtgcatggcagagagtactcctgctctgcccagcgcagccagtgcagcacgtcctccctgctccacagtgcgggctggatgcggagtcttcctggcagcttgcagatccccccttcacccagcaggttaatttgagcttcacatctggcttgcacgtgggtgcctaggggaggcatggctgccacagggcttataggagaaatagccaattctccctcctgcat

SEQ ID NO: 64213 - DNA, 5532 bp, Homo sapiens
ctccaacaaggtgtccagtcgggtgacagcagtgtccttctctgaggattgcagctactttgtcactgcaggcaaccgacacatcaaattctggtatctcgatgacagcaagacctcaaaggtgaatgccactgtgcccttgctgggccgctcagggctgctgggagagctacggaacaacctattcactgatgtggcctgtggcagaggaaaaaaggcggacagtaccttctgcatcacgtcctcagggctgctgtgcgagttcagtgatcgaaggcttttggacaagtgggtggagctgagggtctaccccgaggtgaaggatagtaaccaggcctgcctgccccccagttcctttattacctgctcctcagacaacaccatccgcctgtggaacacagagagctccggggtgcatggctccaccctccaccgaaacatcctcagcagtgacctcattaaaatcatctatgtggatgggaacacccaggccctgctggacacagagctgcctggaggagacaaagctgatgcatccctgttggatccccgcgtgggcatccgctcggtgtgtgtcagccccaatggacagcatctagcatcaggggaccgtatgggcacacttagggtgcacgaacttcagtccctgagtgagatgctgaaggtggaggcccatgactctgagattctgtgcctggagtattctaagccagacacaggtctgaaactgctagcatcggcgagccgggaccggctgatccatgtgctggatgccgggcgggagtacagcctacagcagacgctggacgaacactcatcctccatcactgctgtcaagtttgcagccagtgatgggcaagtccgcatgatcagctgtggagcagacaagagcatctacttccgcactgcgcagaagtctggagatggagtgcagttcacacggacacaccacgtggtgcggaagacgaccctctatgacatggatgtggagcccagctggaagtacacggctatcggctgccaggaccgaaatattcggatatttaacatcagcagtggaaagcagaagaagctgtttaaagggtcacagggtgaggacggcacactcattaaggtgcagacagacccctcagggatctacattgccaccagctgttctgacaagaatctctccatttttgacttctcctcaggcgagtgcgtggccaccatgtttggccactcagagattgtcactggcatgaaatttagtaatgattgtaaacatctcatctctgtgtctggggacagctgcatatttgtgtggcgcctgagctctgagatgaccatcagcatgaggcagcgtctggccgagttgcgccagcgtcagcggggcggcaagcagcaaggaccatcctctccccaaagggcttctggacccaaccggcaccaggccccatcaatgctgtctcctggaccggctctctcatcagacagtgacaaggagggagaagatgaggggactgaagaagaacttccagcactgcccgtccttgccaagagtaccaagaaggcactggcctcggtccccagcccagctttgccccgaagcctgtcccactgggagatgagtcgggcacaggagtccgtggggttcctggacccagctcctgcagccaacccaggacccagaagaagagggcgctgggttcagccaggtgtggaactgagcgttagatccatgctggatctgcggcagctggaaacactggccccaagcctgcaggaccctagccaggactcgctggccatcatcccatctggtcccaggaagcatgggcaggaggcccttgagacttcactcactagccagaatgaaaagccccctcggcctcaggcttcccaaccttgttcctatccccatattatccgattattgtcacaagaggaaggggtctttgcccaagatctggaacctgcacccattgaagatggtattgtctacccggagccgagtgacaaccccaccatggataccagtgagttccaagtgcaggctccagcccggggaactctgggaagagtgtacccaggcagcaggagctcagaaaagcacagccctgacagtgcctgctctgtggattacagcagcagctgcctttccagcccggagcaccccactgaagactctgagagcacggagcccctcagtgtggatggcatctcctcagaccttgaagagccagctgagggtgatgaagaagaggaagaagaggagggaggcatgggcccctatgggctacaggagggcagcccccagactccagaccaggagcagtttctaaaacagcactttgagactctggccagtggagctgctccaggggccccagtgcaggtcccagagaggtcagagtctcggagtatctcttcacgattcctgttgcaagtacagacccgcccactcagggaaccatccccatcctcctcaagcctggcactgatgtcgagaccagcccaggtgccacaggcatctggtgagcagccgagaggcaatggtgccaatccccctggagcacccccggaggtggaaccgtcctctggcaaccccagcccccagcaggcagcctctgtgctgttgccacgatgccgtctcaaccctgacagcagctgggctcccaagagagtggccacagccagccccttttctggactccagaaggcccagtctgtgcacagtctggtgccacaggaaagacatgaggccagtctgcaggccccttcaccaggcgcactgctgtctcgggagatcgaagctcaggatggtctgggctccctgcccccagctgatggccctccgtctcggcctcactcctatcagaaccccaccaccagttccatggccaagatatcccgcagtatctctgttggggagaacctgggcctggtggctgaacctcaagctcatgcccccatccgagtctcaccactcagcaagctggccctgcccagccgggctcacctggtcctggacatccccaaaccactgcctgaccgtcctaccctggctgcattctctcctgtcaccaaaggccgggcccctggcgaggcagaaaagcctggcttcccggtgggcctaggaaaagctcacagtacaactgagagatgggcctgtttgggggagggcaccactcccaagcctaggacagagtgccaggctcatcctgggcccagcagcccctgtgcccagcaactgccagtcagcagcctcttccaaggccctgaaaacttgcagcccccaccccctgagaagactcccaaccccatggaatgcaccaagccaggggcagccctgagccaggactcagagccagcggtgagcctggagcagtgtgagcagctggtggcagagctccgcggcagcgtgcgccaggcagtgcggctctaccactcggtggctggctgcaagatgccctcagcagagcaaagtcggattgcccagctcctcagagacaccttctcttcagtgcgacaggagctggaagctgtggctggggcagtgctgtccagcccaggcagcagccctggggctgtgggagccgagcagacacaggccctgctggagcaatactcagaactgttgcttcgagccgtggaacggcgtatggaacgcaaactctgagttctggaagcctgtcccaagtgaatgaatgctccagcgattccaaactgcagcccctctgcccctcaccaaaacctgcggggctgcttggagtggaaagcagggagcagtgttcagaggcaaagcagccttcccagccgctcctcgtggggggcctgtatttattaatttatttccctgactgttgcctcacttccttggaactcctgcctccacagcccctccagtggcagggacaggtcttgggtctttgtcatcttggtgctgtgagaggtaggagggcagcctgccccatctaggaatctgggaagggctggccctctcttagaagccatttgaaattactgcagggattagctccctgtggtggagcatacacagggtactctggggtcgaggtgagaggtgatgtggtattcagtgcccgtcagccaactgtgggccttcacctctacctgcacttcccctctcacaccagctgcactcccgtggctgccagagcagggtggttttccccaatacctggagctcagaaaggcagagccatctggccctccagggtgtccccagccatcaggagacttgagttggtatttggacctgagcccgcacattccactcccattctccctccaagaggggcccagcattgtatttccctgtgaccccttactctcctggccagaacttgagccagctgtgggatgttgctgcaggacagtaagccctcacctgggcaaacatgaagctctggcctcctttcctcagccccttgttcttccctgtcctccaccctggaccccagccggctgctggagcccagaggccaccttctccctgcatcctgaatgatgcttagtcagaagcctgtgttggaacatccctcgtttacggggcgctggcctacctcctgaggacctcagccacagatgagatcacacgcatgcacgtgcacacatgtacacacacacacctacctgcacagcacgctgttgagtgttggttgctagagtatccggctggctgctgtgtgcctggtttcctcacatcctgcctcagcttcaccaccctggcttatgtggaacacctatcagggagcagaaaaggggtgcagtacactaagtgaacccagattctggattcttggtgtccacagcctagctgatacgagatagcccataggacacctggtttaggtagaaggagcctcctcaaaggcagtgctgggcacccacgggtgtgctggatactggagtttgagaggagggaggtgctggggccaaaggagacactagaaaagtggtagatgggacaggtaagtggcagaggtgaggggataagttagaatgtaaaagggcagtaattaggggtgagggaaaggagataggggaccctaggaggtagagtgggaccatgtcgtgaggcagttgaagagttgaggaaaggtttttctgggccctactgctcccctctgctgcaggtaagtcagagcagctttaccacagcttcaggccacgagagccccttcacccgccctgctgcgccataggcagaggcttataaagaaatgggttctgggccaggtgtggtggctcaagcctgtaatcccagcactttgggaggccgaggcgggtggatcacctgaggttaggagttcgagatcagcctggccaacatggtgaaaccctgtctctactaaaaataaaaaaattagctgggcgtggtggtgggcgcctgtaatcccagctactcgggaggtttaggcaggagaatcgcttgaaccctggaggtggaggtggaggttgcagtgagccgagatcgcgccattgcactccaacctaggtgacaaagctacacgccatctcaaaaaa

SEQ ID NO: 64214 - DNA, 1348 bp, Homo sapiens
ttttttttttttcaggaacataccacgtttatttcttgttgtcaagccagaaatgaaccaaaagaagcacatctcaggtgaaggaacaactccttattgcagtcatagcccagctctcctgggatccggggaacgccctctctcctctccctcactccctcctgtttaacttgggactgaactggaactcaactcttcccccaaacattttaaatccaaaaagaccagcagggggcgccctttcctcagggtctggccctgcaggcagggcaggtgagggcctgaatacccacacccagctctggcaggccccctgccttcaacttggcacttgttccagtgcccggggacccctcgtgcatggagcatctgtgcctctattttgaaacggcaccgtccaacccaaaaaacaacacaggatctcgctaacctgcgggcaggactaacccagactcagccctctgcaggctgatgctgaattccttagtgctttgctctccccagatgcatcctctcttggcaatgggtaggaggcagctggggcagcagctgctgctcgagaaaggatctgagtgtggccttgacattctcaatggcggaatcgctgcagcacatactggcgggcagctggggagggctcaggggatgagaagtacgggtgggccagggcagtcttggctgtgatccgctggctggggtcatactgcaggagttgcatgagcaggtccctgccctctggctccagattgggcacaatctcttccagtcccttcctggtccacttagggaagctgcccttatagtcaggcagctgggtgaccccgggccatgtgtcttcgctgggtgtccccagcatacgaaagatacgaaagagctggtcaatctcagagtccccaggaaacagggcttttcgagtcaccatctctgcaaagatgcaaccaatgctccagatatccacagctgtggtatagaacttgctgcccaagagaatctcgggggcgcgataccacagtgtcaccacctcatgggtgtaggtgcgcaggggcaccccgaaggcgcgagccaggccgaagtcagccagcttgatggcacccaactcattgatgagcaggttctggggcttcaggtctcggtggatgacccgatgtgagtggcagaaactcaccccctgcagcagctggaagaggtagctcttgatgaggtgcagggggagctctgagcctggggtggagtccatgtacttcttcaggtcctggctgaggaactcaaacaccagatagagcttcctctcgttgtgcaccacgtccagcagtcggacgatgttggggtgctctcgtgccgaattcga

SEQ ID NO: 64215 - DNA, 1121 bp, Homo sapiens
cggacgcgtgggccggccctggttcccttcgagtccccaaaggacagcccagcccacgaggtgaccggcagcggcggggcctacatgcgctttgatgtgccgcggccaagggtccagcgcagctggcccaccttcatagccctgttactgcaccgctacgtggtggcgcgggtgatctgggccgacatgctctccatcgccgtgacctacttcatcacgctgtgcctgttccccggcctcgagtctgagatccgccactgcatcctgggcgagtggctgcccatcctcatcatggctgtgttcaacctgtcagacttcgtgggcaagatcctggcagccctgcccgtggactggcggggcacccacctgctggcctgctcctgcctgcgtgtggtcttcatccccctcttcatcctgtgcgtctaccccagcggcatgcccgccctccgtcaccccgcctggccctgcatcttctcactgctcatgggcatcagcaacggctacttcggcagcgtgcccatgatcctggcggcaggcaaagtgagccccaagcagcgggagctggcagggaacaccatgaccgtgtcctacatgtcagggctgacgctggggtccgccgtggcctactgcacctacagcctcacccgcgacgctcacggcagctgcctgcacgcctccaccgccaatggttccatcctcgcaggcctctgagccagccccgcccactgccagggacgccgagggcctgaccaggggccccgaggcctgagggcccctcccctgtccccacctcagtgcctgcggggccctgagcctccccctgtgccagcagccccactccctcagggtccagccatgccccaccctggactgaagttctgcaaagtcctccgaggaccggaacacgtttctgcgacccggggctctggccagcactgagatctgcgttgggtctcatacctgcgactacctttcatctgagatcagcggccccggctccagcccagccatcactctgcagggtcacacgcgccgcgtgcccacccaagacagcatacacccgccatagagtgccccccagcgatggcaccctgccctgatcaccatcggatctgatgggg

SEQ ID NO: 64216 - DNA, 1926 bp, Homo sapiens
ttttttttttttgaaaggttacctgattcttttatttaagaaaagtgaaatacatggacctgaagtgagacagcagagggagggagtaagagcggccagggcaaggcagcttggctggccagcccccaaccctctgactgaaaagccagcagcaggctgcatctctgagggccatacctgctttgtacccaccttggggcctcagagctagctactctagaggaccacagggtgcagagagggtgtcctgagggtccttcctaagagggattcctgaggagggagctgagaccctaagggcagcagcaatcttctggttaaactgctccccttcactgtcccacctaggggtggggaagagccaggagcaatggggaatgctgtgagggctgtgggggtggggggacccagcagacctgggggccgggttgaatgtcagctgcttgaagagaggtccatggtgctggcactgaggccccgggagacctggaggggtgctgcactaggttggttcagatagttcaaggaggctgctcgcttcatgttgctgctggagggccgaggctcagtcccctggagcttcctcaccaagagttcactgcttctgcggagcacatcccggatcttgccaagagagccactcctctgcagggtcccactgccatccccggaccactccacagccacagaagcatcttcacctccctcgaatttcacactgtctccagggccctcctgggaggtccttctaccatcactctccccaagcagctctgccaccttcgtctggctgatagggtcagtgccctgtctccgggaccgcagggcacattcctccagggtctcagcagcctccagctttccctggcgcctatacagagctcccaggtttctcagagtagtgttcactgtggggctgctcactttgcaggccttgtaccagcctccatactcagcatagggtgtcccaccctcatggtgccggcttttgctcatttcctcccgctcctctgcatgcatccagatgggcttgtggtcatcatccacagacccaaactcctgtacatgggcacgggtcaggatctctttgtatagtgtctcagcctcagcatatttgccctgtttcaggtaacaggaagccaggttgttcttggtccgggctacattagggttgtccggccccagctgcccctcgtagatggccagtgctcgctggtagtagcgttccacggcctcatacttgccctggttttggcacaagagggccaggttgttcagctgttttgccacatctggatgattcgtgcccaggaccttttctcgaatctccagtgcccgctggcacagaggctctgcctccttgtacttgccccttttgccatagagcacagccaaattgttgagtgtggcagccacagcaggatggtcaggtcccaaggtgctctcccggatgctaagggcatcattcagcaggtgggcagcttccttatacttattctggtcacgatacaccaaagcaaggatgttgagcatggtggcgacatcagggtggccacggcctgatgtgcgctccaggtcctctagtgcctgcttacagagtggcacggccacctcatagcgaccttgggctgcgtactggatcaccaggttgtgcaacgtccgcaaccttgctgggatctcatatccaccctgctgagctgctgtagcaccttgaccacgggacaagccattgctggggtcctcttcctcctcattaggaaagaggtcatccagggaatccttggtggcatcgccttctttctcctcctggaagggaagaagcaacatataagggccaagatatccctacctagtagccttctcagtgacccctctaagccatgaaatcacagacagatgggacctaggagaagactgttgttcctg

SEQ ID NO: 64217 - DNA, 903 bp, Homo sapiens
ccatgcgtgaactcatgtgatgaatcacggtcaaaagcctgtcaaaactttgtttcatgcataaaattactcaaaatatcatataaaatcacctttaggttattgtatataaggtgtatatgaaacataaatgaattttgtgtttagatttgggtcccattcccaagatatctcattatgctatgcaaatattccaaaattcaaaaaaatccaaaagctgaaacacttctggtcccaagcatttcagacaggggatactcaagcagtacgtatttttaacatagagaagttcactaattttctttccaaaacatataaaagtgaattaagaaactaatactttattaggaatgttaatgtccattaaaagtataaccaacatccattcataagagtgacctttggaaagattttgtaagggtgcaaataagactttaagggaagtggacatccagtacaaagaagagattccatgtttgtggctcaatgtcttacacttaaatttcacagtgcctcaagattctcaggagggcacccacatgttcccatgcgtatccggtgctttgacataaggaatgttccatatccatggccgatctttacttccatacagttctggaggcaaatcatatggcacaggaaaggtggccattggctcctggctgccagcgaagaacttctgtttcactttgaaactgtctagaccaaatgctgaagggaggaaaaggaccccgagctcgtaggagcggatcatcagctgggtgccattcttctccaatgctccccaggcagccttggacagatttgcgcttgtgacaaggaaccaagcaattttactgaagtctggagaaggcctcatatatgtcttaatatgtggcatggcattgctgcggccagaagtct

SEQ ID NO: 64218 - DNA, 1274 bp, Homo sapiens
agcatcggaacgacctcccggtcgacccacgcgtccgccaggcctggctcgagatgccgaagtcgtgcgcggcccggcagtgctgcaaccgctacagcagccgcaggaagcagctcaccttccaccggtttccgttcagccgcccggagctgctgaaggaatgggtgctgaacatcggccggggcaacttcaagcccaagcagcacacggtcatctgctccgagcacttccggccagagtgcttcagcgcctttggaaaccgcaagaacctaaagcacaatgccgtgcccacggtgttcgcctttcaggaccccacacagcaggtgagggagaacacagaccctgccagtgagagaggaaatgccagctcttctcagaaagaaaaggtcctccctgaggcgggggccggagaggacagtcctgggagaaacatggacactgcacttgaagagcttcagttgcccccaaatgccgaaggccacgtaaaacaggtctcgccacggaggccgcaagcaacagaggctgttggccggccgactggccctgcaggcctgagaaggacccccaacaagcagccatctgatcacagctatgcccttttggacttagattccctgaagaaaaaactcttcctcactctgaaggaaaatgaaaagctccggaagcgcttgcaggcccagaggctggtgatgcgaaggatgtccagccgcctccgtgcttgcaaagggcaccagggactccaggccagacttgggccagagcagcagagctgagccccacaggctccggacgcagaggtggcagtggcaccagggccggcagagctttggagctctggctgtggacatttttgtctgctgtggacactgagaaagttggccatgaggcctgcttggccggggatcgagacagtagccaagctccccggcgagagccccaatgccgtctgggggacgtttagaggcgtggcactaggagtgcacatctgtgagcatgacaagcttatccgtcccatggtaacagaagtccaggctgaggctgattctggacgctgtcctttcagcacacgcagagcaaagatcgttggaagcccccagtgtgggagatgctcctcagggaggaagccatgtgagggggctggctctgtggcgggtgagtggtcccctcctccatcagcctggacagccgctcggggttctatgagagagactcctgtcccggcctggtgtgagtgggcagtgtaataaagcgtctttctatacggaaaaaaaaaa

SEQ ID NO: 64219 - DNA, 6565 bp, Homo sapiens
cgtttgaatagtagccttgaaaggcggggtcgacggatagaccacgtactcctaaatgctgatggcattcgaggttttccagttgttcttcagcaaatcagtaagagtctcaattatctgcttatgtcagccagtcaaaccaaatcagagagtgtggaagaaaagggaggaggccctccacggtgcagcatcactgaactgcttcagatgtgctggcccagcctaagcgaggactgtgttgccagccacaccaccctctcccagcagctagatcaggtccttcagtcactgagagaggcactagagctgccagagcccaggactcctccactgtcttccctggtggagcaggcagcccagaaagctccagaggcagaggcccaccctgtgcagatccagactcagctcctccagaagaacctgggcaaacagaccccatcaggcagcaggcagatggactacttgggcaccttcttcagttactgcagcacccttgctgcagttctccttcaaagtttgagctctgagcctgatcatgtggaggtcaaggtaggaaatccctttgttctgctgcaacagagctcttcccaactggtgtcacatctcctgtttgagagacaagttcccccagagagactggcagcccttctggcccaagagaatctcagcctaagtgtgccacaggtcatcgtcagctgctgctgtgagccccttgctctttgctcatcccggcaaagccagcagacctcctccctcctgactcgtctgggtactctggcccagctacacgcctctcactgcctggatgacctcccactttctacaccgagctccccgaggacaactgagaaccctacattggaaagaaagccctactcctccccaagggactcatcactcccagccctcacctcctctgccttggcctttcttaagtcacgctcaaagctcctagctacggtggcctgcctgggggcttccccgaggttaaaggtcagcaaacccagcttgtcatggaaggaacttcgtggccgcagggaggtgcctctggctgcagagcaggtagcccgggagtgtgagcgccttctggaacaattccctctgtttgaggccttcctcctggctgcctgggagcccctgcgagggtctttgcagcaggggcagagtctggcagtgaatctctgtggttgggccagtctttctaccgttctcctgggcctacattctcccattgccctagatgtactgagtgaggcttttgaggaatccttggtggccagagattggtcccgggcccttcagctcactgaagtgtacgggcgagatgtggacgatttgagcagcataaaggatgcagtcctgagctgtgctgtggcatatgacaaagaaggttggcaatacctgtttcccgtgaaggatgcatctctgagaagtcggctggccctacagtttgtggacaggtggcccctggagtcatgcctggagattctggcctactgcatttcagacacggctgtccaagaaggactaaagtgtgagctacagaggaagctggcggagctgcaggtgtatcagaagattctgggtttgcagtctcccccagtgtggtgtgactggcagaccttgaggagctgttgtgttgaggacccatcaactgtcatgaacatgattctagaagcacaggagtatgaactgtgtgaagagtggggctgcctgtaccccattccaagagaacatttaatcagccttcatcaaaagcatcttctccaccttctagaaagaagagatcatgacaaggctctgcaactcctgcgaagaatccctgaccccaccatgtgccttgaagtgacagagcaatccctcgaccagcacactagcttggccacttctcacttcttggccaactacctcaccacccacttctatggacaactgactgctgtccgacaccgtgaaatccaggcgctgtatgtgggatccaagattctgctgaccctgcctgagcagcaccgggccagctattcccacttgtcctctaaccccctgttcatgctggagcagctgcttatgaacatgaaggtggattgggccactgtggctgtgcagactctccagcagctgctggttggacaggagattggcttcactatggacgaggtggactcactgctttccagatacgcagagaaagccctggactttccataccctcagagggagaaacgatcagattctgtgattcacctccaagaaattgtccaccaggctgcagatcccgagaccctccctagatcaccatcagcagagttctctcctgctgctcctcctggtatctccagtatacattcccctagtctaagggaaaggagtttcccaccaacccagccctcacaggaatttgtgcccccagcgacaccccctgccaggcaccagtgggtaccggatgagactgagagtatctgcatggtctgctgcagggagcacttcaccatgtttaacaggcgtcatcattgtcgccgctgtggccggctagtgtgcagctcctgctccactaagaaaatggtggttgaaggctgcagagagaaccctgctcgtgtgtgtgatcagtgctatagttactgcaacaaagatgtaccagaggagccttcagaaaaaccagaagctctagacagctccaagagtgaaagccctccatactcgtttgtggtgagagtccccaaagcagatgaggtggaatggattttggatctcaaagaggaggaaaatgagctggtgcggagtgaattttactatgagcaggcccccagcgcctccttgtgcattgccatcctgaatctgcaccgggacagcattgcctgtggtcaccagctgattgagcactgctgcaggctctccaagggcctcaccaacccagaggtggatgccgggctgctcacggacatcatgaagcagctgctgttcagcgccaagatgatgttcgtcaaagccggccagagccaagacttggctctttgtgacagctacatcagcaaggtagatgtgctgaatattttagttgctgctgcctatcgccacgtgccatctttggatcagatcttgcagccagctgcagtaaccaggctaaggaaccagcttttggaagccgagtactaccaactgggcgttgaggtctccacaaagactgggcttgataccaccggggcgtggcatgcttggggcatggcctgcctcaaagccgggaacctcactgctgcacgggagaagttcagtcgctgtctgaagcccccatttgacctcaatcagctgaatcatggctcaaggctggtgcaggatgtggttgagtacctagagtccacagtgaggccctttgtatccttgcaagatgacgattactttgccaccctgagggaactggaagctacccttcggacgcagagcctttctctggcagtgattcctgaagggaaaatcatgaacaacacctactaccaggaatgcctcttctacctgcacaactatagcaccaacctggccatcatcagcttctacgtgaggcacagctgcctgcgggaagctcttctgcaccttctcaacaaggagagtcctccagaagtttttatagaaggcattttccaaccaagctataaaagtgggaagctacacactttggagaacttgctagaatccattgatccaaccttggagagctggggaaagtacttgattgctgcctgccaacatttacagaagaagaactactaccacattctgtatgagctgcagcagtttatgaaggaccaagttcgggccgccatgacctgtattcggttcttcagtcacaaagcaaagtcatatacagaactgggagagaagctctcatggctacttaaggccaaggaccacctgaagatctacctccaagaaacatcccgcagctctggaaggaagaaaaccacattcttcagaaagaagatgactgcagctgatgtgtcaaggcacatgaacacacttcagctgcagatggaagtgaccaggttcttgcatcggtgcgaaagtgctgggacctctcaaatcaccactttgcctctgccaaccctgtttggaaataaccacatgaaaatggatgttgcctgcaaggtcatgctgggagggaaaaatgtagaagatggttttggaattgctttccgtgttctgcaggacttccagctggatgctgccatgacctactgcagagctgcccgccagttggtggagaaagagaagtacagtgagatccagcaactgctcaaatgtgtcagtgagtcaggcatggcagccaaaagtgacggggacaccatcctcctcaactgcctggaagcgttcaagagaattccgccccaggagctggagggcctgatccaggcaatacacaatgatgacaacaaggttcgggcctacctgatatgttgcaaactgcgttctgcctacttgattgctgtgaagcaagaacactcacgggccacagcccttgtccagcaggtgcagcaggccgccaagagcagcggggatgcagtagtgcaagacatctgtgcccagtggcttctgacaagccacccccggggtgcccatggcccaggctccaggaagtgaccttgggcagtggggccaggaacacgtggcctgagagctgggcaacagcagtgatggcgatgccctccacctctttcctccagtggagtgggacttctctggctctgccctaggttggaaagagttggattggaccctacttgccttcccgggcaaggataggacctttcacgcaagtgccatgtttctctaaaattgtggaatctatgtgtgtttgtctggagatggccagttctttctacctcagagtgagtgagtgagtatgtgtgcacacacgtgtgcattgtttcctgtgcgctgatgtttacgcccaagcatttctgaacaaatgaaactcttctccatttaaaagaggcactttactttggacttgccactctgaaaaccttccctgcgttttggttcttgacccgggttgtcctgtttgtatagtcccccctctgtgggacgtgctttagtagctcctcttacctaggaggggcttttacagaggaattaggaggcaacaccaaaagggattgcctcttttccttccttcccattccaaaaatttcaggaggatgggctttggggggcaagtggctacctggtgggaattaaacctgttttccaggtgtctcttctcccaagcacaagaagtcctggagtctttggaaggtagtctgaatagaagggttttcaggtgcaggcatctgaaagctgtgggtatgtgtataaatgatcaggtctgtgaggctaacacgggcaagagggaaagaaaggctaaccatccaaacagggatacaggggaggcggtggggggtggtggggggagcgggtgctcacaagcacagagctgcctgttgtgaatgtccctgctgcaaagttggtgggtgagagaatgggacttcctctttgagagtctggggagagaaaaggtggccaggatcctaggactgaatgactcgattttacctatttgagctgcagtcctgtttgcgctccttgaattggttaggaagctgcttccttttccctcctgcttcccttcagtctcttcaggaccacaggatggatatgcagacatgtggggtcattgggaagggagtgcgcttcttttctctgtcttagaaaagggagtcaagggttggctttggaattgggcctctggacagagtcagaatgagggaataatgaataggtcacatctggttggtggaaaactaggtgaagtgcttctttaatatgcactgtcttgtcttcccacgcaagatgtgacaatgtttgagaaaaggtgtgtcatactcagtgacttcaatttgcaaatgtggggcctaaagaaagctctgcagctctgaacctctcactggccagagctcagcctattggtcccatccatgatgctgagacaaacagaaactggaagctgaagtcagtgtctctggtgctcagaaaccctgtggatttccctctgaaccaagatttttagtagtaaaataaacaactcatggacatctgtcagatgagaagttttggtcctgttagagaggagaaagactgtaatgaaactactagacccatttgggctaaagtttggcttttcctttcttgagtcatagaacatatccatctcccaggaaatgtccttctctgggcgtctgcttgcccttctgagtctgccttttttgcactgaacataagcactttatactaatggggtcacaaatcttgcagcccttaatttgggataagaccagattttcctgacattttcctctaactcattgaactatcaaattataggcaaccactgactagactgatatgagatgaggctaaaagcctttgaacaccacgctgtagtctccaacagaaaaacaccaccaaaacagatacccatgttgaggggttgaatgttttactacaaacaagccacaataaagtgtctatcaacatg

SEQ ID NO: 64220 - DNA, 2273 bp, Homo sapiens
tttttttgttttttattttttctttttaagtttgattttttttatttcaaaatgctttgcaattaaatgaattactgttcagaagtctcccacttttcatacaaaaatactgtgctactgatacagttgaaaaaattcaatgatgtctctcctgcaggagaaattcacagcatccccagggtcaacatgaaatctggccctgtccccgccactgggggctccccaggcctgcgttcctgataaactgggacaggttttccaggcactgaccaactatccaccaagggtcctctgcctccaagacagaccctgaatcaatagcagcaactttcccatatttcatgtagggatatgtggagggggacaggaactctcccatttccccagctgggcctactacctgcctgccctgttcactctggtgccatgaggcaggttcagtgattgattggtcttgcctgctgcagaggacctggccagctccagaagggtcactcatcaggtcctgcaaaggtctgtatcattaatcagtgtcatcagtgtcctcagaagacactagcagagtccagggtgatgcgttcagccacaagcacaaagactgctttttctaaagagcaggatgaggtgaatgtgggaacggaaagcagttgtcacgaaggctgtgtggctctgctgggggagaggcatccacagtctgtgccaaggaggtacctcaccctgtgcagcaggagcgttaaggccaaaaaacaaaaggggccaacagaaaacagctcaggtgatggggggaggagcagcaagaaaaaacgacaaccgagaccaactgaaggttcggtcaggaatgcaggctcttccgtctatacagtgtttaaaaagatccaaatgtgactgagatcattccagcctgcactttttatttgtaggcagaaggaacgggataggttgaggggcatgacgggggctctcgccacctcttgtctgcacctctggaacaggtgggagccgaatcattcaagtcctacctggtcagactcccaaccacgctgaggcaggcccttacctggatggcctcatgggcctccctcttgaaaagaccctcactctgtttggaaaagatcccttagcagccataatcaggaaagagactctagagcgagcccagggcttccccaaagcggattttctgtcctgttttcagctggaaattgaagtccttgggggcctcgaagatgagcacgatggtggagcccaggttgaactcgcccaggtgctcgcccttacgcatggggacgccctctctattggtgtgcgtcacgaagctgaagtcattgtaggagcccttgctgtgccttgggctgtttgtgtgcaggtcccggtcaaagtagatgcgaatggagcccacgttggtggcccccacagctgtcagtgagaagaagccatgtttccagtcccccgtcaggaccacccgctcgttatggcagaagagctctttgatccagcgagccatgccagggttcactgacatcagggagcctgggaagtggcgccggtgggacacagtccagtcggtgggggagtggaagcagtggtagtccccaggggccaggtagatgacacagtgatagagctcattcccttcccgggtgaccagctggttcttgaaggagtcacacgacgcggctggtgggaagggcaggtcctctgtgcacatacgcgggcccaggaacgactccagggagtaggtgaccccctttacctgctccacctcacagttcttcacctgcccaaagttgaggatccttccatccgatgggctaatcacgctgtgcaggccacagacaggccgggcctgcggcttcagcttgcgccggaagaactcgctgaggttgcggtagtgatgcaggtcctccacagcggcctctttcatgttcaccccaaacgtccagatgtacaggctgtagacgggcctgcgcagccagtgtggcagctccacctgattgaggcgaccccaggcccgtgacagcaagcgcgttggcactgacttgtacaaagccacctgcaggccacagggcaaggggctgagttgcccacactgccccagctccagagagcccaagtagtgtcattagcccagctctcacttcaggggagaatctgcaccccacggaggacaccagggcccaggtgccccacgctgcttttgtgatgtggctgtttctcactgggaaccagactgcacttgccacacggagtgctggatttacatacaactccag

SEQ ID NO: 64221 - DNA, 936 bp, Homo sapiens
cggacgcgtgggccagctttaaatagtggaggcggaaaattgccatttacatttgtaactaaggaagtagctgaagccacatgtaattgcctccttgcccaggcagagcaggcagacaagaagggaaaatcaaaggcagcagcggaacggatgatacttgaggaattcggacgatgtttgatgagtgtcatcaactctgcaggaaaggcaaaaagtgacccttgtgccatgaattgctaactcttgcacaaaagactgataaatggaactgtacagaaaatttaaggtgcagggacacttgattttctggaagaaaaacaattactgtattttaattcagtccttgttttaaaagacctgaaattataatactgaaggagaagaaattttaaatgaggaaattagtacattttaaatcttagttaaatctgcttatgccccttctaaattgaatttttctttattatatagattttttaatttgcttgggtttcttaagaattagatgttctctgatacctttgataaaaaatgtttataaattcatataatttataatgtatggtgttgtatgactttgttaatagaaaagccaaagcagcagtggttagcacccattctttgggacttgatctagaatatctgcagacagaatgttacataaacaaattcttatgaaacacattcaaatgacattttgtatttagaaaaggactatcttttaaagaaaaagcagccttttagggccgattctggaataatatcctgttgtcactttgggaatgtcagaaggggaaacaatccccaggcacactaaaaattttttaaagttatttaaaaaaacatataaaatattaaaggacagtaaatctcagaggatgggcaatgtgtttctataataaggaaaggctaacagatgctctggggctgtctcca

SEQ ID NO: 64222 - DNA, 2131 bp, Homo sapiens
gcgggtagccagaggctggggcggctgtggagcctgtggtgggagcggcattgtggggcagggaaaaggtgagccgagccgacggaggggacgcgctgcggggcgcccccagtctatggagcggggtaagatggcggaggcggagagcctggagacagcggcagagcacgagcggatcctgcgagagatcgagagcactgacacggcctgcatcgggcccacgctcaggtctgtttatgatggtgaagaacatggacgtttcatggagaagcttgaaactcgtatccgtaatcacgaccgagaaattgagaaaatgtgcaactttcattaccagggctttgtggactctataactgaactgctgaaagtgagaggagaagcccagaaactcaaaaatcaagtgacggatactaatagaaaactacaacatgagggaaaggaactggtaatagcaatggaagagctgaagcagtgtcgactacaacagagaaatatttctgccactgttgataaattaatgctgtgtcttccagtcctagagatgtacagcaaactgagggaccagatgaaaactaaaaggcattatcctgcactgaaaactctggaacatctagagcatacctacctgcctcaagtaagccactatcgattctgcaaggtgatggtggacaacatccccaagcttcgagaagaaataaaagatgtttctatgtccgatctcaaagactttctggagagcatccgcaaacattcagacaaaattggagagactgccatgaagcaagcccagcagcaaagaaacctggataacatcgtcttgcaacaacccagaataggtagcaagaggaaatctaagaaagatgcatatataatctttgatacagagatagaaagtactagtccgaagtctgaacaggattcaggaattctggatgttgaagacgaggaagatgatgaagaggtacctggggcccaagatttggtggatttctctccagtttatcgatgtctacatatatattctgtcctgggtgcccgggaaacatttgagaattactaccgaaaacagaggcgaaaacaggctcgtttggtacttcaacctccatctaacatgcatgaaactttagatggctacaggaagtattttaatcaaattgtaggcttttttgtggttgaagatcacattttacatacaacccagggcttagtaaatagagcctacattgatgaactgtgggaaatggcactttcaaaaaccatcgcagcactccgtacccactcgtcttactgttctgatccaaaccttgtgttagatttgaagaacctcattgtgctttttgctgacacacttcaggtgtatggtttccctgtaaatcagctttttgacatgctgttagaaatcagagaccaatatagtgaaactctgctaaagaagtgggcaggtattttcagaaacatacttgattctgacaactacagtcctataccagtaacaagtgaagagatgtacaaaaaggtggtaggacaattcccatttcaagatatagaactggaaaagcaaccatttccaaaaaagtttcctttctctgaatttgtgccaaaagtttacaaccaaattaaagaatttatctacgcttgtctgaagttttcagaagatcttcatctaagctcaactgaagttgatgacatgattcggaaatcaacaaacctgttgctaaccaggactctgagcaactctctgcagaatgtaattaaaaggaagaatattgggcttactgagcttgtccagattattatcaatacaacacatttggagaaatcctgtaagtacttggaagaatttatcaccaacatcactaatgtgcttccagagacagttcacactaccaagctctatggcaccacaacttttaaggatgctagacatgcagctgaagaagagatttataccaacttaaaccagaagattgaccagttcctacagctggcagactatgactggatgaccggagatttgggcaacaaagctagtgattacctggtagacctcattgcctttcttcgtagcacctttgctgtattcacacaccttcctgtaagtggcagttgctcttactttgtcctttatata

SEQ ID NO: 64223 - DNA, 1743 bp, Homo sapiens
taccgggtcgacgatttcgttcggaatcctgggaccttcgggactcccgggtccgaagggtgacaaaggcagccgtggggactggggattgcaaggtccgaggggtcctcccggccccagagggcggcccggccccccgggtcctccagggggtcctatccaattgcaacaagatgatcttggggcagctttccagacgtggatggacaccagtggagcactcaggccagagagttacagctatccagaccggctggtgctggaccagggaggagagatctttaaaaccttacactacctcagcaacctcatccagagcattaagacgcccctgggcaccaaagagaaccccgcccgggtctgcagggacctcatggactgtgagcagaagatggtggatggtacctactgggtggatccaaaccttggctgctcctctgacaccatcgaggtctcctgcaacttcactcatggtggacagacgtgtctcaagcccatcacggcctccaaggtcgagtttgccatcagccgggtccagatgaatttcctgcacctgctaagctccgaggtgacccagcacatcaccatccactgccttaacatgaccgtgtggcaggagggcactgggcagaccccagccaagcaggccgtacgcttccgggcctggaatggacagatttttgaagctgggggtcagttccggcccgaggtgtccatggatggctgcaaggtccaagatggccgctggcatcagacactcttcaccttccggacccaagacccccaacagctgcccatcatcagtgtggacaacctccctcctgcctcatcagggaagcagtaccgcctggaagttggacctgcgtgcttcctctgacctctgacctcgtggccactctaggcctcatggaggagggaagaggaagaggcaaggggagggtactgaggggcagatggctccaggagaggcagctcccctgcccaagggtccttgggcagaccccagctgttgtctgcccagtagaagtgggtgggggtaggaggggatagggtgtccttgggaacaatggatcccagcttagccccaaagaccaaccaaagagccagccagagtaagctggacctgcaacctgcctgagccccgtggcctctcagctctgcggccaccccgttccctccccagcttcctgcccaaagagccccacattcaagccaacttgagggaagggggcgtctcgtcagctggtccctgctagggagctattgatgtgcaatattagaaaggagacatgaaaaaaggagaaaaggaaagacagaagtgtatatatatattatttaaacaaacaaaaagaaggtgcgttactatttttttttcacccgggaaagaggtgagaggatgggaaggagcagccaggcgtgggaagcggcgagatcctcgggctgggggtgcccacgtttgctacctccccctgtgaaatcgctggtgcctcacaattgtctctcacagtgtatgtgatttttttaaggaaaaaaaaaaatccctatttaagattctgaaggtgctaccattattttgccacagactttgaagaaacttttggatgtggggcatcatccgcatctttctctctcctccaaatgacaaagtttggggaatttttgaattttcctagcatcgcccttgtgctcatcaggtaatctgctaaggaggaaaaaaagaaaagaaaaaaaggaaaaaaaaaa

SEQ ID NO: 64224 - DNA, 2254 bp, Homo sapiens
tttcgtgacttccggcgggaggcggaggcggaggcgcaggcgctggctggcaggtgtcgctaaccggacggtggtcgccagggcgagaggcgggagccggagaggactcaggtacttctgccctccctttggtctccctgttcttctatgtggtgacagatggcaaggaagtcctactaccagaggttggggccaaggggcagttgaagtttatcagtgggcacaccagtgaacttggtaacttccgctttacacttttgccaccaaccagtccaggggatacagcccccaagtatggcagctacaatgtcttctggacctccaacccaggactgcccctgctgacagagatggtaaagagtcgcctaaatagctggtttcagcatcggcccccaggggcctcccctgaacgctacctcggcttgccaggatccctgaagtgggaggacagaggtccaagtgggcaagggcaggggcagttcttgatacagcaggtgaccctgaaaattcccatttccatagagtttgtgtttgaatcaggcagtgcccaggcaggaggaaatcaagccctgccaagactggcaggcagtctactgacccaggccctggagagccatgctgaaggctttagagagcgctttgagaagaccttccagctgaaggagaagggcctgagctctggcgagcaggttttgggtcaggctgccctcagcggcctccttggtggaattggctacttctacggacaagggctggtattgccagacatcggggtggaagggtctgagcagaaggtggacccagccctctttccacccgtacctctttttacagcagtgccctcccggtcattcttcccacgaggcttcctttgggatgaaggctttcaccagctggtggttcagcggtgggatccctccctcacccgggaagcccttggccactggctggggctgctaaatgctgatggctggattgggagggagcagatactgggggatgaggcccgagcccgggtgcctccagaattcctagtacaacgagcagtccacgccaaccccccaaccctacttttgcctgtagcccatatgctagaggttggtgaccctgacgacttggctttcctccgaaaggccttgccccgcctgcatgcctggttttcctggctccatcagagccaggcaggcccactgccactatcttaccgctggcggggacgggaccctgccttaccaaccttactgaaccccaagaccctaccctctgggctggatgactacccccgggcttcacacccttcagtaaccgagcggcacctggacctgcgatgttgggtggcactgggtgcccgtgtgctgacgcggctggcagagcatctgggtgaggctgaggtagctgctgagctgggcccactggctgcctcactggaggcagcagagagcctggatgagctgcactgggccccagagctaggagtctttgcagactttgggaaccacacaaaagcagtacagctgaagcccaggccccctcaggggctcgttcgggtggtgggtcggccccaacctcaactgcagtatgtagatgctcttggctatgtcagtctttttcccttgctgctgcgactgctggaccccacctcatcccgccttgggcccctgctggacattctagccgacagccgccatctctggagcccctttggtttacgctcccttgcagcctccagctccttttatggccagcgcaattcagagcatgatcccccctactggcggggtgctgtgtggctcaatgtcaactacctggctttgggagcactccaccactatgggcatctggagggtcctcaccaggctcgggctgccaaactccacggtgagctccgtgccaacgtggtaggcaatgtatggcgccagtaccaggctacaggctttctttgggagcagtacagtgaccgcgatgggcgaggcatgggctgccgccctttccacggctggaccagccttgtcttactggccatggctgaagactactgaagggagggagaggaggggagccaagacactcatgccactctggctctgaagggacaaaggcttctggcttttgcccccagccccttggataccagtaattcaaaccttcctcatttcatctcaggtgtctccttgctgtcatcccacatagccctggggtgaatgtgaatccagagtctatttttctaaataaattggaaaaaacaaaaaaaaaa

SEQ ID NO: 64225 - DNA, 2322 bp, Homo sapiens
ttttttttttttgggtttgagagtttaatctgtgctctggcgcccacagtgctgcagcccctcatgggccagagacagggtgcacggggactcccagcccctacccggcaagagaggcatcactgacgctgcatctgccatgcgctcctggtgtgactgcaccctgtcaggccagacccggcttgagccaacttagccaagccagcgtcagtgtcaccagcctcatgggtggagccaccctcatgctgctctgcagcaccctctgaacccgatatccccaggcctgggaggtgctgaaggctcaggacgcctcttattgctctgaagtctttgtgaccaagtggagtgctgtgactgtggggccaagagagaagctgccaggtacagggaaaggcgctggtagggagccagccagaaggtgcagcatcccgggatggccctgctgagtctgctgtcaggcctgtgaaaggtcagcagagccaaggagcaggcaggagaggctggagccccgcccagaaccttggcgagctggtggccctgccaagtcctgctggccactgaagagggaatccagggcaaggcaggtgacctcctgggccaccagtctctaacccctaccccagcctagggaaggggaggacaggaagagactggatgctttgtaaaggacttcctgttcttggggacataactctcgtcccctcccagagccctggatgactgacaggcattccttggccaacacatgcttgagccgcgctgctggctgcagggcacctggatgacaggcattccttggccaacacatgcttcagccgcgctgccggctgcagggcacagaggctccttcagtggaattttgcctacgacacagagcacagctattaatacacttaaaattcaaatccattgcctgacacagttgttcaaagttaaaaactgtttggtagcagcactgctctgagctccctgcactgcagcccggagttcagtgaaggcgtccacgccatggtagctgctccgtccaaatcacctgggtataaatgcacacttgagacagcagagctttagctgggctgcgtttacagaactgggcagcagccctgggtatctgaaacggaacagacactcagttgtgacatcagagtggttttcaaggaagtaggggaggtgggagagtggtgagggcagcactttgcacccaagggcagggagatgccacctgggagcagccgcctcctccactcccaccctgctgggaggcacagggacacagaaggctccgctggactttcagtcatactgatggggctctggtccatgcaagcctctcccaacagtcagaataatcagtccctctgccccctgaggggctggatccctgaatgagtttttcaataaaatacaggacacacacccctagacccgcctcagtcccatcggcaggccctggttacctgaatcccggacaggtgcagagcctgcccctgccaaccccacccaaggcccagaacccagcccacaatgccttccaagcctaaaagtgcatcttcgattacaagcatctgtaaacaaaatcgtcccccaaacgtgtacttacaaggttaacaatgaatgcctttgcttaactccaattacactctttgaagccacttagccgagcagatgcttaagccccacctattaatttgggtaactggttttcaatttctttttttttattctgcagattaaagacactcaatctttaaccttgaagggcaggcaaaaggtcggctatgctgtcaacatagaagtcagggaccattttcttcttagacacgcagtcactttcctgattattcttcacatcccctagagtggagactccggtgagggtcaggatggtcttcaggccacaggtggcgcctaggaggatgtctgtgtccaggcggtctcccaccatgacggtgcgctcggggttgatgccgtattcctgggacacgcagtcgaaaatgaagcggctgggcttcccgatgatgtcggcctggcgctgggcggccatctccacggctcggaccagacacccggtacccgcgatgaagcggccgttctcaagcggaagccggttgtccatgttggtgcccacgagcaggcacccgggctgctgcaggtagcgcagggccttggtgagcttcatgtagctgaagtgcgggtcaaagccctccacctccgcgcgcactgtcgtggctccatgcggcgctgtgcatgccatgtcgccgggacgcctcgccctgcacgtggctcgggccccactgcccactgctggcgacgcctcacggc

SEQ ID NO: 64226 - DNA, 1325 bp, Homo sapiens
ttttttttttttacttttaatatttaataggaatttgggttaggtgtaacaatgtgtgtattggatctcaaaacatgttatattttaagcaatggcttggagagaactaatcaattcatattctgcatttccagccaaagggacataggcacaactgactggtggcaccttcctgtgggaagcctcttccatccatctacagcattgatacttttataaagtatgaatttatcttgcttgaagagttaagtctcattttccatggttaatgcaggattgctcataccagctttgcattttcctgggtttatgctgctctccgtccaagactgagaatcagtaagaaggtggctctgggactctctcaatggctttgcaggaaactgatggttttcgagatttttagctgtggaattcagccctgcaggagtagatgcttgttcaggatcctggttaacaaggcaagttggaaaggagcagccatcacctagacttgaaaaaatgggtagcaaccagtacttcttctcatcaccaaaaacttgtcgcatgtttttactgaaacccaagctgaatccattcttatctgttccatgtcgaaatactggacttctgaatgcctctaatgtagatttatttttgctgactagccaacaatgatagccaaacagagaagacaagctgacagaaaacatagctgcagcaaagaataaaaacataatatggaacttggcttgagtatcaggtaggccatttgtccaaaatttgataaaatactgtaaatctgttgccgcaataaaaaggcagtagagcagagaataagccaagaaaaggagaaagaacttataatttgaaaatccaacgcaattgttcacccatggacaatgatgatccatcttcaaaatacatttatcacagacggagcagtgatggcagcgatctggttttataagttggcatctgtcacagtatcggatggctccagacatggtcctggtatagatgggaagatccttggctgctcgcctaagaacttcctgatgggcttctcctcttggctctctctccaacaaatctttctctgcataagagagatggaattcttttgaaggattcattggtaatgtaaagatagttttccagtatgaccagacaaacattgcaaaaagtagatgataggccatcaggcacacaacttgttcgccagtgttttccatggacactatgcacagctggatggcgtaggcgtagtaggaccagccgagcaggagggtgatgaacaccaccgggatccagtacagcacccgccggcaccgccgcctggcgct

SEQ ID NO: 64227 - DNA, 929 bp, Homo sapiens
ggtggaattccccactacctgcggggcgtgaacaacgcgcgccagccgtggcacaacgcggatgtccggctgcggtacgggctgcggccggggaacgccacggaggagggcctggccagcctgcacagcgtgctgttccgcaagcagccgttcctgtggcgcgctgcactgctctactacaccatccaccgcgccgcgcgcatgtccttccgtcagctcttccaggacctggagcgctacgtgcaggacgccgatgtgcgctgggagtactgcgtgcgcgccaagcgcggccagaccgacacctcgctgccaggttgtttcagcaaggaccaggtgtacctggacggcatcgtgcgcattctgcgacatcgccagaccatcgatttcccgttgctgacctcactgggcaaggtgtcctatgaggatgtggaccacctgcggccccatggggtgctggataatacccgggtgccccacttcatgcaggacttggcacgctaccggcagcagctggagcacatcatggccaccaaccggctggatgaggcggagctgggtcgcctgctacccgactgatgtccgttgagggctgcagtcagaggccctggacagaagctccagataggcccctagaacatgaagcagtttgctctgtgcgtccacggcctaggtgtttcttgggggtgttgggagggcaggagcattccttgaggaggagtggcaacatcaaagtgtttgtgtcccttgccagcctccctggggtctggggacctgcagcagcatgtctggcaaactgagtcgccctcctgcctccagctctctgttgagcagagggaaggcatgggggcaggaagagagctgagcattgatggggatgggggtggtttgggaatagaaacttgttcttgcatgagatggctttggatgcg

SEQ ID NO: 64228 - DNA, 4797 bp, Homo sapiens
ttttttttttttaaagtttaaacaccttttatttgaagaaatattgcttctagactttcctgaagccagaattgttctataaaagtatcatggaatattatacatgattaaaaaacagagtatgcttcctaataacttgaaatctttttacaaagcacattattcatgatcataaatatgtttgttctgtcatcccaccgatgatacacacatcaggcaagcagctaatttgaacatatgtacagagtctatgataaagatttaaagttaccaaaaagattcagctataacatattaaattttctttaaaagagtttaccataaacacttaaagaaaacataatttatctaagcacttgaattatctaaaaataagaagaaaacctctcttagggtaagcaaaaacacatcatcttggggagctgaataaaagggtactgatgactcagtgaggtaatccctttagctggtatttaaaaacctaatacacaacaaggatattttcaagaatacagattttcaaaagcaattttgaactatgtctttaaaagatatcagaacttggtgaaggtcttacaaataatcatagaacacaatgttaagaaattaacttctcttgtggtatgttgaaattgtggagcattcatgattttcttttattgagaagttcttggtgtaaattcaaaactagtcatattttatcaacatttaagcttcttagtcatgccaagaaaaccaaaaaagatgaaaataaaagatctttagatctttttctcctgtcaagaaaataacccaaaatatagcaatcttaaaggtatgatgtatgatgaacgctttgaggctaggcacagagagagcaggcaatcttcattttgtttacttatttatttattttcaccaccaacattattagccatgcctttctgctaatcgattttagcaagtcgaggtaaaacacatgcaacattttctggcaaaagcttaatgtcaaacaatatgtgatccatactgtgtgtcgtccttgggggtttatttgactttgtcacaatgacagccaacagtgagactgataagcctgtaaaaataaaaaaataagactaatcaaatagacatggcattttaatctcaaagtgcaaaatcatctaactgaaaatgacggcattgaaaaattccagtggttaaaaatgaatcaaaacttcattacgcaggcagtggaagtgtgttgaaagatttaccaggggtgtcaagttttagacactcagaaaggcaccattctagccatcttgattggataacatgtatatacttatgtccctacgatattcaaaagataatactgttttagtacaaaacaaacaaacaagcaaaaaatcaaaaccaagccaacccaaatatccccagcctttctttctactcttggcagatagtaaattataacgatgagtctccgtgtgcacaccgcttgctcacatgctcactagcttctactgcacaaaggtacccagggtagcttggaatgttggtggctgtgattacctttattagtttacaaataaaaaagttaaaaagaaatactgtgtttagggtaaggtaacagtttccacctaatcaagaggagagtgaaagaggaagcgctgccttcctaggtgctgtgacttctccttttcgtgattcttctccaccttggtcaacatcttccccgctatgctggaattacttcggtgttctgcggtggccatggtgaacatctgatgaactgaaattccatcggaatgcacaggaagatatagttgatcttcaaaaatgtcctttccaggaccaccatactggggaagttctttcgggtgcctgcgaatgggctgcagcctggggctgggcccgagctctagctctgtcatgccatcgccactgaaatcggtttccagatgattagtctcttcatgccccgtccatttttcggtttttctccagtgttcagaattcaaatgattaacttctggaatgtcgttattccattcaagtttactctctggacttaatgttggtcggttcaaatgcagggtttgaaggtcagctggcaaggtcaaatgaggtgttttcccaaccttatgccttgggtcttcatctgagtcagcagaggccatctccattgacacagcgtgctcagcagagacaaccaagaacccgtcactttgagcagtttgagtcttatttgttttattttgctcatagtgactcttcagcagtgcaaatactctatctaaatccttcaagtaattagtccagtccaccagactaagtctgtagttttgtctgtactcatagatgttttcattcacactgtgtagctcctctaggccttgccagttgatgtctgcagtgagacggggctgattaaccttcccatccatcccataactgtcctctgtgtaggtcatagcttcctccatctttatttccaacatcaagattcttaggtcttgggttgcactgcttatatccttgacagcttctgagctccattagttgtacgtgtagctgattcaaaatgcctcgttctaccgtgtgcactgtatttgtgagctgataaggatctgtattcatatcaaaatactccaaaaagccagtagcaaactcacagaaaagaaaattatgcgtctcattaactgtacgcaaacaccagtaggtgttattgttagaactcgtgcaagcacagaaagatcccaggttccagaacggggctgtctgccagtggttgttgtcatgcgtgaagcaagtgaggccaggcaggctgcactcttcccccttcctctgccgtctcttctccttcctctccttcttcctcctacggttgttctccttgaaaagttgcagtttgctatctacttcctgagcagcctccttgaatgggtgaagatggctctttaatttctcttgcttttttacacctttctctttattgtaatagctttgtttactgcagctacattcctcaggcttccttctcttcagatgtcctctcacttctcttaaattcttaattttatcttgcagagcttcaatctcttcgtcaatgtatgccttatggtccttccacgctctggccgattggtacagttctctctcacaatggatagagtcattgggaagaataaaacacttgtgtgtcactcggacagtggtaggtgggcccacggcgttgctgctatctgccagcatcctgcccctgttgccaccactggaagcctggagatctcttggccccttgtggccttcatcatgacgcttagcaatgtttcttggttgcaacacttgcaattcttcttcttcttccagatttatgtcatatatttcaccttcaaattcgacggacaaggaacgtgtctgccgagtatggacaaatctgggcttgtactttggagtcccctggtttctcaagaattgccgttgactctttctttggcttctgctggcacggtaaccagactccctacaactgcactctttgtctttgtcatggaagccgcgagcgtagaggttccgcgtgctctgccggactgtgagcaggtcactgggtcctttacacttgtgaattcgaagcttgccagatgtatcctcaatgcattgccacttctgccccggttgttcacaggctgtctggtacctggcctgctggcatagttctttgacccgttcatatttgggcaagtgatttgactgttggatattcttgctggattcttccttcttacgtagaaatttgcctctttccactaggaatgtatcacgccaaattttggccttcttgtttgttcgaaacctgttacctggcttttctgggtccagaagtttgaggacagacttgccgtccacatcaggaggtgtgtcgagcccagcaatatccaggatcgtgggggccaagtcaatgttgagaacgatctgtgggactattgatcctggttctacacttggaccacgaataaaaaaaggcacacgaatatcaaagtcatatggcatggatttccccttgaccagtccaaactgcccaatatggtaaccatggtcggcggtgtaaatgatgtaagtattctccagctcccccgtctccacgagcatgttatacagcctctccacagaatcatccactgacatcaaagtctggagccttttgcgctgtagaatgtttgtaaattccatgtggatgggcagcattggtcctgtgtactgcataatccagtgtttatccatatttggtgcatagttataactaggagttatgtgttgggaagcattggggtacagtttagaaaactgtggggctgagtcctcggggccgtggggctcggcgtggctgatcaccatcataacgggcctatggggatacattctcttagacattttgaagtaattaatgctctcgttagtgattaagtctgtgaagtagtcctttgcataatcaaatccatgcttttctttgatgccattgcgacaaacagtgtaattatagaagcgagaattcttgattaatccaagccattctcgccacccaggggggatgtagctgccattatattcattgaggtattttccaaaaaaggctgttctgtagccagtgttgttaagatatacagcaaaagtccgaggctcatgcatggcctgccacgagggggaagagcagttctcgttgttggtgtagacattgtgattgtgcacatacttcccggtgagcatggaggaccgtgacgggcagcacatgggtgtagtcacaaaggcattgatgaaggtggcccccccatg

SEQ ID NO: 64229 - DNA, 2478 bp, Homo sapiens
tttcgtggaatgatgtgatttattgtagtttaccaaggaccgctcagggtattgtgcagagggaagaccagctggaggttcttgtgtcactccgtgaagtgtgggggcggcggaggggcagagatgggacctgcactggagccatgcctgatggagctctggacacagctgtctgcgctgacgaagtggggagcgaggaggacctgtatgatgacctgcacagctccagccaccactacagccaccctggagggggtggggagcagctggctatcaatgagctcatcagcgatggcagtgtggtctgcgctgaagcactctgggaccatgtcaccatggacgaccaggagctgggcttcaaagctggggacgtcatcgaagtgatggatgccaccaacagagagtggtggtggggccgggtcgccgatggcgagggctggtttccagccagcttcgttcggctgagggtgaatcaggacgagcccgcggatgacgacgcccctctggccgggaacagcggagcggaggacggcggggcggaggcgcagagcagcaaggaccagatgcggaccaacgtcatcaacgagatcctcagcactgagcgggactacatcaagcacctgcgcgacatctgcgagggctacgtccggcagtgccgcaagcgcgcagacatgttcagcgaggagcagctgcgtaccatcttcgggaacatcgaggacatctaccgctgccagaaggccttcgtgaaggccctggagcagaggttcaaccgcgagcgcccacacctgagcgagctgggtgcctgcttcctggagcatcaagccgacttccagatctactcggagtactgcaataaccaccccaacgcctgcgtggagctctcccggctcaccaagctcagcaagtacgtgtacttcttcgaggcctgccggctgctgcagaagatgattgacatctccctggatggcttcctgctgactccggtgcagaagatctgcaagtaccctctgcagctggccgagctgctcaaatacacgcacccccagcacagggacttcaaggatgttgaagccgccttgcatgccatgaagaacgtggcccagctcatcaacgagcggaagcggagacttgagaacatcgacaagattgctcagtggcagagctccatagaggactgggagggagaagatctcttggtcaggagctcagaactcatctactcgggggagctgactcgagttacacagcctcaagccaaaagccagcagcgaatgttctttctctttgaccaccagctcatctactgtaagaaggacctgctccgccgcgacgtgttgtactacaagggccggctggacatggacggcctggaggtggtggacctggaggacgggaaggacagagacctccatgtgagcatcaagaacgccttccggctgcaccgtggcgccacaggggacagccacctgctgtgcaccaggaagcctgagcagaagcagcgctggctcaaggcctttgccagggagagggagcaggtgcagctggaccaggagacaggcttctccatcactgaactgcagaggaagcaggccatgctgaatgccagcaagcagcaggtcacagggaagcccaaagctgttggccggccctgctacctgacgcgccagaagcacccagccctgcccagcaaccggccccagcagcaggtcctggtgctggcggagcccaggcgcaagccatctaccttctggcacagcatcagccggctggcacccttccgcaagtgaactggtccctgcctgacagcacctgctgggccttcctgccagtggcccccagtttttcttccccgaggcccactcggcctggccttcctctgcctgcaagtgagcagggatgggctggggagttgcttgtgccaccaagacgtgccaggtctgtactcctgttgtctttttccctgctcctggggccctgaagagaccagcaagggggcagaccccgcactcgccacaccgccgttgcagcttgggccccatccgccctctggacctgtgtagggcctcactgctggagcggggaaaccgcagctcagcccaggcccagctggggagaaggcgctacctgcgtgggaccctcttctctggaaacctaatcctcctttcatttcctctgggcaggactctctggccttctgtggcctgcaatgccaggccatgtgcccctctgccctctagttctccaagtccccagcccggccagtggtgccaggcagcttgccacttgggagggcagaagccaggaattccacacccttgtgttgcgcccggagcccgcccttcgcctcccagcccctcaagacaccgctggctgctggacaccctcttcacttgtgtgtgtgtgtagcggaaaaggacaagacggtgcagtcggctgcatactcccagtcgggagtgtggtcagtctgcctgctgctgt

SEQ ID NO: 64230 - DNA, 1024 bp, Homo sapiens
tttcgtcgagcggctccctaacaggcccgcctgtctgctcgtggccagcggcgccgccgaaggtgtgtcggcccagtccttcctccactgtttcacgatggccagcaccgccttcaacctgcaggtggccacccctggggggaaagccatggaatttgtggatgtgactgagagcaatgcacgctgggtgcaagacttccgcctcaaggcttacgccagccccgccaagctcgagtccatcgatggtgcccggtaccatgccctcctgatccccagctgtcctggggccctgaccgacctggccagcagtggctccctggcccgtatcctgcagcacttccactctgagagcaaacccatctgcgccgtcggccacggtgtcgctgccctgtgctgtgccaccaacgaggacagatcctgggtgttcgacagctacagcctgacagggccctctgtgtgtgagctcgtcagggcccccggcttcgcccgcctgccgctcgtggtggaggacttcgtgaaggattcgggcgcctgcttcagtgcaagcgagcctgacgctgtccacgtcgtgctggaccgccacctggtcacaggccagaatgccagctccaccgtcccggccgtgcagaacctgctcttcctctgtggcagccggaaatgaacctgctgggtagatgcaccccctgagacagcccaggtgtctccagaggcagccccgtctcaggcttcagggaccccgcctcttccctcctgacaagggccctggatggcagcctggtctggccctgatgggattgttggaggcctcctggaatcagctctgagcgggtgtcggctctcctggagggtccaaacccccatcctcctgcatgttctctggagcagcagcctcctgccccaaggccgaccggcactggcagcactttcctgttgaagaaatcttcctggcgtgtggtttcaaagttttcagttttggaggctggaagcccaagatgaaagcaccagtagatgcaacctcttttgg

SEQ ID NO: 64231 - DNA, 3264 bp, Homo sapiens
ttttttttttttctgagaagcctttcctacttctgtaaaaagaaactctcattccaaaggaaagaatgggaggctgaagttattgaaaatgagatgggaaatgggaagatagtcactttgcaactccaaattccaggtctgatgcttagggtgttagtcattaagcaaattcttcctgataaccaattacagagaggaaaaaagagagtaagttttttactgccccctacctcctcctcccccgtgccccgcttcttacccccaaccaccagtgaaggtgttttagttctccccagccacctgagctaggggcaggagaccttcccttccaatagagttccttggtgaaggtgacttcttcatccactgggatgctttcccagggcagttttgttgatcctccaagaacatcaagtcactgtgtatgaatagctcccacagaagtgccgagtgttaaaagaacccttcctcatgacctgatgggatgggcggcagtgtgtccacacttgggcctgacgttatacttggggaaagggtggtagtctgagtgtctcagagcagggcactggctaggtgtgaggtttcctactgctctgtaggctgctcatgctggagtcctgagctccaccaggagtccctctgggctgccgagcaagtggatcttccaaggggcccatcagcctgctctgcacaagagttataggaattgtagagccccagcacaacagtcaagaccagcatcactgcagccatcatccagatcacttgccagtgctgacacagtttgggatacatgacttgtaagaaatggaccaattcttcaagtttgctgcttcttgggcccttttcctcttcctcagtttcttctacctcttcaggttcctcaggactctcactcttctgttcttcctcctcctccttcaggtcttgaagttctttggtcttctttagaccttcttggaatcccttgctgtaggcttcttcctccatcctggccttggtctcctgactaagctcctccaggcagctcagggtcagcgcaggagcagaggcttcacaatctgggtccccatttgtctttccattttccaaaagtgcaggcagtgctgaagtgacaggtaggctgcctttcccattgggtgattccgacaaggctggtaaggagggaatggatgatgagctgggagtttggccaggcagattcagggcattaaacttaggaaccacagcaacgctgaccctccggcgaggcatattctttcccagcgtgagggacatggaccgtgccgtgcgagggaccccatcttcagaggggccacagctgcggcttgaattctgatttgcaagctttttaaactccatgagctccgcatggtccttctcatacgtcctctttagattctccacatactgcatcatcacttccgttgctttcgacatgcgcttttcctggcggacggcgcctaccacctcagctcggctggagaggcgggcagccaggcggtgcaggacagcgatgtcctccagcaacttctggtaggtttcccggtgctcacagtggtgccagagtgaagctgaggacgtaatggaagctttgaagttttccagttctttctcagtgttctcctctgtcaggttgcgttccctttcagcctggttaattctagattccagagtgtagctgtcatttctaaaggccaaggacagttgcacaaacacgttctcaacttccttttcagtgagtggaggggcacttccagggagactcctgtggacccgcagtttgcgcagcagcacatcagaaatattaggcatgacatctaagccactctttgactcttcttcctcaatagctggggagagttcagaaggaagccctttttcctgctcagctgcttcactaaggtctggaagcttgagccccactaagttctgatttctcatcaggatgtgctcctctcggagcttggtcagtttctgcatccgcacgggctgcacttgtatctgaaagtctttgagaccaggggccttggccagcttgccgccggccttgcctgcaaaacgcttttcttcctctgccagtggcagcttggcaagcactttctgcagccgggggccaggttcttcagggccrctgtcccaggaaagccctcgcagcagcgggggccgggacacagtgggtggaagctcagctttggagccagcctcgggccccatcggctctccagctgggcctctcccctgggaggctgggggacccactcctgccgcatcctgggttggacttctcggcagagggctgccctcccagcccgttttcaagagctgcttccccagctcgctctccacggggccaggctgagggctgttcagggccattttcccactgctgtttgtaacaggagctaggcctttgggtgtggtctcggggtactggaggggatcgaagttttccttttgttctattgcaatctctttggacttctcaactggaggaggacgaggagccagcctgccctgagacactttcctctggtcattctgcttcctgtcagctaggccctttgggacgttaggctcgccagggtgaggtgaagagacgtcggcttcatccccttctggcggggtggggactgtaagtgagttgcttcgagaggatgtaggagaagcgctggggctgaggttcggggaaacagctgatggggagtctccggggctgctcctggacttcctcccacggcgggtcaggaatcgctcactcaccaacttggcttcttccagcagcgccaggtttttcttcttgtcctcctctgagatgctgatgtctggcagctggtcattcaccaggtcaatgatgtgccccgcggggtccacagatgtcagggaggcagtggacaccttcaagtgtcggtgagaaagcctcttgtggggactgtgaactctgttggccaggtttttgtcggtttctccttctggtgaagtggcatccccagtcaggacaatcgtgggagttggactgcaagatactcctgcggtaggaggaccctgttggccggcagggctctgggctgcctgtggctctccggggggctcctcgtcctcgggaatgtggggcatggcagcctcctgctgggagtggccacgtgtgcccggaacctccgctgcgtcagccccaaagatgctccaagaggcctgggctccacaggctggggagacgccaaaaggacaagtcaaatccattccctgtcccaagctgggttccat

SEQ ID NO: 64232 - DNA, 1130 bp, Homo sapiens
tttcgtggacagtcctggccagggtgagcaggcggaagaagaggaaggtggcattcagatgaacagtcggatgcgtgcgcacagccccgcagagggggccagcgtcgagtccagcagcccggggcccaaaaagtcggacatgtgcgagggctgccggtcacttgctgcagggcacccgggatatatcagccatgataaagagacctccattaaatacgtcagccaccagcaccccagccacccccagctcttcagcattgtccgccaggcctgtgtccggagcctgagctgtgaggtctgccctggccgtgaaggccccatcttcttcggagatgagcagcacggctttgtgttcagccacaccttcttcatcaaggacagcctggccaggggcttccagcgctggtacagcatcatcaccatcatgatggaccggatctacctcatcaactcctggcccttcctgctggggaaggtccggggaatcatcgatgagctccagggcaaggcgctcaaggtgtttgaggcagagcagtttggatgcccacagcgtgctcagaggatgaacacagccttcacgccattcctacaccagaggaacggcaacgccgcccgctcgctgacatcgctgacaagtgatgacaacctgtgggcgtgcctgcacacctcctttgcctggctcctgaaggcgtgtggcagccggctgaccgagaagctcctggaaggtgctccgaccgaggataccttggtccagatggagaagctcgctgatttagaagaggaatcagaaagctgggacaactctgaggctgaagaggaggagaaagcccctgtgttgccagagagtacagaagggcgggagctgacccagggcccggcagagtcctcctctctctcaggctgtgggagctggcagccccggaagctgccagtcttcaagtccctccggcacatgaggcaggtaggtggcaggggcacagcgcatcatgagctcaggaggagagccaatcatgggctgtgcctgcccacacgccttgcctctggaccctccaccttgaaaaccctgcaggaagtgactgacagcctcctcggtgggtggctgatggcacagggcgttgggggtattatcc

SEQ ID NO: 64233 - DNA, 1523 bp, Homo sapiens
ttttttttttttctgatcataaaatatttattaaggtatactttagggaatatagtgaatataaaatttaggatcacaatatgaagccaatttccaaatcctctccaaaggtcagcacagccctccaaaactctgcagatgtaaaaccactggtgagacactaaaagcagttcgactagtagagaagtggattttcatgaacatttacaactagagcatatgaatacctcttttaagtgcaaaaccacaccacattacactaatgcagcaacaatgcattcattattgttctcattagtcattagtagtcaacttgcataaaacaccagaaaaaagcacaatggagttcacaaagtgggctaaaaaaaatgaacctgtccttgcaaaacacacattgtaatggaagaagagacgttaaaaaagtatatgcacactttagaagctgtgttcattccaaggatctcaagtgtcatttccttttctgtaaaatcaaattacaagaaccaggcacaactaatatttgggaggcagtgtgtagctaaaatttcatttaactagttattcaatgatttttaaaatccccataaatcttttctgtcctgaggtagttgcaaaataaatcataacttggatatcaactagagctgaggctttgactttttactcattaaaactagttgttacaggaactacctttagatatttaaaagacagttgagaaatgggcctcttactacacacacaagatgatggctatgtgggaaagaggattagctgcttcagaacgtgagagatacagtccaccatttcttccaccctccccacccattttagattctttattgtccaaaaagccaccatgaacaacacagtgaaagcaggcagatcatcgtcctttgctgtagccagggaagaaaaggtcaagtagagtctgcagaatctcattgggaatcatgatgtaattctggccaagatcatgccggcaagcagggcaggagaaaacctgtgccttaaaggagcgctgtaggcaatctttacagacattgtggaagcactcagttgtcacaggctggtaaactagctcctgacagcaaacgcacataaaagattgttccaattttttcagaaaatttggtccttccacaagatgtgaaagcacttcatcccacagcttctggttttgacaatcttctctgatgagatgttgctgttgaggagttagttgaaaagcctcaattgcttctgctgaatctgatgctttgtacactttggaggcacttggacagtcatcatctgaaattggcctttttgtggttccactgggctgcttctttgactgtcctttaggcttcttcccttctttatctgaagggtaacctgctggatactgatgggggggaggagggagagtacaatgcagatttaagcttcacagagaaggggggtttagatcctggtgagaaattaaaaaggaggggaagactacacgttcctcaaactgaaaagctttacataaaagaaac

SEQ ID NO: 64234 - DNA, 2459 bp, Homo sapiens
gctgggcgctttttctaacactttcacatcctgctgctcttcaggcaggacccagatgtgtccaggcttacccagacctatgtcacgatcttcattccagctcttcctgcaacctttctttatatgttacaagttaaatatttgctcaaccagggaattgtactgccccagatcgtaactggagttgcagccaaccttgtcaatgccctcgccaactatctgtttctccatcaactgcatcttggggtgataggctctgcactggcaaacttgatttcccagtacaccctggctctactcctctttctctacatcctcgggaaaaaactgcatcaagctacatggggaggctggtccctcgagtgcctgcaggactgggcctccttcctccgcctggccatccccagcatgctcatgctgtgcatggagtggtgggcctatgaggtcgggagcttcctcagtggcatcctcggcatggtggagctgggcgctcagtccatcgtgtatgaactggccatcattgtgtacatggtccctgcaggcttcagtgtggctgccagtgtccgggtaggaaacgctctgggtgctggagacatggagcaggcacggaagtcctctaccgtttccctgctgattacagtgctctttgctgtagccttcagtgtcctgctgttaagctgtaaggatcacgtggggtacatttttactaccgaccgagacatcattaatctggtggctcaggtggttccaatttatgctgtttcccacctctttgaagctcttgcttgcacgagtggtggtgttctgagggggagtggaaatcagaaggttggagccattgtgaataccattgggtactatgtggctggcctccccatcgggatcgcgctgatgtttgcaaccacacttggagtgatgggtctgtggtcagggatcatcatctgtacagtctttcaagctgtgtgttttctaggctttattattcagctaaattggaaaaaagcctgtcagcagggtgccctgaaaaccttgaaggaattttaacgaacgatgttggaaagacaggcgagcctcagtcagatcagcagatgcgccaagaagaacctttgccggaacatccacaggacggcgctaaattgtccaggaaacagctggtgctgcggcgagggcttctgctcctgggggtcttcttaatcttgctggtggggattttagtgagattctatgtcagaattcagtgacgtggtaggaaagaaagtcaggtcaagtgatgcttttgagcttacacacaattcacaggcccaccagtgacaatttactgtgagttaatgtcattcaggtgtgcccatggattttgagggctggaaatgcaaagacacatttttctataaaaagaaaaagcaactaaggttaaaagctatattgtggcccaagacactgtctgaaagatgacatgagtagtaattcaccactatctgaaccaagcaaggatcaatgtgctgactgcattggccaatggctttgatacttctgctatttttttagacacaaacccataaactaactgcttaagaattcatactgcttgaattatgtaaaatatattttacagtatatctttccttgggccttagattactattcactgggcaaatggtatttgtttttgttttaattttttttttaatagacggaagtcttgctctgtcatgcaggctggagtgcggtggtgcgatcatagctcactgcagcctcgaactcttgggcttcaagcaatcctcctgtgtcagccaccagagtagctgagactacaggggtatgccaccatgcccagctggcatttgttaatcttcatttgaggtctagatctaggcactgtggacactgaaaaacagttgggaaatctttcgagctgtggaaatccaaacaaagactgataattcctggtaggggtgtgtgcgtgacgtactgcagcctcaacctcctgggctcaagtgatcctcccacctcagcctcctgagtagctgagaccacaggcgtgtgccaccacgcctagctaattttttataccagggtctaccctttgtttcccaggctggtcttgaattcctgggatcaagcaatccttccaccttgccctcccaaagtgttgggattataggcatgagccaccacgactggccagaggacaaaattttaataaaggtcttagcttaagcagtaatcctacttcattaagccttcctggggtgcggtacacaccgttaattcagcaaccctcagtacatactaagtatgctcagtgctgtgaaagtggattacaccaaattaagtcattcttatcacacccaatcaaaagtcaagaagccaggggataaaagcaccttcagggcacataacattaatcttagtaatgttaattcttctggcacatccagctggtggaaactgcgtgctgt

SEQ ID NO: 64235 - DNA, 678 bp, Homo sapiens
gcggtggaattcgtgcgttcttcacaaaggtggtggatgtgggtgccacctctctgaagcttgagatctgggacacagctggccaggagaagtaccacagcgtctgccacctctacttcaggggtgccaacgctgcgcttctggtgtacgacatcaccaggaaggtagggcccgccttgaggcacgtcccaccctccttcccaagcacctgccttctggtttctccagtgcaatgatgccatggcgtaatcacaaggaacagagactccattagtgagcaacagtcacctcctccaggatggcctcctgacaaccccccatcctcctccacagtggggttctgctcctccgtggtccacaaagaacatgccgttgccatctgccactcagtagttcctggtgctgcattagggtcagggtttggggtggtggccagtcccccagactctcttgcacaaagtggtcctttgaggacagctaggcgtgggagattcaggagctcgaggcctgacctgaaataccccgtggctggcagtctcctgggcctggtcagggtgaaggatctgatgtgtgtcctagcagttttctgcctggccgcacaggtcacccaggacaggaacgtgccctcctcagaggaacggagcagccctgcaggtgcgcccatggccagttggattt

SEQ ID NO: 64236 - DNA, 865 bp, Homo sapiens
ggaggaattcgggggcagggccaggaagaggggaaggtctgggaggacctggagggcgcagcccagggacaaggaggggcaggagggagcctggactttggaggatggggaaggcaggccagggcccggagtgggtgaagacttctcaggactaggccaggtaggcaacgaacccccaggaacactggcccaagacaacgccctcccccaacccctgcaccctccatccacagcccggaggtgcagcactttctacaacctgcccacagagcaatcttccctgagaaagatctgccacaaagacatctgcagatgtgcagagggacagtgcccatccctgcagaagcccagtggccaattgaggcaggaggagctccagacaacagcatgtgaggcaggcgtggattttgtgtacaagacaaagctggaatctgtggaggtctctgcctccaacccttacgtctattacaacacgcagctcgaagacatcattaagagtggtacggaccctgccacacccctggccatgaagaaattcgtctcccatgccacttgccatgactccctggggttgcaagaacaggaatcgtacctcatcatgggccagacgtcagacctgtggagaatcaaatctgattacagctatgttctgggcaaggagacgttcctcatcctttggccagcagatggagatgccagcaagaaagaattgcgggaccaactggaggaatttttggaatatatgcgcacccacggctgccagtcctgagcctcttctgctttcagggaggtgtcatcaggcagctctgggccactgggtttaaccccaaataaagagcacaggatatgacacccaaaaaaaaaa

SEQ ID NO: 64237 - DNA, 3066 bp, Homo sapiens
acccgcccgtaattcccgggtcgacgatttcgtgcgcagcctgctggccataggctttgggctcgtgttggctgcgtcgcacttgctggtcacagccaccttggtccccgccaagcgcccacgtctctggaggacgctcggtgccaatgccttgctcttcgtcggtgtgaacatgtatggggtctttgtgcggattctgactgagcgttcacagaggaaggcgttcctgcaggcccggagctgcattgaggaccgactgaggctggaggatgagaacgagaagcaggagcggctcctcatgagcctcctgccccggaacgttgccatggagatgaaggaggacttcctgaagccccctgagaggattttccacaagatttacatccagaggcacgacaatgtgagcatcctgtttgctgacatcgtgggtttcacgggcttggcatcccagtgcacagcccaggagctggtgaaactcctcaatgagctcttcggcaagttcgatgaattagccacggagaaccactgtcgccgcatcaagattctcggggactgctactactgcgtgtcgggcctcacccagcccaagactgaccatgcccactgctgtgtggagatgggactcgacatgattgataccatcacatctgtggctgaagccaccgaggtggatctgaacatgcgtgtgggtctgcacacgggcagggtcctctgtggtgtcctgggcttgcgcaagtggcagtacgacgtgtggtccaatgatgtgaccttggccaatgtcatggaagccgctggcctgccagggaaggttcatatcacaaagacgaccctagcgtgcttgaatggggactacgaggtagaaccgggttacggacatgagaggaacagtttcttgaaaactcataacatcgaaaccttttttattgtgccatcccatcgccgaaagatatttccaggcctgattctctcagatataaaaccggccaaaaggatgaagttcaagactgtctgctacctgctggtgcagctcatgcactgccggaaaatgttcaaggccgagatccccttctccaatgtcatgacctgcgaggacgatgacaagcggagggcattaagaacagcctcggaaaaactcagaaaccgctcatctttttctaccaacgttgtctacaccaccccgggcactcgcgtcaacaggtacatcagccgcctcttagaagcccgccagacagagctggagatggcagacctgaacttctttaccctgaagtacaaacatgtcgaacgggagcaaaagtaccaccagcttcaggacgagtatttcaccagcgccgttgtcctcaccctcatcctggctgccttatttggccttgtctaccttctaatattcccacagagtgtggtcgtcctgctcctgctagtattctgcatctgcttcctggtggcctgtgtcctgtacctgcacatcacccgggtccagtgttttccagggtgcctgacgattcagattcgcactgtcctgtgtattttcatagtggtcttaatctactcagtagcccaaggttgtgtggtgggctgcctgccttgggcctggagctccaagcccaacagttccctggtggtcctttcgtctgggggccagcgcacagccctgcccaccctgccctgcgagtctacacaccatgccctgctctgctgcctggtgggcaccctcccgctagccatatttttccgggtgtcctccttgccaaaaatgatcctgctctccgggctcaccacgtcctacatcctcgttctggagctcagcggatacaccaggactgggggtggtgccgtctccgggcgcagctacgagccgattgtggccatcctgctcttctcctgtgcgctggccctgcatgccaggcaggtggacatcaggctgaggctggactacctctgggccgcacaggcagaggaggagcgagaggacatggagaaggtgaagctggacaacaggcgcatcctcttcaacctcctgccggcccacgtcgcccagcacttcctcatgtccaaccctcggaacatggacctctactaccagtcctactcccaggtgggcgtcatgtttgcctccatccccaacttcaatgacttctacatcgagctggacggcaacaacatgggggtggagtgtctgcggcttctcaacgagatcatcgccgactttgacgagctcatggaaaaagacttttacaaggacatagagaagatcaagaccatcgggagcacctacatggccgctgtggggctagcgcccacctcggggaccaaggctaagaagtccatctcctcccacctgagcacgctggcggactttgccattgagatgtttgacgttctggatgaaatcaactaccagtcttacaacgactttgtcctccgagttggcatcaatgttggccctgtggtggctggagtgattggcgctcgcaggccccagtacgacatctggggaaacacagtcaacgtggccagtcggatggatagcacaggggtccagggcagaatccaggtgactgaggaagtccaccggctgctgagaaggtgcccctaccactttgtgtgccgaggcaaagtcagtgtcaagggcaaaggcgagatgttgacatactttctagaaggcaggactgatggaaacggctcccaaatcaggtccctgggcttggatcggaaaatgtgtccatttgggagagctggccttcagggcagacgtccccccgtgtgccccatgcctggcgtctcagtcagggctgggctccctccacactccccaggccagtacctgccctctgcagcagctgggaaggaggcttagtggagcccacgtgggcctctggggtgcacatggggtgggaatgctccgggggtgacacaggccacggtggctccagccaggaccagccagaccagcagagcagggagccacttgccagggtggaggaggagcattgtccaggcatggcctgtggcccgagggccaaccaccgagcaggtcacagcacagcagtgactcggtgaggggag

SEQ ID NO: 64238 - DNA, 471 bp, Homo sapiens
cccacgcgtccggcgagatggagggctgaatttttaaagagaagaacagtgggatgttattttcaggctaatagaaatggtgagatatttaggtttgtaaggagaaaaagaaaggtaatcaggataagtgtgattagttagatgggtctccactgtcatcagggaggattgatttacacccattgtgatttggtgtgcctgtttctgaggagtcggcacagatctcaccacatctgaaggcagtctctgacacagacgtctcttcactgtggttttgattgtcagtattcacaagaagcttgagtcttctggtgggcacccagacaggggattgatgatctcctggtgaaacacaagcatatcctcttccccacgttaagtagaataagagacaatatttaaaggtttggggaaatcctgtaaggcagtaatcacagcaattaactccgcattttgaagagaactcgtgcc

SEQ ID NO: 64239 - DNA, 457 bp, Homo sapiens
acctcgtagaccctagtcagtgtgatgggtgagatagagaatgagtaaggcacgcatgccgtaaaaactgaagtactcccagatttggatcgccacgatatagtatatcgcgcgcggctgtgagggtgttttcatgtgttctccttatgagcaaaaaagggaagtggcaagccacttcccttgtacgagctaattattttttgctttcttctttcaataccttaacggtatagcggccatcagcctgacggtatgcaccgtgaatatcggtttcaaagcccggatagtgagcgccgatttcacacagcatctgcaggaactccagaaccggacggctttcttcggtgatcatttcacccggcattaccagaggaactcccggcgggtacggaaggatcatattggcgttaatacgacctaccatttcgtcgaggtaaacttcttcggtcataccgtg

SEQ ID NO: 64240 - DNA, 6298 bp, Homo sapiens
catcagcgggcgggggtgtcgccgaacaggctgctccgcagagcccgccgcgaccccgcgccgccccgccccgcggcctgcctgccagaggagccgagggggccgcccctcgcccaacctgcccgacatggggaaccccgggcccaggcgtgctggtcaccatgacaacagagacaggccccgactctgaggtgaagaaagctcaggaggaggccccgcagcaacccgaggctgctgccgctgtgaccacccctgtgacccctgcaggccacggccacccagaggccaactccaatgagaagcatccatcccagcaggacacgcggcctgctgaacagagcctagacatggaggagaaggactacagtgaggccgatggcctttcggagaggaccacgcccagcaaggcccagaaatcgccccagaagattgccaagaaatacaagagtgccatctgccgggtcactctgcttgatgcctcggagtatgagtgtgaggtggagaaacatggccggggccaggtgctgtttgacctggtctgtgaacacctcaacctcctagagaaggactacttcggcctgaccttctgtgatgctgacagccagaagaactggctggacccctccaaggagatcaagaagcagatccggagtagcccctggaattttgccttcacagtcaagttctacccgcctgatcctgcccagctgacagaagacatcacaagatactacctgtgcctgcagctgcgggcagacatcatcacgggccggctgccatgctcctttgtcacgcatgccctactgggctcctacgctgtgcaggctgagctgggtgactatgatgctgaggagcatgtgggcaactatgtcagcgagctccgcttcgcccctaaccagacccgggagctggaggagaggatcatggagctgcataagacatatagggggatgaccccgggagaagcagaaatccacttcttagagaatgccaagaagctttccatgtacggagtagacctgcaccatgccaaggactctgagggcatcgacatcatgttaggcgtttgtgccaatggcctgctcatctaccgggaccggctgagaatcaaccgctttgcctggcccaagatcctcaagatctcctacaagaggagtaacttctatatcaagatccggcctggggagtatgagcaatttgagagcacaattggctttaagctcccaaaccaccggtcagccaagagactgtggaaggtctgcatcgagcatcatacattcttccggctggtgtcccctgagcccccacccaagggcttcctggtgatgggctccaagttccggtacagtgggaggacccaggcacagactcgccaggccagcgccctcattgaccggcctgcacccttctttgagcgttcttccagcaaacggtacaccatgtcccgcagccttgatggagcagagttctcccgcccagcctcggtcagcgagaaccatgatgcagggcctgacggtgacaagcgggatgaggatggcgagtctggggggcaacggtcagaggctgaggagggagaggtcaggactccaaccaagatcaaggagctaaagccggagcaggaaaccacgccgagacacaagcaggagttcttagacaagccagaagatgtcttgctgaagcaccaggccagcatcaatgagctcaaaaggaccctgaaggagcccaacagcaaactcatccaccgggatcgagactgggaacgggagcgcaggctgccctcctcccccgcctccccctcccccaagggcacccctgagaaagccaatgagagagcagggctgagggagggctccgaggagaaagtcaaaccaccacgtccccgggccccagagagtgacacaggcgatgaggaccaggaccaggagagggacacggtgttcctgaaggacaaccacctggccattgagcgcaagtgctccagcatcacggtcagctctacgtctagcctggaggctgaggtggacttcacggtcattggtgactaccatggcagcgccttcgaagacttctcccgcagcctgcctgagctcgaccgggacaaaagcgactcggacactgagggcctgctgttctcccgggatctcaacaagggggcccccagccaggatgatgagtctgggggcattgaggacagcccggatcgaggggcctgctccaccccggatatgccccagtttgagcccgtgaaaacagaaaccatgactgtcagcagtctggccattataaagaagattgagccggaggccgtactgcagaccagagtctccgctatggataacacccagcaggttgatgggagtgcctcagtggggagggagttcatagcaaccactccctccatcaccacggagaccatatcgaccaccatggagaacagtctcaagtccgggaagggggcagctgccatgatcccaggcccacagacggtggccacggaaatccgttctctttctccgatcatcgggaaagatgtcctcaccagcacctacggcgccactgcggaaaccctctcaacctccaccaccacccatgtcaccaaaactgtgaaaggagggttttctgagacaaggatcgagaagcgaatcatcattactggggatgaagatgtcgatcaagaccaggccctggctttggccatcaaggaggccaaactgcagcatcctgatatgctggtaaccaaagctgtcgtatacagagaaacagacccatccccagaggagagggacaagaagccacaggaatcctgacctctgtgaagagatcctggcatttctggtccaacccaagccagagaaccattaagaaggggccttcattctggattctccgacgcaacactgacgtcccagctgcgacgtactgtcactgatgagagactgggaagggaaaagcatatatatatagatatatagagatatagatatatatacaggaaacaccgcatccttgcactgctgctggggctggcagagcagttggctgacagcaacaaccgacatctgaacacctacatttcctttgcagacaaattgaagaactggtgggatttttttcaagaaaaaaaattatataataactataatcccttgctcacccctttcccccgccaaataagaaacgcaagccagaccacgatgattgtagaagtccctcccgccctggttctgcacgttacagttagcagacgagcaattccatttgttcttctccaagcatctctaaggcccacttgaatgcaaaggaaaacacttgcacagcaaagcaagagaagtcacagcagcaagacacggcacaggtcaaccatttttccgagaaaaaaagaaaattccccacttgggaaggaaagaggaggaacactggattcttactttctggatcttgaacactgggctgcaaaaacctaccttccctctctcccgccttcccctcaccctcaactctcaatgtccttgctgtcattttctgtcctcggctccctcctcccccttcccccttcccccaccccacacccttcaccctctgtgtccgtggtccttcctgagggccactgcagatgactctcctttgaaatgagaaaaagaaaagaaagcaagaacagaaaacgaagccacaggaagggaagtaggacattgtatggtttatggtttctcattatgaaggtgcagcttgtaggaggtttgtacggatgtgctttgaagttatgtatattacatataacaggaaaaaatattaaaataaacagtgctggtaagtatgaagctgacattctaaaattataattatctgactgtgattgatgtatcctgaggttcctagatctcactgaactggcccagctaaggagacctggactctgggtgtgggttggctcacagtaggggctgacgggttcagtgtagtaatactgtgtgtggtgtttgtaattggttgattggtggggaggggtggggggccctaatggagaggtgtgggtttggcaagaaagaagcaacacagatgtcgtccccaaaatgccagttcaagacaccttctccctgcccccctggtagtaacagtcagggcctggtctgtgctcaggtactgggtcccagtctgggactctgctgctgaagttgccacagtagaggtccctggcttagtccttatctccctacggggcttgccttggttttcagtcttctctctctttctctcttttttttttttttgccacattctgcccttccctgaccccattgtaataaccaactccatatccaaagggaggtggtgctctcagccattgtagaagatggtggctttaacctgactgtctaaaaattcccagctaagccttttcctctactctcttccttgttctgaatcatttcttcttctcaggccaaagtagccatggtaaggaggcttcatggggcagaccctgaaagatcaaaactgcatttgcaaagccctcccctgtcccaggacaaagctgagactgacgggtgatgttgctcataggctccagctctgcataagaccttggcttggagacctccctctcagtcaacagctgaactctgagcttgtgcccagaaattaccccaagaccacaggaacccttcaagaagctcccatcacaagcttggcattgctctctgccacacgtgggcttcctcaggcttgtctgccacaagctacttctctgagctcagaaagtgccccttgatgagggaaaatgtcccactgcactgcgaatttctcagttccattttacctcccagtcctccttctaaaccagttaataaattcattccacaagtatttactgattacctgcttgtgccagggactattctcaggctgaagaaggtgggaggggagggcggaacctgaggagccacctgagccagctttatatttcaaccatggctggcccatctgagagcatctccccactctcgccaacctatcggggcatagcccaggggatgcccccaggcggcccaggttagatgcgtccctttggcttgtcagtgatgacatacaccttagctgcttagctggtgctggcctgagggcagggcaggaaaatcagaatagcatttgctttctctggggcaaaaatgggaaagttcagcggggcagcagaatcagtggcattccccctggtgcaggccggtgggtccactccaactccccctgagtgtagcagcacactttccatacaccaggttctttttacaatcctggtggaaaagccacagaaccttcttcctgcccttcttgagagttccccctctttctgggtcaagagctggagtggtggctccatcctctctgggccacttcggtctaggaactcatctttgcaggaaccaggagtcctgagcacactgaacacacctcagagggaggatccttgttgtggattttgcacctggctttggggcaggggtgaagtgaccaggcttagcttgtggagtttatgggccaccagggtttggggaaatcaccatcccgcggatgctgtgacctcccttctacggagatgcaggcagtgccacgagggaggaggggacctgcaaagctagaatctagggcactgtttcctccccatccttctctttgtagagaatagagacgtttgtcttgtctgtcttcaacctacttttccttttctcttttttgtttctcatcctctctgtgccacctctccacccaggaggccatgtagcatagtggaaaaagtccctgagggcggttaggagttctgggtgaccatcctggctcagctcctaactcaccatgtgacatcaggctatccccattccccctcttgggcctcagtttcccgacttgcaaaataagcagaaagaaccagatgctctccagggtctttttctactttgctatctcatgggtcttcattttctcttattttgttttctctggatcttttccatctgagggtacaggaagtaccaggacctgtttcagtttttgaatcctgcaagcacattccaagactggcctgaaactgcatgagcaacatcactcgaaataattttttttttcaaaagcaccttaacaaccaattgcgatgctgtcctgttcctttttactcacacccttctctcctttctcgtccccatgctcccccacctcagtgctccgtgctgtatgcgtgtgctctctgttcttgtatactcaatataagtgaaataaatgtgtttgatgctgaaccataaaaaaaaaa

SEQ ID NO: 64241 - DNA, 792 bp, Homo sapiens
aatgtggctactgaaacctaatgggaatgcaaatagaacttttttgtcttctcaagtgttccaagacctgtggacgaggggtgaggaagcgtgaactcctctgcaagggctctgccgcagaaaccctccccgagagccagtgtaccagtctccccagacctgagctgcaggagggctgtgtgcttggacgatgccccaagaacagccggctacagtgggtcgcttcttcgtggagcgagtgttctgcaacctgtggtttgggtgtgaggaagagggagatgaagtgcagcgagaagggcttccagggaaagctgataactttcccagagcgaagatgccgtaatattaagaaaccaaatctggacttggaagagacctgcaaccgacgggcttgcccagcccatccagtgtacaacatggtagctggatggtattcattgccgtggcagcagtgcacagtcacctgtgggggaggggtccagacccggtcagtccactgtgttcagcaaggccggccttcctcaagttgtctgctccatcagaaacctccggtgctacgagcctgtaatacaaacttctgtccagctcctgaaaagagagaggatccatcctgcgtagatttcttcaactggtgtcacctagttcctcagcatggtgtctgcaaccacaagttttacggaaaacaatgctgcaagtcatgcacaaggaagatctgatcttggtgtcctccccagcaccttagggccaggggcttacctttcaacctctagagagaccacctgcctttgagag

SEQ ID NO: 64242 - DNA, 977 bp, Homo sapiens
  misc_feature (1)...(977): n = a,t,c or g
ttttttcttaaggaacttataacttttatgggatccagtcctaaagtagattagaccgatgtagaattctgtctggagacgttctccccttcaattcaatgggaaggctcttttctggcatgaactctccgatgtctaatgagctctgagcaccatccataagctttcccacattctttacatataaaaggtttctctccactgtgaattctccgatgctgacttagatatgagctttgactaaaggccttcccacactcattacactcatagggcttctctcctgagtgaatcctctgatgctgaacaagatgagcaccccatctgaaggccttcccacattcattacattcgaagggtttctctcctgtatgaattctctgatgctgaccgaggtttgagctctgtttgaaagttttcccacagtcactacacttatagggtttctctccagaatgaactctctggtggacaacaagatgtgagttataaatgaaggttttaccacattcactacattcatggtctttcttccctgtgggaatttccttatggatgacaaccatctgcctgaaactttcctcctgggcaggggaccacctcagtctctccgctttgggatttctctgctgcagttctaaggtaccctcagaggtagcttcaaatgtagaggtgtcagtagcaagtttttctgagaacacctgtgattccacttcagtaatgggtggttgtggcaatgatcctttgtccttgggctctgggccatcttctgtaacaactgacagaaaatgtaaatatacctgtttgcaatcgtcctctcgtagccttgggcgtccggctcgtcttctggcagcttggtgggcggctgcgcagggctggacctgggctggatccttaggctccgaagagatgggccccatccttgtcgtcgtcgcgaattccaccgcatggactacaatctcgaannnngtgaccca

SEQ ID NO: 64243 - DNA, 779 bp, Homo sapiens
atagtagaccctcgtagacgtctagtcagtgcggtggaattcccaggtcaattcagagacccaactgaagcagcacatgagcagcaggaggcacaaagaccgcctggccgggaagacccccaagccctccagccagcacagcaagctgcagaagcacgcagcgctggctgtgagtatcctcaagtctaaactggccttgcagaagcaactcaccaagacgttggcagcccgcttcctgcccagcccgctccccaccgcagccactgccatctgtgctctgccagggcccctggccctccgccctgcccctacaagaggcactaccctctttccggctcccatcctgggcccagctctggttcgcaccccagcaggagctgtccgccctgccacaggacctatcgtccttgccccttattagccctcatggggaggccagagctgatttcccaatagccactccttgtctcctcctgtcctgagacaccttggtttcctacatgccacagggactgtgaacagcttcaggggtcctgcccgatccagaaagagctgggctagttttaagggcagctgccttccaaggactgtccccaccctcctttcgcaggccttccagggttaatcctaggcttgcctggcatttcccaccctgacagaccccaaagatctatgcaaaatctcagccccagccatgtgggtgctttcacttttccttccacccaaggacccacatgggccagattctagggaatctttaggtttttacaaggccatcc

SEQ ID NO: 64244 - DNA, 3041 bp, Homo sapiens
  misc_feature (1)...(3041): n = a,t,c or g
ttttttttttttaaagttcattggtttttagtacattctcaaaatcgtgcacaatcacccactaatttcagaacattttcatcacccgaaaaagaaaccccaaacccttagtagtcatgcctcatctctcacagcctccaggccctggcaaacgctaatctatattccactctatataggattcggtcccattttaggacatggcatttcaatgcaagtcaggacaatatgtggggcttttgcaacctggcttctttcactttaggcaagttttcaaggctcatccatgttgtggcatgtgtgagtacttcatttccttttaagagtctaataatggtccattgcgtgggacagaccacattttatttccccattcatcagttgggtagacatttgggggtggttccactttttggctattacaaataatggtggccatgaacattggtgtacaagtttttgtgtgtatgtacgttttcatttctcttgggtaaatacctaggagtggcattcctgggtcatatggtcactctacgtttaactttttgaggtactgccaaactgtttttcaaagcaggtgcaccatttacattcccaccaacaatttaaatttctaccagtttctctacatcctcaccgacactcgttcttgtccatctttttattgtagccatcctagtgattgtaaactggaatctcattgtgattttgacttgcatttccctaatgaataataatgttgagtattttttcatgtgcttagtagccatttgcatatcttctttggagaaatgtctattcaaaccgttagcccattttttaaattgatttatttttctccttattgttgtgttataagagttatttatatattccagatacaagccccttatcatatatatgactcgcaaatattttctcccattctgcaggttatcttttcaccttcttgatagggtcttttcaatcacaaaagcttcaaatcttgattaagtccaatttacctatttttccattggttgcttgtgtctttggtatcatatctaagaaaccactgcctaattcaaggttacaaagatctatgcctatgtttctttctaagattttatagtttcagctcttatatttagatcttggatgcgttttgagttgatttttgcacatagtgtgagtaaaggtccaacctcattcttttgcacttgcatatcattggctcggtgccatttgttgaaaagaccctcccttctctattgaattgtcttgggaccctggtcaaagatcagtggaccgtaagtataagtgttcatatctgtactctttattctgctccgtatgtctatccttaaaccagtaacacactgagctgattaccctttaccgtaaattatgaaatccaggaagtgtgaatcccaccaactttgttctttttcaaggcttatttggatattctgggtcccttgcatttctttatgaattttgggactagcttatcaatttctgtaaaaaagccagctatgattttcataaggattgcactgaatctgcatgtcagttaggatagtattgccatcttaacaatactaagtctgatccatgaacacaggatgtctttccatttatttaagccttctttaatttctttccaattttgtagttttcagtcttgcacttgttttgttaagttgattcctattttattctttctgatggtattataaatggaattatttaacttcgttttcatattgtttgttgctagtataaagaaatacaattcatttttgtatattgatcttgtatcttgaaaaccttgcggaacttgcttattagttctaatagctgtgtgcgtgtgtgtgtgtgtgtgtgtgtgtgagttccttaggattttctatatacaaaactgtgtcatctgcaaatagttttacttcttcttttcctatctggatacatttatttctttttctttcccaaatgcttcttaaacattagcttcttaaacatttttaacccaagttctaataggtccactgcgccagatggtcttacaaggtaatcccccttctcttagggctaccctctgacaagctggtccccaaggaccccagcatttgttcgcttaaaggcaaatacactttgaggtcaggaggatcttagcaccacccttcccatctgaggtcccaaccccactgcttaccccaagtccagaacactggacttcctgacccaattggtcaccaatcctatatttaccgcttttcccaatatcccagaatgaagaagtaaaaatatactggagtgaaattacaagtccaggagaaaaaacaagccactcactgcccagggcagcagtgggttcagggtggtagaagtacgtgtaggaggccagggtgttgtctgatggctgagtcccctatcatcttccatcatggaggccactctccaccccactgaagccaccccaaggaggggagggatacaaactgataggtaccttatacacaaacatacgccatcacctaggagcagagcacttatgccagcacagcctgagcctcaggctgcagccctggccctggctggtgggtcacgccgtggatggctgggagcagctcctctggctggagctgcgatggctcaggacaaaggaggacgagttgctctttttgctggcactcgtctctcccaggcgtctgcccttcaggtagctggcggagcagcacaggaagcgctgcacgagttcgtggaagaggtggcccgtgaacagcatgtagatccaggggttgcagcagctgttgaggctggccaggagcatgacgatgatgaaggccgaggcttccttgggcgcgttggcatcccagacgctccacatctgcacgaagaagaaaggcgtccagcacacgatgaaggccagcacgatgatgaaagtcatcttgaccgtgcggatcttggccttggagatgagcttgacgctgctgacacgcgccagggccacgcgccgaattccaccgcactgactatggtctcgatcctaaangngctcg

SEQ ID NO: 64245 - DNA, 935 bp, Homo sapiens
  misc_feature (1)...(935): n = a,t,c or g
gcggcagcagcctggggggctctgactctcccgtcttcgaggcgggagtttttgcaccaccccagcccgtggcagccccccggcgactccccatcttcaatcgcatctctgtttctgagtgacaaagtgactgcccggtcagatcagctggatctcagcggggagccacgtctcttgcactgtggtctctgcatggaccccagggctgtggggacttgggggacagtaatcaagtaatccccttttccagaatgcattaacccactcccctgacctcacgctggggcaggtccccaagtgtgcaagctcagtattcatgatggtgggggatggagtgtcttccgaggttcttgggggaaaaaaaattgtagcatatttaagggaggcaatgaaccctctcccccacctcttccctgcccaaatctgtctcctagaatcttatgtgctgtgaataataggccttcactgcccctccagtttttatagacctgaggttccagtgtctcctggtaactggaacctctcctgagggggaatcctggtgctcaaattaccctccaaaagcaagtagccaaagccgttgccaaaccccacccataaatcaatgggccctttatttatgacgactttatttattctaatatgattttatagtatttatatatattgggtcgtctgcttcccttgtatttttcttcctttttttgtaatattgaaaacgacgatataattattataagtagactataatatatttagtaatatatattattaccttaaaagtctatttttgtgttttgggcatttttaaataaacaatctgagtgtnnnnnnnnnnnnnnnggggcggccgttttaaaggatccttcggggggcccaagttaacgcgggcatgcaacgtaatagttttttccttatagggaggcgaataaaaa

SEQ ID NO: 64246 - DNA, 2321 bp, Homo sapiens
agagaggcagggcccaaggcaacctcctacacttcttccctgtgacaaagaggctgaaagaggagagcatatatatatatattttatatatatattatatatataatatatatataatatatatattatatattatatatataatatatatatacacatatattatattatatatatacacacatatataatatatatatggagaaacaatcctttttatagcacaatataaaatgagaatgaaagatgccatagaaagcatagtgcactgctgttgggtgttcagtcccatggataaaaccagcaggatgataaaggcaaccaactttccaggttacaagaggggagctgagttatccaccaaaagcaaaggctcaaattgagacatcctaactggcaaaccatctatgcccaggtcattctcagcctccgtgccaaactcttcatatgatcttggctaggacagacatgttttccgtggatcccagcagtaaagacctctctgcgttccaggcttgggggtttctctttttttgttctttttgttttctaagtgccagaagccgtcacccttcctctctccctttgcctgccattaggattccagaggatggcatcctttagtatttgctttcacagaagagcaatgcagggggatggagggtgctctggctgatgaaggctagggagggagtggccctgaggccgctggcctctgaactctaactgctttgctctcctgtttcaaaaaaggaacgaaagaaaaaaaagaaaggaagaaaaaaaagaaagtatatcacctctggaagaaaacataccaaaaacaaaacaaaacacaaacccccaaacaaaacaaaaaaccaccaactcaaatatactttcacaaaagatggagaacatggatttccttcctgtttatttccttggtgacttggtcatacaagcaaacatggcaaaaccctctcagaacccaaaagaacagcacacggatgaaccaaatgtgaggaaagcagctgtgatattttgggtggagagaaacacaagggcaatttggcacaacgctgctagatactgtgggtttacaatcaaccttttcattcccaagctgtacacaaaactctctgtttcttgttacacgcctgcctgctccatgctgaaggagacttcggggtgcttgtagctgagcagaatgtctgtaatacacgtagatggatagcaagaggagtttaaatgctggctgccatcactcaggtctgggtgctcatgacctcccaggcttgccccacattcctcattttccccatcctgaaactgctggctgcccatgagcgaagactgactgagaactgcatccgacatccgggcagagttaagtgctttcccagccacgagactcattcctggcaagttatccagctgtacataagcatcgtcgctgttctggatcgtgtggtgtctctggagggcccggggcctgtggtgctcatggacggaggggcgtgctgggtacccgagcccattgtgatccggcagctccactgcttgtcctggagaacttctatccatgcagttccctatgacaggctctctgctgggcaccttatttttactgaatgcagcagttggctgatgaccatagggatgtatccccaattcttgggcatgactcacagttcctagcaaagattcagggtccccaggtccaccggtactcaagagcagagggctgtcatggcaacctttggtcaatgtacttgaactcttactgtcttggaagccatccttggccccctcacacgagcagtcctcctccatgctctctgaatgcatcagtgccggctggtgagcatacccgtggggcggggtgggtgaggaagcctgtgagacacattcttgtgccctgatttgtagcagatgctgggggctggtgtgatggtgataagagtcagcattttgataagataaagcctggcgctctgtcatgctctgtcccccaaggctgggagccagactccccgcatccccttggttcatgtgcctgaacagttcctggtattcttgctgttgctgctgttgctgctgctgctgccgttgttgctgctgccttttaatgagctgtgcaaactctgttgggggcagccggatgtccgagtggccggtgagcgaatgccggggagaaagcagtccttgaaggatgtggggtacctgctggtgtcttgtatagtctggcggcgtgggagacagcagggcctgctgtagtgccgacgtggtatagtgtggcggcctagttatagatcgcgggcggccgctcgcgactagct

SEQ ID NO: 64247 - DNA, 883 bp, Homo sapiens
gcaattcgacagcactttctccacttccgctaccggctcccactgtctcatgtggacacgctgggtatatttggtgacatcctggtagaggctgttggattcctgaacatcaatccatttgtggagggcagcagagagtacccagctggacatcctttcctgctgatgagccccaggctggaggtgccctgctcacatgctcttccccagggtctctcgcctgggcaggtcatcatagtacggggactggtcttgcaagagccgaagcattttactgtgagcctgagggaccaggctgcccatgctcctgtgacactcagggcctccttcgcagacagaactctggcctggatctcccgctgggggcagaagaaactgatctcagcccccttcctcttttacccccagagattctttgaggtgctgctcctgttccaggagggagggctgaagctggcgctcaatgggcaggggctgggggccaccagcatgaaccagcaggccctggagcagctgcgggagctccggatcagtggaagtgtccagctctactgtgtccactcctgaggatggttccagggaaataccgccagaaaacaagaaggtcagcccactcccaggggccccactctcctcccctcattaaaccatccacctgacaccagcacatcaggcctggttcacctctggggtcacgagactgagtctacaggagctttgggcctgagggaaggcacgagagtgcaaaggttcctccaactctgcactttcctccaccaggagcctgggatatggctccatctgccttcagggcctggactgcactcacagaggcaagtgttgtagactaacaaagatactccaaaatacaatggcttaaaga

SEQ ID NO: 64248 - DNA, 2480 bp, Homo sapiens
ttttttttttttctcacttggccgactttatttttcaggaaaaacagaaaaacaaatgtacctcttgggttggaaaggacccattgacaacatggcacagacgtgagcaataaatacgcacatacattcaagtatgcgggggggcgctacgtcctggagaccctgtgttcgggcacctgtccctgctctcgggtgcggccctgcccctccagaagcaggtcacctcaccaggcccagatctgcctctccatcctagcctgagagtggggcctagaggcaccctcctagatggaactgccagccctgggggctgtggggccatggtagggcccttggcagtcttgggaggtgccaaggctgggtctggacaggaggaggcaacctcaggcccctggggcccatctcaggctccagcaggtcctgccagtcctaggatcccgaacttggtgccctgtgagccccctccccatggagagagcagtgatgtcatctcccccagctggtgggaggaggggggttctcatatggggggtctgcagggttgagctgagtgaagcctccccagcttccactgaccacccccccacttgggtgagggtcacagagcctggtgctacctcccaccctgactgggcactgctcttgctgccagtaagcatccctaggaccaggccctgccctttttcctggcttggggttttggaatgtcgaagttcatgcccagccattccctctgctttagagataggcccggctcctgtcgaggcccctgcagggccctgggactcggcggggggcacctcagggctgccactgcagcctggtctgccatgcgtggtctggggggccttctgtggttgctgacctctggccggggagtggggagacaggcttggagggagccctgccccaggacgaagctggaggggtggagcatgcctgtcacacggccatcccaagaccagctctggggggacagaacatggccctgtccttggtggccccaagaggcggctcagagacacctttggggagggtgagggagacagcagggtttcacatttggcagggcagggcagaacgggaagggcttgggggagaggatgcgggagtctgacagcaccaggtcggggccgacatgccgaaggccccgtccggcctgcggcaggggcagaagggaggaagctgagggccatgggggccagcccgggatggaagcacgccctcccaccacgggcagcttggcctgagcctgtcgccctgggtcggggaggccgtggggctgcatgcccagtgcctgtcctcggcaatggcctcgggaggacgtggctgtgactgtgagaccggcgtccaggagtgggggcagggtgggcctggcggtgggcacagggccttagctcgcaccaggctggcactgctgctggggctcgggcgggccgcctgccccctgctccgggccccccggcgaggtccacccgctgctcgtccatgcgcttagcctgcaccctctgaatgaggctgaagaagtcctcgtccggcatggtagggccccggggcagtacgtcaggtggtgggcagcgctggtcatcgatcctggaggactggtacttgatgagcatgttgaagaagtcgtcccccggctcctggggctcgccgtggcctcggaggtgccctgcattgctgtgggtgattcgcagccccggcaggctgcccacgctggcccgctggtcgtccagccggcggctctgggagctggcgatgaggtcgaagaattcctcggtctggggcgaggccgtcatcgagggctgggcgatcctgtcctccagggtgggggcggccgtggcctcggcagccccggcctggccatcgtccaggggacaacgctggtcgtccatgcggctgctctggaacttggtcaacaggtcaaagaagcactcctcgtccgaagacggggccctcgggatgctcgtgcgtggcacgtgcacccggacgtcggcgctgtccagcggggagtggctgccctcccggggcctcctctcagcgtccgggccttcctggtacttcctgctcctcacggggaggggtagcgagtccctgctgggcccccgccagtcccctgaatggtggctgtctccattctgctcccgctccagggggagtctcagcaggtcccaggtctccgcgctcagcctctgcgtcctcttgggtctggccccctgggcctcatagccggccaggtcaggcttctctgaggctgccgggctggtcaggcggccgagcaccagctgcagctgcgccacgttcatgcgggccgtgagctccccatggcggtccccgatctcctgggagatctgcaggtgcttcttggcgaaggtcagggcctgcgctgggcgccccatggacacgtaggcatttcccaggctccagcacgcccggccctcgcccactctgtcggccagctcctgggcaatgagcaggtg

SEQ ID NO: 64249 - DNA, 947 bp, Homo sapiens
  misc_feature (1)...(947): n = a,t,c or g
ttttttttttttgaccattttaggaaaccttttattgcaaatgccattctgcatattgatttttgacagaaagtatcagaaatgcttctttcctgggaaaaggaatataaatgacagcaagacacattttagttgctactaaagaacagcattattttcaatcattttaagtcgctcatttaataagcaaggtataaaacagattaaaggtgggagcctgcaaaagggtaattaaaaaagtgtttcctccccgggaaacagcactgtttggtctgatcaaatgccgaagctgggatctgattctgggtgccgtctctcgctactggagtgctgaccagcaggctgcccatcacgaaaagaggttgcaaggccaggcccccaggtgcgctgggatttctggctggctctacttggggccagagaagggggtaaaggccttgtcacagcctgccatgcatgcttcaatctcttccacagtgcggggcacgcaggtcagcagctctatgccgctgtcagtcaccacgacgtcctcctcgatgcggacctgggtcaagccgacagacacacattatcatagagcagcctcatgtgccaggctagagggccgggcccattccaggcccaccccaccatgggatgggagcagctgacactccctgggagacgggtggcctccgggctccttcatggagccatctgcccatgtcacctgctcaccctgtctttgccaggtggatgggagcccctggagcgggcaggggttttgcaggatctctgtctgttcctactgaggggtgaggctccatcctgtgacagaccacacgaaggggcaggctaagcccacctcaagggaagatgtcactagggcccctgtcttgggactaaggagtctgcagctgcgaattccnccacagtgactgaggtcatcaattnnnnnnnnncgctct

SEQ ID NO: 64250 - DNA, 2271 bp, Homo sapiens
gcggtggaattcgtggatactcatcctggttctggtaaagaagtgagggtaccagctactgccttgtgtgtcttcgatgcacatgatggggaagtcaacgctgtgcagttcagtccaggttcccggttactggccactggaggcatggaccgcagggttaagctttgggaagtatttggagaaaaatgtgagttcaagggttccctatccggcagtaatgcaggaattacaagcattgaatttgatagtgctggatcttacctcttagcagcttcaaatgattttgcaagccgaatctggactgtggatgattatcgattacggcacacactcacgggacacagtgggaaagtgctgtctgctaagttcctgctggacaatgcgcggattgtctcaggaagtcacgaccggactctcaaactctgggatctacgcagcaaagtctgcataaagacagtgtttgcaggatccagttgcaatgatattgtctgcacagagcaatgtgtaatgagtggacattttgacaagaaaattcgtttctgggacattcgatcagagagcatagttcgagagatggagctgttgggaaagattactgccctggacttaaacccagaaaggactgagctcctgagctgctcccgtgatgacttgctaaaagttattgatctccgaacaaatgctatcaagcagacattcagtgcacctgggttcaagtgcggctctgactggaccagagttgtcttcagccctgatggcagttacgtggcggcaggctctgctgagggctctctgtatatctggagtgtgctcacagggaaagtggaaaaggttctttcaaagcagcacagctcatccatcaatgcggtggcgtggtcgccctctggctcgcacgttgtcagtgtggacaaaggatgcaaagctgtgctgtgggcacagtactgacggggctctcagggctgggaggaccccagtgccctcctcagaagaagcacatgggctcctgcagccctgtcctggcaggtgatgtgctgggtatagcatggacctcccagagaagctcaagctatgtggcactgtagctttgccgtgaatgggatttctgaagatttgactgaggtctctcttggcctggaagaataacactgaaaaaacctgacgctgcggtcacttagcagaggctcaggttcttgccttgggaaacactactagctctgaccttccatacctcacttgggggagcacagggccccgctgggcctcctcaccaacggcagtgccaaaatcagcccccacatcaaggtggtgttctctgtgctttctctcgtccttccaaagtcggttctggcctaacgcatgtcccaacaccttgggttcatttgcccggtgaactcactttaagcattggattaacggaaactcccgaactacagacccctccctggtgggttgcatgaatgtgtctcattactgctgaaatgtcctcacatctctttcactgttcttcagagctttctggctctctttcccccacaaaattcgacatatttaaaaatctccgtgtggctttaaaaaatggttttttgtttttttgtttttttgaggtgggagaggatgtgtgaaaatcttttccagggaaatgggttcgctgcagaggtaaggatgtgttcctgtatcgatctgcagacacccagaaggtgggtgcacactgcatgcttgggggtgccaagggattcgagacctccaacatacttgtctgaaggtggtgattctggccatggcccctctgccaagcctgtgtgcgatgcccttggtgctttagtgcaagaagcctaggctcagaagcacagcagcgccatctttccgtttcaggggttgtgatgaaggccaaggaaaaacatttatctttactattttacctacgtataaagttttagttcattgggtgtgcgaaacaccctttttatcacttttaaatttgcactttattttttttcttccatgcttgttctctggacatttggggatgtgagtgttagagctggtgagagaggagtcaggcggccttcccaccgatggtcctggcctccacctgccctctcttccctgcctgatcaccgctttccaatttgcccttcagagaacttaagtcaaggagagttgaaattcacaggccagggcacatcttttatttatttcattatgttggccaacagaacttgattgtaaataataataaagaaatctgttatatacttttcaaaaaaaaaa

SEQ ID NO: 64251 - DNA, 1857 bp, Homo sapiens
  misc_feature (1)...(1857): n = a,t,c or g
ttttttttttttcttgtggccattcccaggtttaattacaaaccgatccgaacatcccatctgggtcgacagctgggagggcaggattggggggaagctgctgggcgcagcccaggccaggcaaccacgtccttcccctgctcccaggtggagtaggggcctcacgactgcctcgatatccactgtcttggagcagcctggctaccccgagatcccaggtgacctcaaggctgcctgcacttcagcgccagcatgtatcctggcctgagaaccccaaagcaccttaagcgtcccccctcaaagacaactgtgcacccagtcctcaggtgggaagaggaagcccagccaggcccggaatccgcctcctccccagggtcctgggagctctgactctccggggcgttagaccgaaccagccaggcgagagggggacccacgggccagggctccgaggcagcggctgcttctggatatattttctttaaaggcgaaatggttccgtctttggtatgaacaccctcactccaggcaaaggagggggtgggcaggggccccggcaggaggaggctctgcccagcccggggccagctggaggaaggaccatgccagaggctcatgcggaggaaggagaggcagcggtggttcggcctgaccaggatccaggaggagggctgagagccccaaggccatgacaggcaggagccggggctgagaacaggcaggagccagggctgagaacggtcacctggctcagggctcccgtgagaccacgccacgcaggtgcagctcactctcggcggccacgatgggctgcccgttctgcaggtggtggtcgatcaggtggctgatgctctcaaacagcacgtccttcgtccgtaccacgccctcggggtccacgagcagcaggtgcttgggctgcccggcgtgcatgccggtgaggacatactgcccggggttggtgacgctgtctcgcacaaggaagtccccgtcagctcgaagcatcctctctgccgcccggcggctcatccggccgtggtaccagggctcctgacgcagctgttcctccgtgggggccacaggggcccggcgggtaggggggctgggccactggtcctccaagggaagaggggctgctgtcacgcctgccgccactgagcactcatgcaacttcagggcatcctcaaagggtcctgcaggccagggacaggagtgctgggcaggcagggggcaagcagctactcctgccgggaccagagctgggagaaacaggttccccagggagtccctcatgcacccgtcggcctgcgctgaccgagcacccacagtgtatcagactcgcactctgcccagccccgtgcgtgcggtgggctcacatgtgtagcaacctggactccccaggttgggttttctaggcacgtactaagcatgtacaaagggtaacagcagctctttctttcagaggttaactcctatttctttttcctgccttgtcaggtgggcttccttcccaaagcgtacgcctctcgtttccttgtctggtcttactgcattggccgcggggcctccaatgtgccctaaatactcaagacgacagccggcacccctctcttgcccctagcgttaaaatgttctgccctgggttttctaacggcttccaacaatgccaacatccgacaggccactctaaggctctcctctgagtgtcagtcccctcattgtcaaacaggggtgggcgtgtccccaggcagaaagcagcatggttcagaccaaacagagctggagccccagccctgacggagatgcatctacccgtgcctggggcggcctggaattccnccgcntggcgtatgctatcaa

SEQ ID NO: 64252 - DNA, 2357 bp, Homo sapiens
ttaccccaccaggcccataaggacgcctgtcatagctggaggaatcttcgtgatcgacaagtcctggtttaaccacttgggaaagtatgatgcccagatggacatctgggggggagagaattttgagctctccttcagggtgtggatgtgtggtggcagtctggagatcgtcccctgcagccgggtgggccatgtcttcaggaaacggcacccctacaacttccctgagggtaatgccctcacctacatcaggaatactaagcgcactgcagaagtgtggatggatgaatacaagcaatactactatgaggcccggccctcggccatcgggagggccttcggcagtgtggctacgcggatagagcagaggaagaagatgaactgcaagtccttccgctggtacctggagaacgtctacccagagctcacggtccccgtgaaggaagcactccccggcatcattaagcagggggtgaactgcttagaatctcagggccagaacacagctggtgacttcctgcttggaatggggatctgcagagggtctgccaagaacccgcagcccgcccaggcatggctgttcagtgaccacctcatccagcagcaggggaagtgcctggctgccacctccaccttaatgtcctcccctggatccccagtcatactgcagatgtgcaaccctagagaaggcaagcagaaatggaggagaaaaggatctttcatccagcattcagtcagtggcctctgcctggagacaaagcctgcccagctggtgaccagcaagtgtcaggctgacgcccaggcccagcagtggcagctgttgccacacacatgacggtagccctggggcctcctgtaccttttgcatgagacttcgggaccggaagggggttagggtgggggagtgcaaagtgggctgttcccatctcctcacatttctgccaggaccatcagcaaatacccaccatgacacacgttctccaaagcttgttctaggagggcgcaggcgggcacgccccgatgccctcagtgctgtcctggccttgccccgggagaggagatggtcagggtgctggactgttgctgggtagagactgagtaggtgcccctggccctttgtcctctcccttggcgcttcttggggctgggacaatagtgtgtggtctctcccttgttgcccggagaaagcaaggacagaagcccacacaggggtcttttgggtcatgaggcccagctgtgcaggcaggcagggccaggggaaattgggcagcatggatggagaggctgaaggctgggaagagggaaggggagaggggcagcctgcaggggtagctgaagaacaggaaggaggtgagaagcccggtgacctgtcagagatgccaagcccagggtggcactgggttgggtggggacggatggtgtcttggcagcaaaggatgggtaatttgcaaatgaacatggatagaagagcagcaaagcaccaaaagaacaaggtctcttacccaggacacagtcccttccacactttaccagccccagggtctgagcccgacgctgcctcttccggtcctgtgcctgtgggtgcccacattcttagcaagaggctgcagagggttctttaggggaagattcgggcgtagtttattaaacagactccacttctatttggccatgtgtcaggctgagacctctctctcgggcattaatgaacagctagtgccctgtccctgccgccaggacccactgaaaggacgggtagccacacacatccctgagtagtcccagcctcatttgtcatttttgactcctgctttctcaaaggtttttgcctctgtcaatacagcatcatgggtggttggaaagaagggaacttcccttctggaccaagaacagcccctaagtcattagggttcaacctcacccttattcccctccccgctacaggagcccctaagtcattagggctcaacctcacccttattcccctccctactacaggagggattttcttgaagggtcagctattgcactgtgctgggaggctggctgtggctcctgtttgtgaagagaactcccagttccttttcacagccgctgagaacacatccacacatctaccccacggccttgtcttgggaactgctcctgctatccccacaccctgcttcctcaccccactggctcttggggcaaatgactgttgggtaccagggaccctggggggtcttcccctaacaaaggcaggaccagcctgggggcagatattaccttaccacagggagccccctgttttttcataagggccaaggattccacattacccattaggattttcatgggattttaggagggtttta

SEQ ID NO: 64253 - DNA, 1770 bp, Homo sapiens
ttttgaagacattggaaatttttattcatctttgctttacaacagaaccaaaagcgtcaacttaagaattcattttacctgctggtttccacaagctagttatgtgaaccatgttttacaaacaataataatattacaacaataattatggagaagttaattggataatagagcttttccacaattcaagtagaaacacagaagaaactggataattttaagtcctctaactcaagacatgctggtgcaagcctggcctgcgaggccccattgcctgcgtctcccgggggccttaggaaagactgacagttcgcgtgcctctggggaaatatctacgctacagaaaatctttaggtgttcagtagttctctagagattttaagtggtatcacaacagcccatccggagaacttatttctaaataatttgaaaaacaaacaagaaaccattagggttttcatgcagagcagcctccagagcaacattctctgagaggaagagtcgaccagagtgagctctccgcagggcctgctctgccctcccctgccccgctctgcccttcgcagggcctgctgtgccctcccctgccctgctctgccctccgccgccctgcagacactctcccaggactatgggaacccaagctctctcctctgggccagacaaacaatgctcaggccatgcacctcctcagaaaagggggcatgggttgccacatcttcagagagctctgagtaaactccctgggcccagggatgcaggggagcctggttgttgctgcagagccagcctcatgttcccctaaacatcctttctaaactagagatttctagactaagacaaaatcaacatgcattcacactttatactctactccattttcaatcccttagatttaaactcagtgtggagaatctgtgataagcaccttccaaattcctccaggatcatctgctctgccaggcacttggagcagtgttctttctcggcctcttctccctgagcaagcaggcaggcgcatgtggcctccaccacctcccaggagatgcatgaggaaggccgcctatcgtgactgaatcttggaagtcctgaaaatttcgttggtggcaggtaatggctgccttccaaacctccagtctgcatgtagtttggcatgctcattagtgtctttcgttctgggctttcttcataatttttgcaaccaatgcatttgcaaatagaagaacacataatttgggcctcatagcactcgcagtaattcttcaggcagcctgacctcctgcagttgcaccctttgttgtgctggggcttgacattgcccaattggcccttcccaatttttggctggaaagcttctggatttctaccaagacatgccttaatggctttaaaccgttcaatatcatgatgcaagttgttgcaacaattattacaattgcagttgttgcaaaagtccccactggcaaagcagtcacagtacccagccaaagttatttttggtggtcctggaagagttgatcccgaggggaaagcagacccgttgactaccgatggtaaggctccctcaagttgttgtgtaatgagatttaattttgttgatgctggcaaaaatctccctactaaagcagtcattggtttagggacatctgactgtagataattattttgatcttgatactgaggaaccaaatggagtgcttttagttctcttgttctagaattgtctatacatagcatttgtgtgccccctttcaattggcatatcaccat

SEQ ID NO: 64254 - DNA, 1345 bp, Homo sapiens
ctaatttttgtatttttagtagagacagggttttaccctgctggtcaggctggtcctgaactcctgacctcaggtgatccgctggcctcagcctcccaatgtgctgggattacaggcacgagccagagcgcccggccatatttcccactttggtttgggcttctgaaaaaataaaggaagacaattctttctgcctatccttactatgtcgtcctctgcaagctgtcgcctctgtatataagtacatctaacaacactgtcatgaaaaatctataccagagatatgattaattccacccacaactgatgtatgttttctgattatatttctcaagccaaatatctgcagcaataacatgtattgaaaggtatagaaataaacagatggatagacagaaaaagactcagactgtctaagtagtgaagtttgtgcagaactagaaacaaaaatccacctgggtcagaggtatagggttaatttctcttgctgaggctcagatttctccttcatgcatgtttaatggtccacctaagttcaactggaggagcatctttcttctttgttaaccaaacatgcccaggtagagctgcttctcttttctatggtagctgctgagttctgactgtgtcagctggaggtaccgccggacgttggcatctttaggctgcctattcacggcagccaggaggtagtggcgggcctggtcatagtcctgcagatggaaaaaggccactccggcccgatacaaggccttggcattatcaggctgtcgttccaggactttctgactatattctctcactcgttcgtagttcacgggctccatctgaaggagacaagcagctagattgttatagcagtctgtctgggtggtatgcaatatgttttcttgttcaggcgtgagggccgggccctgaggtccgagattaggtaacggagagggcagactcggatccagaccccgcagctgaagcagagctcgatggtacctactcacagcatctcggtacttcccttcccggtagcgctggttcccttcctccttgtacagctgagcctcctgcagacgcttctccataactgtcgcccacggttcttgcggaaccttcttcctggagagtccccccacagggacctgcggtttgcttgtttctactgaaagccccacctctcctttctgcagtctttttctcaagaagtgcaggcaagtagtaaggaaagggatgtgggaataatgaagcccaacattaagtgacttcctaaagaggcgatgtgggggtggatgagactttccgaagaactcaagcaaggccctactcaggaattgtctgcggtgagaacgcc

SEQ ID NO: 64255 - DNA, 1051 bp, Homo sapiens
gcggtggaattacacgctcttcgccaagcacatcaagctggactgcgagcggtgccaggccaagggcttcgtgtgtgagctctgcagagagggcgacgtgctgttcccgttcgacagccacacgtctgtgtgcgccgactgctccgcggtcttccacagggactgctactacgacaactccaccacttgtcccaagtgtgcccggctcagcctgaggaagcagtcgctcttccaggagccaggtcccgatgtggaggcctagcgccgaggaacagtgctgggcaccccgcctggcccgccaggacccaccctgccaacatcaagttgttccttctgctccggagacccctggggtgcggccctggccccctccacccctgctgggccagagcgggtgggcagtgtcaaggcccgctgtctcccaggtgcttgctgggactcggggcggctgcacctggctgtcacctgggtgtgctgctgtgaggggtccttgcgtggcccccatccttcccccaatgcagaactccatgggcagggagctggggggacatctcacctcccccatggcacagagccctccacacccctggaccagggcatccgggccctagaaattccacagctcccgtcctggccaccctggaagctcatcaggccaagacccggacagagcttcagaggagtgttgagtgacacctgaggatgcggctgcacacactcagccaagggccgagtctcacctgcggtggggtttcggctctgcctgggggctccatccctttcagccactcgtggccttggggatttctggttgtccccagctgggactgttcacagttgtcacctgcagacctgcctctccctggcctgaggttcaaaggcctcatcggatggtcagtacagtggggtcacctgttgtttctatacaacagcagggaaggggccatggagcttttccctgctgggtgctcctgctttggcccagcccacctttcctggtgctccaagctaggaggctgtggccccagcctgaggagggtgtcctggcctt

SEQ ID NO: 64256 - DNA, 2365 bp, Homo sapiens
gcggtggaattccgctgctgtcccggccgggaccccgcctgcttcgcccgcggctggaggctggacagggtctacgggacgtgtttctgcgaccaagcctgtcgcttcaccggggactgctgcttcgactacgacagggcgtgcccagctcgcccgtgcttcgtgggggaatggagcccctggagtggttgtgcagaccagtgcaagcctacaacccgtgtgcggaggcgctcggtgcagcaggagcctcagaacggcggggcgccctgcccacccctggaagagagagctggctgcctggagtactccaccccgcagggccaggactgcgggcacacctatgttcctgcctttataactacctctgcattcaacaaggagagaacacgacaagctacgtctccacactggtctacacacacagaggatgctggatactgtatggagtttaagacagagtccttgactcctcactgtgctctggaaaaccggcccttgactagatggatgcagtatctccgagagggatacacggtgtgtgtggattgtcagcctccagctatgaactctgtgagccttcgttgttctggagatggcctggactccgatggaaatcagactctccattggcaagcaattggtaatcctcggtgtcaaggaacttggaaaaaagttcggcgagtagaccagtgttcttgtccagctgttcacagttttatttttatatagatggtgatataaatatttccaaatgcatttgtaaacattctaaatattctcaagtcatgttcaatgtttcctaaaccttcaattttggccaaagtccccaaacacatcattgccacactctgaagtagagaaagaaaatttaggggccagttctcaaggaacacaggtcctttatttttattttaactaagttgaagacccactcaaaaagctcttgtggttttatgttcttgacctttcaactggagtcctctcattcagcaggtggcccgtgagacacagaatacatgtctgtttgctaaagtaaaattactgtaactcagtccgattattggtgacggaagtgtcatttaaggggatctatgttttgaaccttgcagtctattttataatcttttaaaagtttctcactttaaaacatgtatacaggtatgcacactctacacatatttccatatatttaatattccataaattctgaaataatttcaagcaaattatcacaaataatttttccacagggcaaattatttaaaattttagtaagcattctgtaatgaaaaaccaagttatactaaaaacattttttgaagaagaaattttttttttgcttaagaagtgaaaggatcaaatgctcattgtaggtcaatgggagttcttttaaatgttataattttcatgaaaagaaatgttgacaccagtgaatgaaacaattgctttcattctgaaaattctaccaccatttgcatctaagattatttccaaggcttaaagcctgaagctgaataaaataatctttcagagtccagcttcaagtttagttgatgtaagctcactatttttttcctaccgcatgcattttctaatgtttggggtggatggtgtgtcggttatggaaggcatagacgtcattacaggtgctacgatctcacacacacacaaggaaatgttagtctccttattttatgattggaaaatcaatgacctagaggcaaaatggcatgtttaaggacctgggatgacaagtcattctgcagtcagccacagagccaaatttggactcctcaaccagaactccatgaaaagcctgactttgccaaacactgtgctggaaaagctaagcccctttcatttgtgaagtaaattttaaattcaagatatttagtttagagaattgagtcttgagatgtaaactacatgagatttctttggtttcaattgaataatattcactaacaaatgatttactaaaatacgtatttcttggtccttatcatgtaatgacagattcacaacagcaataaggatggagatttccccaataattaataacaccgagagtagcaatattttttactgtattttcatttaattgtcaaagttgtttttgtggaaaattaaattcttcagaaattaataataaaatatgtgattctcatcaaggctagcaactttaagtcagtattaacattttcatactgtttctaacatttattaagctagatttttgaagctatgtctgggtaatttccaatgttacttaaaagtttttttttctttgagacagagtctcactctgttgcccaggctggagtgcagtggccccatctcggctcactgcaagctccgcctcccg

SEQ ID NO: 64257 - DNA, 2449 bp, Homo sapiens
cagacttgcgtctgtcaccgggtccctccacccttgtctcctgtgcggccagcgtcagagccatggcgacggaggagaagaagcccgagaccgaggccgccagagcacagccaaccccttcgtcatccgccactcagagcaagcctacacctgtgaagccaaactatgctctaaagttcacccttgctggccacaccaaagcagtgtcctccgtgaaattcagcccgaatggagagtggctggcaagttcatctgctgataaacttattaaaatttggggcgcgtatgatgggaaatttgagaaaaccatatctggtcacaagctgggaatatccgatgtagcctggtcgtcagattctaaccttcttgtttctgcctcagatgacaaaaccttgaagatatgggacgtgagctcgggcaagtgtctgaaaaccctgaagggacacagtaattatgtcttttgctgcaacttcaatccccagtccaaccttattgtctcaggatcctttgacgaaagcgtgaggatatgggatgtgaaaacagggaagtgcctcaagactttgccagctcactcggatccagtctcggccgttcattttaatcgtgatggatccttgatagtttcaagtagctatgatggtctctgtcgcatctgggacaccgcctcaggccagtgcctgaagacgctcatcgatgacgacaacccccccgtgtcttttgtgaagttctccccgaacggcaaatacatcctggccgccacgctggacaacactctgaagctctgggactacagcaaggggaagtgcctgaagacgtacactggccacaagaatgagaaatactgcatatttgccaatttctctgttactggtgggaagtggattgtgtctggctcagaggataaccttgtttacatctggaaccttcagacgaaagagattgtacagaaactacaaggccacacagatgtcgtgatctcaacagcttgtcacccaacagaaaacatcatcgcctctgctgcgctagaaaatgacaaaacaattaaactgtggaagagtgactgctaagtccctttgctcctgcccgcgagagactgtcgggaagttgacccggattggcaagaaacagggtgtcttggaggtggtcccccagatctgcgcctgggggtcaggacagggcctgatttgagcctcctctctgaagatgatttggccgagcggaaggtgtggaccaccggaaagttcttaaaagttgctggtgacatttcttgccaattctaacactgtctagggaagagttcctagtctattgtgttcaaacagagtcaacaaaagtttttaattttttattacagaagggtgaagttcaatttaacatgcgttgtgttttttcagtaaacgttctgtatctttttgatattccatgacccagtgcacgctgtggcctgtcaccgccaccgtggccccgccagctggcctcccctttggcccacgccggccgcccccattctctgctgcgtagatgccctggcccagggccctgactcctccattcccgccagtagctgttcctagtgtattttcgtctttctggaaaacagcattgagtggttgttttctgtgtaaagagccgtttgtgtcttgggagtttgtggcccacatgccgatagcacggtcatcgcacatgactctcccgtttgtctcagtgtccctgcaacaagcagcaccgcagactgtaataaaaggtggggttttgtgaatggttgtggcaagtgcgtccttgtgaagctcgtctccatgtggctttcttggagaaaggctcccctggggcaagagggtggaaggtttctttggacaggaggtgctgaggctggctgcacctgctctctgaagacgctttcctctctaggttcattgttcagtgttgctgggggcggggaacgggggtggggaggttcttagttgcgaaggagccaagctcctgatggacttgcgttgggatgtgggggacacctgtggcatggtaaggctccctgagtcccttactccaggtcagatgccagtgggactcatgcgccctatgagggctgcagggccagtgctgcccctcggactcctcgaggggttgggtgctaagcgcgagcctcgccgtccctgctggagccctcgcctgcctgcccctctgcctgtgctcctggcactgtggcttcccggtgctcacctgcacagcagttaacagcagaggccgagcgggagcctctggggagcgaggctgaaacctgaacctgcccatggagacagttgtggtgagggttgccacacacagtgagggcggagcagggtggctgagggcacaggtgcttgggtctgtcccacggggcagggctttggggctgtgatgctctgggaagccagcttgggtcctgggtctacagagggccctggcccgg

SEQ ID NO: 64258 - DNA, 729 bp, Homo sapiens
aatttctgctgttttaagctagaaaatttgtgataattagttgcagcagctgtaggaaactaatacaagtatgcatttgaaactaattacagattttgaattgctttaaatcttagtctacgactatcttgtgtttatagttaagagctttttaaaaaaaagtatattaaggactgaatatctgtcataaaaacaatgttatatatgtattattccatttatcctcacaaggttactgttttggttttattttacctactgcagacgtggctggtggctattcatattccatgcttgatgcaatcagaagagcagtgatggtttccaatatccttttaattaataaggtaaatgagaaaagcctcaccctcaaagaagtcttcagactagctactcttggaggaagccaagccctggggctggatggtgagattggaaactttgaagtgggcaaggaatttgatgccatcctgatcaaccccaaagcatccgactctcccattgacctgttttatggggacttttttggtgatatttctgaggctgttatccagaagttcctctatctaggagatgatcgaaatattgaagaggtttatgtgggcggaaagcaggtggttccgttttccagctcagtgcattatctatacctggggccagattttctgcactttgaaatgttgcctttgcctaatgaaagaaacaattcacttaccagcctcctcaccc

SEQ ID NO: 64259 - DNA, 674 bp, Homo sapiens
cctggtgaacgctgtcccagtgcacccgataatggcgaagaaaatgtgcctctttcaggaaaagtataggaaatgagagaagactgtgacaactcatgacctgcatccttaatatccagtgacttcatctcccctttcttcaccacaattccaggcaatggcctgtcggaccagacaattctaccactgcaaagagttgtaaccattttctggtatcacatttatttttcaagacatacttttcaagacatcattcactgacccactacctgcattgagtataaatgcctggatgttaaggattccaatttaactttgaaaagaactgtctcattcatttacatttctgttacagtcagcccaggaggttacagtgagctctccactaagaatctggaagaaatgcatcactaggggttgattcccaatctgatcaactgataatgggtgagagagcaggtaagagccaaagtcaccttagtggaaaggttaaaaaccagagcctggaaaccaagatgattgatttgacaaggtattttagtctagttttatatgaacggttgtatcagggtaaccaactcgatttgggatgaatcttacggcaccaaagactaagacagtatctttaagattgctagggaaaagggccctatgtgtcaggcctctgagcccaa

SEQ ID NO: 64260 - DNA, 6692 bp, Homo sapiens
gagagagtaagttggagggaaaggcggctcaggacatcaaagatgaggagcctggagacttgggccgaccgaagcctgaatgtgagggttacgaccccaacgccctgtattgcatttgccgccagcctcacaacaacaggtttatgatttgctgtgaccgctgtgaagaatggtttcatggcgattgtgtgggcatttctgaggctcgagggaggcttttggaaaggaatggggaagactatatctgcccaaactgcaccattctgcaagtgcaggatgagactcattcagaaacggcagatcagcaggaagctaaatggagacctggagatgctgatggcaccgattgtacaagtataggaacaatagagcagaagtctagcgaagaccaagggataaagggtagaattgagaaagctgcaaatccaagtggcaagaagaaactcaagatcttccagcctggtcccgggcctgtccccacccagctgcctgtcctctggcaggtattggaaattgctgtgtctagaagcatctctgccttcacactcttgcactgcattagctgcaaggtgatagaggcgcctggtgcctcaaaatgtattggccccgggtgctgtcacgtggcgcagcccgactcggtgtactgcagtaatgactgtatcctcaaacacgccgcagcgacaatgaagtttctaagctcaggtaaagaacagaagccaaagcctaaagaaaagatgaagatgaagccagagaagcccagtcttccgaaatgcggtgctcaggcaggtattaaaatctcttctgtgcacaagagaccagctccagaaaaaaaagagaccacagtgaagaaggcagtggtggtccctgcgcggagtgaagcactcgggaaggaagcagcttgtgagagcagcacgccgtcgtgggcgagcgatcacaattacaatgcagtaaagccagaaaagactgctgctccctcgccgtcactgttgtataaatccacgaaggaagacaggaggtccgaggagaaagcggcagccacggcagcctcaaagaaaacagcccctccaggctccacggtgggcaagcagcctgcacctagaaacctcgtgccaaagaagtcttcttttgctaatgtggcagcagccacaccagccattaaaaagccaccctcaggtttcaagggcaccatccccaagaggccatggctctccgctaccccatcgagtggtgcttcagctgccaggcaggccggaccggcacctgcagcggcgacggctgcctccaagaagttccctggctccgctgctttggtgggagccgtaaggaagccagtggtaccttctgttccaatggcctcgccagccccaggacgccttggggctatgagtgctgcaccatcgcagccaaattcacaaattcggcaaaatatcagacgctccttaaaagagattttgtggaaaagagtcaatgacagcgatgacttaatcatgacagaaaacgaagtaggaaaaattgccctccatattgagaaggagatgtttaacttgtttcaagttacagataatcgctacaagagtaaatatcgcagcatcatgttcaacctgaaggaccctaaaaatcagggactcttccatcgtgttctgcgtgaggaaatctctttggcgaaacttgtgagactgaagccagaagaacttgtatctaaagagctttccacgtggaaagagaggccagcgagatctgtgatggagtccagaactaaactgcacaatgaaagcaagaagacggcccccaggcaggaggccatccccgatctggaggactctccgccagtgtcggattcagaggaacagcaagagtcagcacgtgctgtccctgagaagagcacagcgccgcttctcgacgtcttcagcagcatgttgaaagacaccaccagtcagcaccgcgcacacctcttcgatctcaactgtaaaatttgcacaggccaggttccctccgcagaagatgagccagctccgaaaaaacaaaaattgtcagcttctgttaagaaagaagacttaaaatcaaagcatgacagctctgcacctgacccagctccggattcagctgatgaggtgatgccggaggctgtgcctgaagttgcctctgagccaggcctagaaagtgcttctcatccaaatgtggacagaacgtatttccctgggcctccaggagatggccatcccgagccctccccgctggaagacctgtccccctgcccagcctcctgtgggagcggggtggtcaccaccgtcacagtgtccggccgggaccccaggaccgctccaagcagttcatgcacagccgtggcctccgcagcatcccgcccagacagcacccacatggtggaagccagacaggatgtgccgaagcctgtcttgacttctgtgatggtgcccaagtccatactagctaagccatcctcatctcctgacccaagatacctgtcagttcctccgtcaccaaatatcagcacttcagaatcacgttcccctccagagggagacacgaccctctttttgtctcgactcagcaccatttggaaaggatttattaacatgcagagtgtggcaaaatttgtcactaaggcgtatcctgtctctgggtgttttgattacctcagtgaggatttgcctgacacaattcacattggtgggaggatcgcaccgaagacagtttgggattatgttggcaaactcaagtcttctgtgtctaaggagctctgtctgatccgcttccaccccgccacagaggaagaggaggtcgcctatatctctctctactcctatttcagcagccgtggccgctttggtgttgtagctaataacaacaggcacgtcaaggacctctacctgatcccgctgagcgcccaggaccctgttccatccaaactcttgccctttgagggaccaggtaagcgccggctttctgggtggaggtgaggcccacctgcacctgcacccctcctcccactgacatgccctgctgagtcctgaccagcccagggctctctgggagcaggagttaggagcacagacgcagcggttagcaataggattcatctttgagggcgtaggactgtggcacgagaagtacccctgattcacagcataaattgtcttaggagagttttttagagagggaaaaacccacagcctgcaaccagctcatcttggcctcaggtcagagaagactcagtgcccaggagcccaaggctcagccagaaagggaggtgacactcccagcggccctgctctttcctctagacagactcgggagccagcacacaccgggaagtggctccatcagggatcacttctctaacagggatggatttccaggagacttaacaataatgacatagaaaactatttctagaaataattattttaaaatctgcagctcaaattgtaatagttcattcatctttggcaagctattttgtgtttgcacgttccttggaaagtactgtatttaaacgattatttacaaatagcctaaaatacatctttgtcaagggttgagggtgattccaggggccacgtgctctgttagtgaccagctctttcatagccccttagaagaagctgatgtgacttcagttaggggttagtatctgatgcccaactgaagtgtctccgtggccatgcagtccccagaggattggtgttctctcaaagcgggtgtgtggatcacacagtgtcctctaaagtgcttcgtcataaaggcaggtgctgtctggaccctgtgcctcagtgccctctgtccctgtcaccaggcctcggcgggtgttcctgccatagctgtgcagggtgttcccacccacacccctcatgccgcaccctagctagctggggtcctgtaggggccactccacatcttgggcgggacttctgtcgccccaggcacagcccacgttcctactggagcccattcttcacagctggagtgggctcagcctatgcctgtgttgtggaattatatgtccataaagggattggttggtatcagtaatttcagggttaaatatttgctggcgtagtgcattaaattattttagtgccagataaatttttaaaagcaaagtgctttagtgtgtcccctcaaatcctacttgggataaagagatgccacctaatgggtggcagaaaggaccctggtagaggttcttggtgttgcttgtgaagagctctggccagctccacgtgaccagggagaggaaaagcccggccctcctggaggtgaagaccgagaagctggcctctccgcacctgtgaagacccactggtcagttgcaagtgcgacagtgtgtgcactcagtgcagacactgcagcacctcagcacctccctaccggggtggaaagagcactttttctttacagaaacatgattcttagatagcgagcctcccctttttaaaacaattgaagcgatatttcatcctttcttgagcttctctccctgctcatctccaaacttggagctgtcaggtgagcacaggttgtagggtgttgagcgagccccggcgcatgccgggcaccgggttccccacactgggcagtgacggggcccagggaggccaccagaggagcggcgcctccattctccccacagcaagggctggctgtgcaggtgcagccccggggcagagggaaaggacaggtctcccagcacctcccggatggcaccgggacaaggagggctgggctggggtcactcaccttgtctgctgagtgcgatggcaccaaccacccacactgtcagctccgcgaccagctgggggaacgtcacactcgcccaccaaggcacttgctgaggccacgacgccgcctgacggggacacacaaaagccccagggactttgatccacgataaagagcagaggcgtctgggtaaagtaacacagggcaagggactttagaaaagtaacagctagtgaaacctttccatacacttcagaaatgttttaacttaagacttcagtataatgttaacttctcctgatgtccttgttgacatgaatgcgtgtgcgtgaaatctcacacacttccatggtcactaaacagccttcaccccgggccaggccatcgggtactcggcccgcttcacgtactgattacttgacttggcgttttctagatataaacatgtacatgtgtgtcctggctttgtggtgtaaatgtgtagtgcgtgtgcatgtgcgcgcgtgtgtgtgtgtaaggctaggtcctggcacgtttcccctgtctcagcggaccctgtcctcacggagatagcccagaagcccttggacagcacaggccacacctgagggtgctgatggtggtgactccacagagctgtggtcaggggtgagcatgtgctgcgcagcttggagtcacgcccccagaagtgctgggtgagggtctgcaggacccagctccattccacagcctcagttctctgcggcacatgcagcacaggcctgaaggagacctggcgccccagccttgagctgcccgtctgcatcagggcactgatgtgggagcatcttcccctggggatgttaaggagaaggtcctgttgggggtagagattcacgcagaaaagagtgactgactcgtccgtgtgcctcagtttataccacacaattgcaggtgtccatgcctcccacacatggggacctagtgggttttgacagcgtggtgtccagtcctagccccctcagtgcttgctgttcacacttaagcaagtgaaggcctgaaggtgcccagctgtgccctcaggggaaacttaagtcacccgccctgtcagcacttggcccttgtcgggcagtgagagtggagctgcccccgcagcaccctcaggagccatgcagttcacagcagtagctggatctccctgaggacatttgtccttgcatatcttaatgatttgtccacagaaacaccgggttgtcttcctctgcccctctgccccgcagtgggggcactctctgtaactcagcatcacagtggggggcagctgggaggcctggttccaggtgaccttctccacctagatgttcaccccactcagttccagctttaccaacagggccccccgcaggaacttggggtcgcagagtcccggcctgtctcagggccttgttcatggaagggagatgagtcaggttgaaagctcatcgtgtagggttctgtgcggggcccttacaggactggaccgcagccaagatgcctgcctgttaaccatgcccagcccccgtcatttccgcgtgaagccgcaggcctcggagccttggtctgaaatgcctgtggagtaacctcggtccataaacatgggtgcacagtctgttctccccaagtacagggcaggaggaaacaccgccctctgtagctgctcgaatggaaagggctcttttctctgaggtctttatacattagaaagctcttctgggaagaatgtttgaatccatagtgtctttctgtattcacttttaattgctttctaaattagctgagaaattctgacttgaaatattgtcaggtaagcatttcttcagttttcatgtgtgtatgtaacagtagctttgcatggaaattgtaatcagagtcaaatacagtattgaatggaatgtactgccttctcctcctaaatcaataaacatctttcatgg

SEQ ID NO: 64261 - DNA, 684 bp, Homo sapiens
atatatgagaactggggcgaatgatgtgaaacgccatcggtggttccgctctgtggactggaaagctgttcctcagagaaaactgaagcctcccatcgtgcccaagatagcccgcgaaggcgacacctccaacttcggaacttaccccgagaatgactgggacacagccgcgaccgtgccgcagaagggtttagaaatcttcaagaatttctgaggacaggagctcacatctggaagaagcaggaaggctggaatctgcctgcaacaaagagctgctcctgagcagaccagtagcaatgtcttcttcacgtgataaggacatttccacttttctgtctttgtgcctgtatgtatagaaacagatcagagcacagttgaaattaatgtaactggcattatttaagcaactggaattccacactgtaggaaggttttgaaaattgtttgcttgtagattttatcttatcctttagtgttgtgttcctactgtgatgtcttggtttttctcatagacttaagtttataagttatgaactcgacttgttcaattataaccacaaattgtgtgtgtgtgtgtgtgtgtgtgtgcatgcgcgcgcctgtgtgtatatatagaagtcattatggcagatccacagaaattgtgcaatgatgtaaatgttcatacttcacagagcctgtatt

SEQ ID NO: 64262 - DNA, 1893 bp, Homo sapiens
caagaatggcagcacaggcccccacttagataagaagaaggtccagcaactccctgaccattttggaccagcccgtgcctctgtggtgttgcagcaggctgtccaggcctgtatcgactgtgcttatcaccagaaaaccgtcttcagcttcctcaagcaaggccatggtggtgaggttatctcagccgtgtttgaccgggaacagcataccctcaacctcccagcagtcaacagcatcacctacgtcctccgcttcctggagaaactctgccacaaccttcgtagtgacaatctgtttggcaaccagccctttacacagactcacttgtcactcactgccatagagtacagccacagccacgacaggtacctaccaggtgaaacctttgtcctggggaatagtctggcccgctccttggaaccacactcagactcaatggactctgcctcaaatcccaccaaccttgtcagcacctcccaaaggcaccggcccttgctttcatcctgtggcctcccaccaagcactgcctcagctgtgcgcaggctatgctccaggggagtgttaaaaggatcaaatgaaagaagggatatggaatcattttggaaactaaatcgttccccagggtcggaccgatacctggagagccgcgatgcctctcgactgagtggccgggacccctcctcatggacagtcgaggatgtgatgcagtttgtccgggaagctgatcctcagcttggaccccacgctgacctgtttcgcaaacacgagatcgatggcaaggccctgctgctgctgcgcagtgacatgatgatgaagtacatgggcctgaagctggggcctgcactcaagctctcctaccacattgaccggctgaagcagggcaagttctgaaccaggagaggcagcctagacaaccaagtggcagcaggtgggggcattcttctaggaatgaggggcatcagcccaccccaggcacctcagtggggttccgggccacctcaggactccaagaggctgtgtggagccaccactcctagccacagctgccatgataagtccttccatgaaggactgaggagggagagtgggggtccagggctggtgctgctcttccctcagctctgccggggctctaaggtccctctatttatttctcaaccctggctggcctctcaccaggagtttaggctgaatgccttccacgtgatggaggaaaaggccaactctgtcctggtcttgctgtggcaccccatcgccccacagctcgtaccttctcaccagattcccctgaatccaaactcgtggtgcaaacctctaccttttttacaaaaagatcttattgttaatttattgtttctggcacttgggcaaaccctgtagttaatactcctcccacactagacactgggtttcaggaggagggagactgccctgctttggtcccagagaggccctctgcagataggcgtggcccctcttcagaggacactaccctagggcactttctctttgaggtggagagacccataaagccttgaccacatcactccatatggggaggagaaggatccctgtcaccttctcctctcttcacggggcccttttgcagccctaggcctcatctgtgggaagggagtccctggcttatactgcccccaccacagctccttgccctggccagaactgctgtcgaagaaaatcaggccggaaggccaagaaggcgctaagggggatgggagggcaggttttccaggctggagtcggttccacccactcgcctgtccacaggcttccttgtaagcaagtcagcagcacagctactcacgctgccatctggacttattttatgtcaatctgtttataaataaaaaccaatatagataaaaaaaaaa

SEQ ID NO: 64263 - DNA, 1319 bp, Homo sapiens
  misc_feature (1)...(1319): n = a,t,c or g
ataaaatattagggacttttcttggtagagatggaaatccaaataaacggaatgtgcacaatgaaacatctatgcatttgttgtgtatgggacctcaaattatgatatctgaaggagcccttcatcctcgcttggcacgccccacagaagatgatttcagaagagcagattgtctgcagatggtcttaaaatggaaaggagcaaaacttgaccagggtgaatatgagagagcagctattgatgctgttgataacaaaaaaaacacacccttgcactatgctgctgcctcagggatgaaagcctgtgtagagcttttagtaaaacatggaggagacttgtttgctgagaatgaaaataaagatactccttgtgattgtgctgaaaagcaacaccacaaagatttggccctcaatctggaatctcaaatggtattctcacgggatcccgaggctgaagaaatagaagctgaatatgctgcattagacaaacgagagccatatgaaggattaaggcctcaggatcttcgtagactaaaagatatgcttattgtggaaactgcagacatgcttcaggctcctctctttactgctgaagctttacttcgagctcatgactgggacagggagaaattacttgaagcttggatgtccaacccggagaactgctgccaacgatcaggtgttcaaatgccaactccaccaccaagtgggtataatgcctgggacacgctcccatctccaagaactccaaggactacacgctcttctgtcacctccccagatgaaatcagcttatctcctggggatttagacaccagtttgtgtgacatttgtatgtgcagtatctctgtatttgaagaccctgtggatatgccctgtggacatgacttttgtagaggatgttgggagtcgtgagtatatgagcaccttagcatctcttactgcatgatagcactctgatttgttaataaaattgtttgctttcagtatttaatgatgcaaattgtttatattgacttctgagttacacagaaatgaatttagactttactagtaaggaaaaatatttttgtttttatttttacgtcttccccagctattttaattaatgctatttagcttaatgtaaggtacctttagaaacaaagcaggtatacaaataatttttcttagtattttagtttatattacatctaatgtaaatttcaggcaagaatcagtttgtcttatatcccaggaatcttaagcatttggttntgtgctgtctcaattttttgtgacaaccaaattgccttgaaaatctttaagaatatagatgtt

SEQ ID NO: 64264 - DNA, 1586 bp, Homo sapiens
tttttttttggtggttctcaaactgtgttcctagaagcatcccatgtgcccccaggccaagaggtccaggttctaccccgacccacatcccctgaatcagagcagcttttttttttttttaaaaattttgatctgtttcacacattatatttgtttgaacttcccatgtttaaaaattttgaagaaaatccctggagtagacaatccctagagcactgacatgctgtggtccaaggttcaccaggaacagtgcctgtgccctgccacatggcggggttccttcaagcctctggtgatgaaggtgctcagggaaaggaggacggaggggcgcggaaggacccagccactgctggccaccctggcctctgctctgtgttcacgggggagcagactctggggaggcgcccctcctcaccacggcctgcaggccgggctggagcctgcgccttcaggggccttgcatctccagctggaccccctggcacaggatgtgctgcagtagcccgttgaccacatccagagtctcgtccttctccagcacgatgtcataggagtccatgtagcgctcccgccgctcctccaccttgtcattcaggaagccaattttgagaatgttctgcacaccaggaaccccatcggccatggtgaggtccccgatagagtctcccagcaggatgacattggttttgccctcaagttgctggaagtaaccacagttctcacacacagagctgttcttgttgtatgtgtgtatcagctggcccttaaatccctggagaaaaccatcttcattaaaatccatgtagttagacacgatgtggatgttggggtggaacactttcatctgtcggataatttcttccaggatatcaccaatgcccgcagaaaagatgaaaaggggaatgttgttatggtagagtgtgttgaagaaggtcttatatccctccctgagcattgcattggactctctaaccacctgggctatctgaaacttctgaatcttctgctgacataggagattgtgcgctttggtccaccattccaccatatgaggtagcttctccttgacggtccggtgtgggtcgatctcaattgggtaatagtggtgaaggagcgctgtgagctctttccgacactcctcactgatgatcttgctattatccagaatattgtaagaagaagggcatcgctttccattatatgcaaacctgctcaaggtcatgtcaaaatcagaaatcacctgtaaccggtctccgccgcccttgcggagggcgcccacgatctcctgcacccgcccaggctgccgcatcaggaccgtggccttcatcagggtgctcacctgtcccgagacccgagagaaccactgaaccctgcgccacgctgggcccgaggggagcccggggctcgctcgggcgcgcgtgtgaggcggggccggggtgcgcgagggggcggctactggcctgggtgaagcggcggtgcctcggtgaccagctggggggctcgaagcgccccgggggtcggagtccgggcccgccccactccggacgcttcctccctcctcacctccacaaccatcccgttcgagg

SEQ ID NO: 64265 - DNA, 396 bp, Homo sapiens
tctctgtgcagccgccttcactgcacgtgctggagcagcggctgcggcagcgcaacactgaaaccgaggagagcctggtgaagcggctggctgctgcccaggccgacatggagagcagaaatcaagaaagctcaaaggaccggcgcctgaggcttgctgtctgttctcggcaccccgggcccatacaggaccagggcagcagcattgagccacccccttggcaggcgatacggcagctctgtgcccttggccagcatgtggagtggaggagatgctgcccctgtggttggaacatcctggggtgacccccgacccagcctcgctgggctgtcccctgtccctatctctcactctggacccagggctgacatcctaataaaataactgttggattag

SEQ ID NO: 64266 - DNA, 5241 bp, Homo sapiens
tcttaattctactccggaaagaaaaatttttaacagccagggaattggggttggttttcccccttttccccttaaaaattttttttttccccaaaagccttaaattttggagggggggtgggcccataagtcccccccccaaaaaaaaggttcttttccaaaaatcccaaggagggttttaaatggccccccataaagaaaaaaattttaccttgccaaccccgggtaaaattgggccccccaagggttcttttaaaagggccccccctttttttttttttgtgttaaacagctttaatctcgctcattgcggcttctcggcacagtaagaaatattgcacatgatcaacatgttttgttctggggaagggggcaagggcagggggaatcaccttcttagaaagtacaacccaagttgggagggcagagggggtgaggagaaaaccctccccgtgcctgtggcaaagtgcaggagcccccacccccaaactaacctgagtccagcccctctggggaaaaaaggggtgcatgaactccccctattccacaggcgcctccctgtggcccaaggcctgcaccaccctccagcttgcagccctcacaggagccattttgcataaagtgaaaagctctgaaggtcacacgctccaggttatgtacaggggcttggaggagggagactgcccctgcagcccctcagctgccccccagcaccgggagggagcttcgagggaagggggtatttacaagaggagcaggcctcattccgccccaaactggagaggacgaaatggctttacccgggaggagataaccttcctgcccccacatactgtccatgtcctgagggggtactataagtcctggcatcttctcaggggtccctcacctgcctgtggcagctgtggagggacctgggggtgggggggagggctggggagccccctcccagccaggctgtccaggccccgactctgggggtggaggcagtggcggggcagcctgggccgtgccagagtccgagctgggtgaggtggggtcagggccccctgcggggctgggagtgggggcaggggcagcagcggtgccagtggggggcggtacagggagaggagcctcagctccagggggctgctccgtgggagtggcagcctgcatgatcttctggcgcacctcacggatcttcaactgcagacaaaccttggagggaaagatgtctgcatagcgggcctggaaggcggctgtggcctgggctgacgggaagaagccatggtcctgaaagagctgcatgaccagggcccggcgctggtccagggtgcgccgcagggaggagtatggcaccttgtcatactctagctccccaagcacgtcctcggcttctgtacctgtacagtcaaaggtgaagatgtccccctcgcacttggcactcttgggggtgttgggctccgagctgcagctggagcgtcttctcatcttgcgcttgggcgaggtggggtcctcgggtgctgaatccaggtccgtggagttcttcctcttcttgcggtaagagcccaggatggcccggggtgaggtggccagagactgcagggtgggggagggcagcacctcctcaggccgaaactcaggcaactcagcaaagcgctcttcgaagtccacttctgacaggaccctgttgtccacagagtcaaaggtcttcttcaggggcgggggccgcaccttcaccttcttgccagtaccagccgcctccttgcgctccggggtgtccccggctgcccgcccactgctgctctcgctgctgccaccaggggctacagctggagctggggccgggctgggaggagtgggaggctccccacgattctccaggccctgcccagggacgcgccagtctgaagatgagctggggaatttgctggccatggtctcagggcccttggcgctggtccgctcctcagcaggtgggggcagtggggggctgctccgggccgtgggagtccaggtctctggcaggggtggaggggctggtggtgtgggctgcccctcaagctcagactctggggcagttggctctcggactgggccaggctccagaggctgccggggtgcagggccaggccgcccagaggcacctgcctcaaaggaccccacgggaatgctggcgatggctgccttcactttctggggggccttcgggctgggccgctgggccttgggggccactaagctgtaggtcatggaacctgctgtggcgctggggaaagggctagtcggggctggggtggcagtggcaggggctggcgggcccttgggcagaatggtggctgcaggtggggttgtgctggtggccacagtgtagaccaggcttgggggggcctgggatggctgggccaggggtgctgaggaggtgggtgcagggctgccagagtaaaatgctgttatgacaggacctccgggggctgcacaggcaggcggcagctggggactgggcacaggtgacacgcccacctgaccgggagccagcagtggggcttggcctgctgagagcaggggctgcacgaaggcggggccgctgggccccagcgaggtgaagcctagagctacagagctcgtgggcccgtacgaggtgactgttccagcctggctggacgcagggctggtacccaggggcagcgcgtgcccgcccgctgactgcacataggtgattctggtggaggagggcaacaggaccttctgaggctgagaggtgggtccagggagtgtggctgggcccaggggcggcaccaggccgctgggtgtgctcacaggcaccggggtcagctggatgatcttgctggggggctgggcaccattctgcacaggtactgagaagggcgggctcaccagtggcagtggctggccggcccctccaccccgcactgacatgctaggggcggccagaggcactaggaccttcccaggcagcagctgggctgagccacccgggggcggggcctgcacgggagaaactgactgggctttggggggtggggcggagggtacagactgcaggatggggatgccaggagtgggtgcagtggcagccaggactttgccgttggtggaagtgcccggtgggagggtgaaacggatgctggtggtgggtgcagggccgctgggagccgctgccttggtcccaggggctggtgctggggcaggtgccacctgaagctgctggggcagcgtgggcaggatgtactgtacctgggtgattcccccagccttgcccagggcacctggttgcaggatgcccaggggtactggcccattggggccactcccagcacctgctcctgagcccgcagtggtcccaccaccaggggccccctgggcaatgaactggacagcagggggcgcaggggccccataccccggggtgcccaccagtaggttagtgacagtggcaggcgccttccccacagtgcccagcaggggtccagccaccaagtgtggggctggtgaggtggctgctgccgacttcttgtccgaatacactaagctgacacccagcggggagcccccaggcacccgagacccagtgcccatttcagtcctggcacctgctgtgtcatttggagacgcctcagcccggccagaggtggggaagggcttagaggcgatgggcacaggagtgctgctgacaggccgcaccacattggtgaccatggtggcggcaggacgggacaggggagctgctggggccccataggccagtgatggggcgggggcggagggcactctggctccgccgccctcttgctcctccttgtttgggggcagcaccagtgtctgcaggatgtttcctcctccgctgggaggggccgcgatgactgaggggcctggtggctccaggccacccacactttcgggtctcttgcgccggaaggtggcaggatccattgggaggaaccgggttgccttggaaggtgtcgctggacccccagccccagggggtgggggccgtagggggcccgctgtgctgccctgaccagactcctgggccttgaaggttcctgagcccagtgagaaggaggtggctgccgaggctgaggaggaagcaggcgaggacgcagaggaggatggggcggaaccatagcctttgccaaaggctacaggaggatccgggggccctgggggctcagggtccagtggggggcggcagtgggtaaaggaggaacggatcacaggtgaaaaccccttccgaccaaagcccttgttgccctttgggtcctccccagagctgtccccactctcgctgtcggtcacccgctccttgcacttgagatcaatgtcagtggtgccgaagccattgtcagcaatgacatcatcatccccttcctcctcacagatgaccatgcgctcctcatcactcgtcatgtcctcactggccgcacgctgagaacgagaagctcgggtgggcagcagcgggggccgcccagtggccgccaaggcacctccctcaccaggggctgcaaagggtcctggagctccatactgggtagaaggctttgggccagagtacgatgcagggccagacaccatctgcgtcagttcctgtagcgcctgactgtctacttctccgccgtccaggctgtgtaccccgctgtgggagaaagctcggggccgggctgagccaggtcccccaactgtgtgtagccgttctgccccacaggagctgctccccggagccttggtgtctgagctcaggagtgtctgggctgcaacggacaggagctcagaggacaccccaggggcagcagcagtgcccgtctccgacatgctccgctcccgcgtctccttgtgccctcctgccagccccaggctcgtgggcttggcctctgagctggacttctttcggtccttgttgcaccacttccaatctgggtgggccttgaagtgggcctccttcacctggaaggccaggtcgtggtacttttgcttctccttgggccccagggcataccaccactcgcccaggatcttgctgacggtccggttgtcctggttgggatgacgctggtggaccagggcccggtgccgcttgctgaagatcatgaaggcattcatgggccgccggatgtggtccttctcccgcttgttggggctgcgtccatccttctcagaagatgagtcccgttccttgggtagggcactgagggactgggtccgacgttttccgggcggtagaggcaactggatctcagg

SEQ ID NO: 64267 - DNA, 395 bp, Homo sapiens
  misc_feature (1)...(395): n = a,t,c or g
tcatgtctatgattgaccctccccgggctgctgtgccagatgctgtgggcaagtgccgaagcgcaggcatcaaggtactggcctcccatcctcccctccattctagcctcccccatgccagagttcaaggagctgcagtggctgctgccctggaaaggcccaggccacggnggcctccttcccactgactcaaagaagaagctgtccatctgcaaggaaaggcccacccctgccttggggcactcacccttatcccttttgctcagagaggccagtgtcccatgcccctcctctccctccctggcacagctctttgtcccatctgcatgtgtacccttccattctgatttgaagcataatctggcactcctatcttgaagacctagttgtcctaa

SEQ ID NO: 64268 - DNA, 744 bp, Homo sapiens
catcctgggaacagtgtatcttttgctggagaaccatctctgcgtgcaagagacggccgtctcctgtgagagcttcatcatggagtcggccaatggctggcatgacatcatgttccagctggagttctttatgcccctcggcatcatcttattttgctccttcaagattgtttggagcctgaggcggaggcagcagctggccagacaggctcggatgaagaaggcgacccggttcatcatggtggtggcaattgtgttcatcacatgctacctgcccagcgtgtctgctagactctatttcctctggacggtgccctcgagtgcctgcgatccctctgtccatggggccctgcacataaccctcagcttcacctacatgaacagcatgctggatcccctggtgtattatttttcaagcccctcctttcccaaattctacaacaagctcaaaatctgcagtctgaaacccaagcagccaggacactcaaaaacacaaaggccggaagagatgccaatttcgaacctcggtcgcaggagttgcatcagtgtggcaaatagtttccaaagccagtctgatgggcaatgggatccccacattgttgagtggcactgaacaagcagaccaacaacactgaggaagatagagtggtgacttagaattaactcgtgctaaggggtcgggggctttgaaaatgccacccccctttcttattgcaagacggcttctcgcacatgaactgcatc

SEQ ID NO: 64269 - DNA, 1790 bp, Homo sapiens
gcgtcgacattgaggaattcatggtaacttctgaaaatttaaccgaagaataaaattaagagcctcaaaatcagtttccaatggaacagctaagcctgccacttctgagaactttgatgaagatttgaagtgggtagaagaaaatattccctcttcattcacagatgtagctcttccagtgttagtggattcagatgaggaaatcatgaccagatctgaaatggctgaaaaaatgttctcttcagaaaagataatgtgattggaacccgtataagaaatgtagttaagcctgaaggactatccttcatcaagactgaaagtgagctttgatttgatattgcctaaaaatttttattgtgttatcttggaagtctgtgtatcaaaatgaagaattcagatggtaggaggttctatagtccttttaaagctgactcttgagtgtcagttgaatatccattaaattggatttggaaataacctgaggaaagtattatgataaagatctgcacagatgcctcttagctgataggtgggcaggcctgtgggtttggggttctccctcttttctctggaacatatgacaattccagattaaagaaaaatgttttttaataaatacccttggtctttcttctagtcacctttgaggtagatattgtgattttctggagtatagtatatccgtgtctctgtgtcttaggtttactagatgcaataatacttctctttgacatttgtactgaagtgatttgatattaagttaaacagttaatgtttgaatattggcatatttataggttttttccgctcccccccaacccacccgtttttaaaaaatctatacaaagcccttgtttgagtctcatcatgcacatcaaatcatggagttaggtcttctctgagctcaggggaacacaagtgcacagagagagatgtcttgagggtcactaccaaagaattaccctcattgtccctcactcaggccatgtgtacatgcgatgctgctgagtgtgctgggggtgggtggtggccacgtggctcccccagagcacttcctaactggcaagctgggagacccattactggtgaactttgtggaaattagaactgtatcttttacataatcttggcatattacatttcataataaaaacatacatttagttgcatgctacatcactattgattttataattaatttcttaagcttcaaccatgttttataccttatttcgttacatcatatatgtgtaatgtgtaatatggaaatcttttggctttaatgtcctttttttaaaatgtagaatgttctaaacttgaaaggcaattgaatgtagtatgatgaaaatgtgaatgttttgctgctttcatgaccaaagatacagggctagtggacatttagaataataattaaagctagagtcttgtatgtcttttctttgaaggagttctaaccttgtaaattgagaatgacttcagagaattttgattaagaaaacattaaaatcttaaccggcacaaacactccaattttttttcactgtggaagccgcaagcaattttttttttctttttctttcaaaagcctgccttctgaatttatttcttgtttactcatttcagagagggtagtaaagaagatctatttctggtagtcatatcgcttgaaaggtattggtaaaggggttggcgagtcgtgaccatgtggaaagggaacagtgttggcagagattggggagaaaatcaggcgtgtcagggtgcccttgctgtgggatatccttcctagggag

SEQ ID NO: 64270 - DNA, 644 bp, Homo sapiens
cggacgcgtggggttggggatggacatgggtctcagagagatgtgcgttggcgagaaacggacagtgatcattccgcctcacctgggctatggggaagctggcgtggatggagaaatgcccagccacttagttttttcttattcccacctttctatcccatagaacactcttttttatcttccctgaaccatattgatgagataaatagggctgggggctgggccccgctggtcactcaacagagtatttcccttggccgagatggaagttttgtcccaatagatgagctgctgagcatcaacaaggtgacatttttctgctgcccatttgtgtcctggagacggtggtaccctgaaggcagaggccagctgccgcaagacagcaatgacagtccacctgccgacctgattcctgcatcatggaataaccacatggctaccttctatcctctgttcccaaatggtggtggcacttatcctgaagtcgtcaatgatttccctttgaaactactttattttactaatttaaactattttgtactgatgtagccctgaggtagttcatgaaaatgctgtgcactcattccatggaataaatgttggaaagctgatcttttctgatataaaatgttgaatgatattaa

SEQ ID NO: 64271 - DNA, 439 bp, Homo sapiens
agtcaatgctgtcagttttttcccaaatggatatgccttcgccactggctctgatgatgccacttgccggctctttgaccttcgtgcagatcaagagttattattgtattctcatgacaatatcatctgtggaatcacttctgtagccttctcaaaaagtgggcgtctcttgttggctggttacgatgactttaattgtaatgtatgggacacgctaaaaggagatcgtgcaggtgtccttgctggtcatgacaaccgtgtgagctgcttaggtgtaactgatgatggcatggctgtggcaacaggctcttgggacagttttcttagaatctggaattaacagtgtccatacatatttgttctccattgatatatctggagaaatcaatgctacagcctatagctgtgaaaaaattctaccttatatttgcaggtgaag

SEQ ID NO: 64272 - DNA, 2109 bp, Homo sapiens
cgagtagtgaatcgcatgagccgtttccagaaaagtgctggactggaagagattgaacaagaactgacgtctaagcaaggaggtcgctgtagccctgttccagggctatcaagcagcccttctgggtcacccttgcatgggaaactgaacagccaagactcctataacaattttaccaacaacaaccctggcaaccctcggctctctcctcttcccagcttgatggtagtgatgcctcttgcacaaatcaagcagccaatgacattggggaccatcaccaaacgaaccggcaaagttaaacctcctccacaaatttcacccagcaaatcgatgggcggagaattttgtgtggctgctatcttcggaacatccaggtcatggtttgcaaataatgcaggtctgaaaagagaaaaagatcagtccaaacaagttgtagttgagtccctgtacattatcagttgctatggcaccttagtggaacacatgatggagccgcgacccctcagcactgcacccaagattagtgacgacacaccactggaaatgatgacatcgcctcgagccagctggactctggttagaacccctcaatggaatgaattgcagccaccgtttaatgcaaaccaccctctgctcctcgctgcagatgcagtacagtattatcagttcctgcttgctggcctggttccccctggaagtcctgggcccattactcgacatgggtcttacgacagtttagcttctgaccatagtggacaggaagatgaagaatggctttcccaggttgaaattgtaacacacactggaccccatagacgtctgtggatgggtccacagttccagttcaaaaccatccatccctcaggccaaaccacagttatctcatccagttcatctgtgttgcagtctcatggtccgagtgacacgccacagcctcttttggattttgatacagatgatcttgatctcaacagtctcaggatccagccagtccgctctgaccccgtcagcatgccagggtcatcccgtccagtctctgatcgaaggggagtttccacagtgattgatgctgcctcaggtacctttgacaggagcgtgaccctgctggaggtgtgcgggagctggcctgagggcttcgggctgcggcacatgtcctccatggagcacacggaggagggcctccgggagcgacttgccgacgccatggccgagtcacctagccgggacgtcgtgggatccggaacagaacttcagcgagagggaagcatcgagactctgagtaacagctcaggctccaccagcggcagcataccaagaaactttgatggctaccgatctccgctgcccaccaatgagagccagcccctcagcctcttcccgactggcttcccgtaggtaccagcaacctgcttctgactggccagccccctcccctgctggaggaggggagaagccccgctctggtcctacccttcagtctctgctcttccttcatcaaccaccttccccaagcttagtgacagcagccgcccatcctacctggatggagaagagacccttctccaagcacctcagcgcacttgccctctgccacacctgtcggtggaggctgtggccaggagagactgtagaagctcggtccctgtgtatgtttgcatatgacatcctgcattggatccgcttttgtattttttaaccatacccacggtggggcgggtggggggagcctggaacagtgaccagatctgggggcctgagtggggacagagttgatcgtccacctggccattttgaccctgagtggacagtcacagcctcagctcatgtctggctgtgacacacactgcccccagcttcccttggtcagccccactccagcacggggtgaacggaggcccagagtactagggaaggaggaagggaggacatgcctcttcttcctcctttctttccccatctgttcctgggaagagtttgtctttcttatctttaagcccctttaccctggtcctgtactgatcagtgaaggaaaccgtggttactgaggccctgttgaaaagtgcacgtcttgtccaataaatcacgctgcagttggtgtccaaaaaaaaa

SEQ ID NO: 64273 - DNA, 1849 bp, Homo sapiens
atgcctcagttactgcaaaacattaatgggatcatcgaggccttcaggcgctatgcaaggacggagggcaactgcacagcgctcacccgaggggagctgaaaagactcttggagcaagagtttgccgatgtgattgtgaaaccccacgatccagcaactgtggatgaggtcctgcgtctgctggatgaagaccacacagggactgtggaattcaaggaattcctggtcttagtgtttaaagttgcccaggcctgtttcaagacactgagcgagagtgctgagggagcctgcggctctcaagagtctggaagcctccactctggggcctcgcaggagctgggcgaaggacagagaagtggcactgaagtgggaagggcggggaaagggcagcattatgaggggagcagccacagacagagccagcagggttccagagggcagaacaggcctggggttcagacccagggtcaggccactggctctgcgtgggtcagcagctatgacaggcaagctgagtcccagagccaggaaagaataagcccgcagatacaactctctgggcagacagagcagacccagaaagctggagaaggcaagaggaatcagacaacagagatgaggccagagagacagccacagaccagggaacaggacagagcccaccagacaggtgagactgtgactggatctggaactcagacccaggcaggtgccacccagactgtggagcaggacagcagccaccagacaggaagaaccagcaagcagacacaggaggccaccaatgaccagaacagagggactgagacccacggtcaaggcaggagccagaccagccaggctgtgacaggaggacatgctcagatacaggcagggacacacacccagacacccacccagaccgtggagcaggacagcagccaccagacaggaagcaccagcacccagacacaggagtccaccaatggccagaacagagggactgagatccacggtcaaggcaggagccagaccagccaggctgtgacaggaggacacactcagatacaggcagggtcacacaccgagactgtggagcaggacagaagccaaactgtaagccacggaggggctagagaacagggacagacccagacgcagccaggcagtggtcaaagatggatgcaagtgagcaaccctgaggcaggagagacagtaccgggaggacaggcccagactggggcaagcactgagtcaggaaggcaggagtggagcagcactcacccaaggcgctgtgtgacagaagggcagggagacagacagcccacagtggttggtgaggaatgggttgatgaccactcaagggagacagtgatcctcaggctggaccagggcaacttgcataccagtgtttcctcagcacagggccaggatgcagcccagtcagaagagaagcgaggcatcacagctagagagctgtattcctacttgagaagcaccaagccatgacttccccgactccaatgtccagtactggaagaagacagctggagagagtttggcttgtcctgcatggccaatccagtgggtgcatccctggacatcagctcttcattatgcagcttcccttttaggtctttctcaatgagataatttctgcaaggagctttctatcctgaactcttctttcttacctgctttgcggtgcagaccctctcaggagcaggaagactcagagcaagtcacccctttgtactgaattgtcctcatcttggggggggtttcaggactatttttatctctgacatctctctattgccccatctaccctaatgcatcaataaaaccttaagccactggaaaaaaaaaa

SEQ ID NO: 64274 - DNA, 421 bp, Homo sapiens
cggacgcgtgggcagagcagcatatctccatcattggcattcaccatcactatgaagggcttcactgcttttgccatccttggtctagcagtcactgcttgggctacctcgccatatgggacaaagagatcaagaatttcaactcagaaaacttcatgaaggtaaatgtattcagtgtaccaggtattctgaggcatgtaccatggactacacacttcactgtggatctgatggaaatgtatattccaacagatgtaccttttgcaataccgttgtgaagagccaaggtgcaatttggttgaaaaattatggattgtgctgaatctccctgatgcttaaggatatcaagtctcctttggcagattccacttagataaccagtttgtcttggacggctgaggaggcaagcaataatctggta

SEQ ID NO: 64275 - DNA, 1345 bp, Homo sapiens
ttttttttttttccaatcttcattctcggggttggcccgccccgatagtcactccatgtcctcgtttactggttcatcttcgtaatctctgtcatggtcaaaatctggactgtggttggctgttgtcactaaggacaggggcccttcagcttcctctggatcgaggggctcttctttgacgtgtacaggatgcacggcttgcataggagatctgcctggactgctgtcactctcgttgctgttggtatgctccattgccccgttcagctcttcccgtattgcgctggctaagttgcccagagtgggatttcccatggaagcggtagtgtatagaggtatactattctcagccattgaagcctgtaaagctgcattgagaggtgtgcagtaggcgtggctgctctgcatgtttttaataagggaagggttaccactgatcttttgtggccttcgtttttggaattctacttcatccactgtccatactgcccctttaacgttttctactcgcacaaaacacttgtgaagactaagattatgacgcactgcattcttccacgtggccgcgttgcgtcggaagtaagcaaacattcgtgtgaaccagttatagatctcatttagtgttagctgcttttctggagattcgagaatggcctgcctaattaaagatgcatatgtaaatggtggtctaacttctgcgttcttataaaattcttggttctgcgcaatatctgctgacgaaatgggcacgttgtatttgtctgagtaccgcctgcggatgggtcccaccgtgtgcatgctggtggttgtgatgacagaggggccttgggtgacgggagtcaggggggcggttggggtcgttggagtatgaggtaagctctgtggagaagcctccgatgcggacttggagagagtgacacttgataccagattcaagggctgaggggcggctttgggttctgtagacttcacatgcaggtgggtcatcatggcttgcaggcgttctttgtcttttgcaagctgtagctctaactgctgtacaacctgcatttgtactctacattgggctgtacttctatcgtccagcgcatgctcactgttgagatgttttagaaatgattggaaatcttcgcacactgcttcacagcctggccacttgcatacaccatgtccatagagaggatggctatgggagtgctcctcatgggacaaactttcccttttgggagtgtggactgagagctgtccattggtagaggcatgtgggttcattattaaggaggtcttggaaggtgcagaggaggagacacatgtcgtggtcagatccaaactgctgtgattgttg

SEQ ID NO: 64276 - DNA, 792 bp, Homo sapiens
  misc_feature (1)...(792): n = a,t,c or g
ttttttttttttctcggcacaaaagctcatgatttaatgaggaacagaaacaaaatctctgattgttggtgtttcaaacttcattggcgtcctctggcaagcacaagttgatccctctgcagcttcaataccctttagcctgatgacagcttcatttaacagatcatttttccttgatggaggtggcaagcgtaacagtgttctgggcctgcttcagtaatggcatgtcgatcatactcccttggaaagtaaaggccccctttcctaattgttgatgttctttaaaggcagcaatcagttcttcagcccacttaattttttcaggggaaggagaaaactgctcctggaccacggcaatttggttagggtgaatcacctgcttaccagtgaagcccatggcggctccttctcgtgactgtctaagcagcccagctccatctcgaaagtcaatgtacaccagatctacggcttggagaccaaaggctttcgctatgacaacaatcttttgccgggcgtagagaatatccagggtttctttactacttgttgcacctatgctggctcgaaagtcttctcctccaaaaacgactgcatctagaaagagacctacttgaggcccgaccttcagggtttcttcacacactgccttaaaattgagcaaacccattgcagtttccacaaaagggattaaattcattggttgttcaagttttcggccttttaagtggaatgaaaatttgtctgcaaactaaaatcagaagtgaattcgcgcacacaacntagggtctcgat

SEQ ID NO: 64277 - DNA, 3414 bp, Homo sapiens
ggcaggagggagggagccagaggaaaagaagaggaggagaaggaggaggacccggggagggaggcgcggcgcgggaggaggaggggcgcagccgcggagccagtggccccgcttggacgcgctgctctccagatacccccggagctccagccgcgcggatcgcgcgctcccgccgctctgcccctaaacttctgccgtagctccctttcaagccagcgaatttattccttaaaaccagaaactgaacctcggcacgggaaaggagtccgcggaggagcaaaaccacagcagagcaagaagagcttcagagagcagccttcccggagcaccaactccgtgtcgggagtgcagaaaccaacaagtgagagggcgccgcgttcccggggcgcagctgcgggcggcgggagcaggcgcaggaggaggaagcgagcgcccccgagccccgagcccgagtccccgagcctgagccgcaatcgctgcggtactctgctccggattcgtgtgcgcgggctcgccgagcgctgggcaggaggcttcgttttgccctggttgcaagcagcggctgggagcagccggtccctggggaatatgcggcgcgcgtggatcctgctcaccttgggcttggtggcctgcgtgtcggcggagtcgagagcagagctgacatctgataaagacatgtaccttgacaacagctccattgaagaagcttcaggagtgtatcctattgatgacgatgactacgcttctgcgtctggctcgggagctgatgaggatgtagagagtccagagctgacaacatctcgaccacttccaaagatactgttgactagtgctgctccaaaagtggaaaccacgacgctgaatatacagaacaagatacctgctcagacaaagtcacctgaagaaactgataaagagaaagttcacctctctgactcagaaaggaaaatggacccagccgaagaggatacaaatgtgtatactgagaaacactcagacagtctgtttaaacggacagaagtcctagcagctgtcattgctggtggagttattggctttctctttgcaatttttcttatcctgctgttggtgtatcgcatgagaaagaaggatgaaggaagctatgaccttggagaacgcaaaccatccagtgctgcttatcagaaggcacctactaaggagttttatgcgtaaaactccaacttagtgtctctatttatgagatcactgaacttttcaaaataaagcttttgcatagaataatgaagatctttgttttttgttttcattaaagagccattctggcactttaatgataaaatcccattgtatttaaaacatttcatgtatttctttagaacaacataaaattaaaatttaacatctgcagtgttctgtgaatagcagtggcaaaatattatgttatgaaaaccctcgatgttcatggaattggtttaaacttttatgcgcaaatacaaaatgattgtctttttcctatgactcaaagatgaaagctgtttcatttgtgtcagcatgtctcagattgaccttaccaagttggtcttactttgttaatttatctgttgtccccttcctctcctctgccctcccttcttgtgcccttaaaaccaaaccctatgccttttgtagctgtcatggtgcaatttgtctttggaaaattcagataatggtaatttagtgtatatgtgattttcaaatatgtaaactttaacttccactttgtataaatttttaagtgtcagactatccattttacacttgctttatttttcattacctgtagctttgggcagatttgcaacagcaaattaatgtgtaaaattggattattactacaaaaccgtttagtcatatctatctaatcagatcttcttttgggaggatttgatgtaagttactgacaagcctcagcaaacccaaagatgttaacagtattttaagaagttgctgcagattcctttggccactgtatttgttaatttcttgcaatttgaaggtacgagtagaggtttaaagaaaaatcagtttttgttcttaaaaatgcatttaagttgtaaacgtctttttaagcctttgaagtgcctctgattctatgtaacttgttgcagactggtgttaatgagtatatgtaacagtttaaaaaaaaagttggtattttataagcacagacaattctaatggtaacttttgtagtcttatgaatagacataaattgtaatttgggaacataaaaactactgaataaatcatgtggcctaatattgaaaatgtcactgttataaattttgtacatttttgatcaaatgtacatctcccctttgctaacggccgtctgctctcaggttgacgtgggtttgatttctaagtgtttcacagtgtctgtaaatcaagaccaaagagcctgtcgatgagactgtttattaccagattcacttctgaattggccagaggaaatctgaatgtattatcctgtgtgtgtctaggtagagatattggaaggctgccaggggatttcgaagtttgcaacctttataggataactgatggcaatattaagacagacgcctgcttttgcaaataacttacaagactgtaaattccaaagatctgaatggggctttcctgatgttggtatctaaggcttaggcctatagattgatttacctttggaattgtgctccaaatgtctactgaagcttaaccgaagaactaataaatggactacagtagctcacgttacagggaaccaccctaggcagggaggctctgtgtgttaaaatgagggtctcactgctttaggattgaagtggctggaaagagtgatgcctggggaaggagatggagttatgagggtactgtggctggtactttctgtactaaacatttcctttttctattttaccactaattttcttttaaactgtgagccgtccaagtcagaagaagacagcaaaaaaagcaacttttccaacatacaatttacttttaataaagtatgaatatttcattttgagaacattccctggaattgccacataattcattaaaaacatttttttaagcaacacttggaacagtgtttactttaaatccttaatggccttaattaattctcagattcctgccccatcacttacagaaccaattcactttagagtgactaaaaggaaacgatagcctagctttctaaagccacgctgtgtccctcaattacagagggtaggaatgggtatacctctaactgtgcaaagcagagtgaaattcaattcatagaataacaactgctgggaatatccgtgccaggaaaagaaaaatttctggcaaatattttgtcactgctgtaaagcaaaatatttgtgaaagtgccaaaataaagtctgtcatgccaaaagt

SEQ ID NO: 64278 - DNA, 1463 bp, Homo sapiens
cgtgtgctcctcacattcacgcagactgagactgagctgcccgaggaagagtgtgaaggccccaagctgcccaccgaacggccctgcctcctggaagcatgtgatgagagcccggcctcccgagagctagacatccctctccctgaggacagagagacgacttacgactgggagtacgctgggttcaccccttgcacagcaacatgcgtgggaggccatcaagaagccatagcagtgtgcttacatatccagacccagcagacagtcaatgacagcttgtgtgatatggtccaccgtcctccagccatgagccaggcctgtaacacagagccctgtccccccaggtggcatgtgggctcttgggggccctgctcagctacctgtggagttggaattcagacccgagatgtgtactgcctgcacccaggggagacccctgcccctcctgaggagtgccgagatgaaaagccccatgctttacaagcatgcaatcagtttgactgccctcctggctggcacattgaagaatggcagcagtgttccaggacttgtggcgggggaactcagaacagaagagtcacctgtcggcagctgctaacggatggcagctttttgaatctctcagatgaattgtgccaaggacccaaggcatcgtctcacaagtcctgtgccaggacagactgtcctccacatttagctgtgggagactggtcgaaggagcattcaatgcaagaggacaatggagcaggatctacacaattctaaagaaaagcaagcatgactcaaggatttcctcttcatcctgtgttcttcatgtagagagacagcagagaggcagtcagagaatactgtctgataagcccttgaaaaagctgtagggccaagatgagatacagagatgactcaaaacagagaatccaggaatgcatagatcctggtaaaaaaggtgggagatgagtaataaattcatttgtgtaggattaagactaatcaactaacaattatattatagaacataacataaatatcagaaatcttgacattatctaaataataaaatgaaaactaattgagatttggagagatgaggtagatgatatagtttggctgtgtccccacccaaatctcatattgaattgtagctcccataatccccatgtgttgtgggagggacccagtaagaggtaattgaatcatggggatgggtttttctcatactgttcttgtgacagtgaataagtctcatgagatatgatggtttcataaagggcacttcccctgcacacgttctcttgcttgccagcatataagacataactacataactttgctcctcctttgccttctgccatgattatgaggcctccccaggcatgtggaactgagtcaattaaacctctttttctttataaattacccagtcttgggtattgcttcatagcagtttgataatgaatgaatac

SEQ ID NO: 64279 - DNA, 1330 bp, Homo sapiens
cttctcaccaccaccctctagcagctccctcactggagaggcggccatcagccgcagcttccagagtctggcatgttccccgggcctccccgctgctgaccgcctgtcctactcaggccgccctggaagccgacaggccggcctcggccgcgctggcgactcggcggtgctggtgctgccgccttccccgggccctcgttcctccaggcccagcatggactcggaagggggaagcctcctcctggacgaggactcggaagtcttcaagatgctgcaggaaaatcgcgagggacgggcggccccccgacagtccagctcctttcggctcttgcaggaagccctggaggctgaggagagaggtggcacgccagccttcttgcccagctcactgagcccccagtcctccctgcccgcctccagggccctggccacccctcccaagctccacacttgtgagaagtgcagtaccagcatcgcgaaccaggctgtgcgcatccaggagggccggtaccgccaccccggctgctacacctgtgccgactgtgggctgaacctgaagatgcgcgggcacttctgggtgggtgacgagctgtactgtgagaagcatgcccgccagcgctactccgcacctgccaccctcagctctcgggcctgagcccgccatgccctcagcctgcctcactgctgggccagggtcatgcctatataagttggcatggcagggacaatggtgggcagttgctcttacatgagctaagtttggagacctgaggcccctttgtcctcgctgggtgggccaaggtctgggacctgtcttggactgtgggagactcaccctcaccttgccaggcctctcccctgcaggactggcattgcactagtctgaggtggccactgcctttgatcaacctttgtgtgcgagggtctaagtagggtcgaacacagaagtgggaaggagaggggtgggccaggggctaatggtgtcactgtgtaaagtttttgacatactagctctataaatatatgaatatggacaaaaaaaaaaaaaagggggggccgttttaaaggatccttgggggggccaaagtttacgcgggcttgcaacgtcatagttttttccttatagggagtcgaattataacctacctgggaatttttggaaaggacccttatttttggggggggacatattgggacaaactccctacagaaattaaaggctttagggaaaatataaaattttaaagggtataaggggtaaaacaacctgcatatgctggctgtttgaaagttttgctaacggagtttgatttatgaaaattttatcccg

SEQ ID NO: 64280 - DNA, 738 bp, Homo sapiens
ggaattcggcggccgacctggccatctttgccctttgggggctcaagcccgtggtctacctgctggccagctccttcctgggcctgggcctgcaccccatctcgggccacttcgtggccgagcactacatgttcctcaagggccacgagacctactcctactatgggcctctcaactggatcaccttcaatgtgggctaccacgtggagcaccacgacttccccagcatcccgggctacaacctgccgctggtgcggaagatcgcgcccgagtactacgaccacctgccgcagcaccactcctgggtgaaggtgctctgggattttgtgtttgaggactccctggggccctatgccagggtgaagcgggtgtacaggctggcaaaagatggtctgtgagcccgggctgcctcctggtggtggccattgtcccccatcggcccctcagccttgcaccccagcactgagaagctacatttccttcctgtgctctggactgctgcccttgtccccgaggagtgtcccgcgcagccacacctggcaacagcagtgtgggctgcagggctccgtctgcacgtggacttgccctggaccttgagtgtggccctccctttctgggcctccccaggtgaggcctggccctgccccaccatgacctgggtgctctgagcccacggttcccacggagctgacttctccggggtgcctgtgccctacattaaacccggcgtttgtttca

SEQ ID NO: 64281 - DNA, 1291 bp, Homo sapiens
  misc_feature (1)...(1291): n = a,t,c or g
ggaattcgaggcagccggggccactggcgatgccatcgagccagcaccccctagcctgggtgctgaggccaagggggaggtcccccccaaggagacccccaagaagaagaagaaattctctttcaagaagcctttcaaattgagcggcctgtccttcaagagaaatcggaaggagggtgggggtgattcttctgcctcctcacccacagaggaagagcaggagcagggggagatcggtgcctgcagcgacgagggcactgctcaggaagggaaggccgcagccacccctgagagccaggaaccccaggccaagggggcagaggctagtgcagcctcagaagaagaggcagggccccaggctacagagccatccactccctcggggccggagagtggccctacaccagccagcgctgagcagaatgagtagctaggtaggggcaggtgggtgatctctaagctgcaaaaactgtgctgtccttgtgaggtcactgcctggacctggtgccctggctgccttcctgtgcccagaaaggaaggggctattgcctcctcccagccacgttccctttcctcctctccctcctgtggattctcccatcagccatctggttctcctcttaaggccagttgaagatggtcccttacagcttcccaagttaggttagtgatgtgaaatgctcctgtccctggccctacctccttccctgtccccacccctgcataaggcagttgttggttttcttccccaattcttttccaagtaggttttgtttaccctactccccaaatccctgagccagaagtggggtgcttatactcccaaaccttgagtgtccagccttcccctgttgtttttagtctcttgtgctgtgcctagtggcacctgggctggggaggacactgccccgtctaggtttttataaatgtcttactcaagttcaaacctccagcctgtgaatcaactgtgtctcttttttgacttggtaagcaagtattaggctttggggtggggggaggtctgtaatgtgaaacaacttcttgtctttttttctcccactgttgtaaataacttttaatggccaaaccccagatttgtacnnnnnnnnnnnnnnnnaacggcaaaaaccattcttttccacctggttttactgaaacattggaaaaaggaaaaaaggccgcccttttnnnnnnnnnnnnnnggggggcccttttaaaagaacccttggggggcccaaatttaacgggggctggcaaggtaaaatttttttccttatagggggcggattaa

SEQ ID NO: 64282 - DNA, 2299 bp, Homo sapiens
agcatggaggggcttgcctctgttcatatctcttgcctctgttcatttcttttgggtcccctttcctccttttccctccatcccactgtaagcaatttagtgggattcagtcattaaaagggtattaggctgaaatgtgcaagcgctgcccaagcccagggtggttctcacaggatccccactgtccctgtcccccaggaaccaaacgccaacagtgtagcttggaacacccagtgtgaggacatgctctgcttctcgggaggaggctacctcaacatcaaagccagcaccttccctgtgcaccggcagaagctgcagggctttgtggtcggctacaatggctccaagatcttctgcctccatgtcttctccatttctgccgtggaggtgccgcagtccgctcccatgtaccagtacctggataggaaactgttcaaggaagcctaccagattgcttgcttgggtgtcacagacactgattggcgtgaactggccatggaagcgctagaaggtttagattttgaaacagcaaagaaggagaggaagaagcggggagagaccaacaatgacctgtttctggcagatgtgttttcctaccaggggaagttccatgaggccgccaaactgtacaagaggagtgggcacgagaacctcgcgcttgaaatgtacaccgacctctgcatgtttgagtatgccaaggatttccttggatctggagaccccaaagaaacaaagatgctaatcaccaaacaggctgactgggccagaaatatcaaggagcccaaagccgccgtggagatgtacatctcagcaggagagcacgtcaaggccatcgagatctgtggtgaccatggctgggttgacatgttgatcgacatcgcccgcaaactggacaaggctgagcgcgagcccctgctgctgtgcgctacctacctcaagaagctggacagccctggctatgctgctgagacctacctgaagatgggtgacctcaagtccctggtgcagctgcacgtggagacccagcgctgggatgaggcctttgctttgggtgagaagcatcctgagtttaaggatgacatctacatgccgtatgctcagtggctagcagagaacgatcgctttgaggaagcccagaaagcgttccacaaggctgggcgacagagagaagcggtccaggtgctggagcagctcacaaacaatgccgtggcggagagcaggtttaatgatgctgcctattattactggatgctgtccatgcagtgcctcgatatagctcaagatcctgcccagaaggacacaatgcttggcaagttctaccacttccagcgtttggcagagctgtaccatggttaccatgccatccatcgccacacggaagatccgttcagtgtccatcgtcctgaaactcttttcaacatctccaggttcctgctgcacagcctgcccaaggacaccccctcgggcatctctaaagtgaaaatactcttcaccttggccaagcagagcaaggccctcggtgcctacaggctggcccggcacgcctatgacaagctgcgtggcctgtacatccctgccagattccaaaagtccattgagctgggtaccctgaccatccgcgccaagcccttccacgacagtgaggagttggtgcccttgtgctaccgctgctccaccaacaacccgctgctcaacaacctgggcaacgtctgcatcaactgccgccagcccttcatcttctccgcctcttcctacgacgtgctacacctggttgagttctacctggaggaagggatcactgatgaagaagccatctccctcatcgacctggaggtgctgagacccaagcgggatgacagacagctagagattgcaaacaacagctcccagattctgcggctagtggagaccaaggactccatcggagatgaggacccgttcacagctaagctgagctttgagcaaggtggctcagagttcgtgccagtggtggtgagccggctggtgctgcgctccatgagccgccgggatgtcctcatcaagcgatggcccccacccctgaggtggcaatacttccgctcactgctgcctgacgcctccattaccatgtgcccctcctgcttccagatgttccattctgaggactatgagttgctggtgcttcagcatggctgctgcccctactgccgcaggtgcaaggatgaccctggcccatgaccagcatcctggggacggcctgcaccctctgcccgccttggggtctgctgggctgtgaaggagaataaagagttaaactgtc

SEQ ID NO: 64283 - DNA, 1083 bp, Homo sapiens
tttttttttggagttcataaaatcttttccgagccagcggtatgcagccagagctccaaagttcaaaggcattgccgttgggttcaagtgccccccaaggctgttgctcagtcacagcttccagagcttccttcccaccacactgccaggagctgccagagcccccatgcagcccctgaccccagttccctcccaagtcccagggcctgaccctggatatctggggcaaggtgctcgggacatagataagtgaaatggtgtgcagaggcccagtggagagtcacatctcggtctcagccaacagactgtcccctagtcctgacgtcattagcaccatctgagagctgggatcgctggggcacatccaggagctgctgcctctctggtgggcagcaggctcccgccctctctcccattccttggtggttggcagcccctcctgccacttcctcctcctcctctccctcagagaggaggtcacagatctgttgctgcagctctgggctaatgctgttctcagccaacaccaggctccgcaaagctgtggggtaattttctaccatgtccagcagggtctgagctgactggttggtgagccctgtgccctccaagtctaggacctctagggtacgactagaggccacagctacagccagcattcctgccacatggtcacccagggggttgtaatccagattgaggacgcggacctgggagctgtgggccacggcaatggcaaggcggctccagcccttaggggtgatgccagggttggcactcagcgttagctccttcaagccagatttggccccatctgggggcaggaggccacagatgaggttgatggcttcatcacccagcatgcagtcccccaggtccagagccacgagggcagggtggagggccagggctgggttcagcaaggccagccccgcatctgtcagggggctcccatgcaggaagagggactggatggagcggttggtccgcagagcctcagccagctgcttgatgcggctggggctggacacgacgcccaggttaaggttgaggaattccaccgctctgcaaatgatctcaatt

SEQ ID NO: 64284 - DNA, 2723 bp, Homo sapiens
ccactatatttgtaaaagttatgtgattgtatgactacagctcttctgtggtacctacaggttgatacaaatcattaaaaatcaaaacatcaacgtatctaagaaccaaatggtgcatgtgactccccggagaaggatatatatgccatgttgccacttgaaggagaatcttccaggcatcaaatcccgtggattctcttattttctttcacattccctctgcttttcctcacagtcggctaccacgctctgaggagccccgtgccatctccatttcccccatccctttttcactttgcctcacaccagtcaaatccaaatatccgagagtcagacactgggagactgtctgcttcttgggcaactcccaggtggttatgatacgcttcccggaccgcaacactgacctacggaactgaaatgatgaattcatgtcagaagaaataggatttggggaagaattcattacctggaccattttcagcagctggaataaaaagtacttaacaacaacaacaaaaatcacacacaaagtccaaaaagtgttttgaaaaagtgctttgagaatttactgtacagtttttttaaacaatttatttatatgttggcttctacatgctcttacattcgtgtaaaacatttatacatattctttacaatttgtacatatattaaatggctatagcataaacattgttctatgggattttatagaagaaaaatcaagtggggagaattacttatgaaacattaacaaaaacccgtgatattgaagaacaagatgttctcatattcatttgatttcatctacttatttttggtgtcattttattgatgctggcccagactttccatttcccgtaattattaggtcagaaaaatgaaagcagcgggagggaacgcggtaaggcacctgtgggagacgggagcgctcctccgcaggggtgagacggtggctgccagtgttgagttcgagctgacggtgtgccaaggtcctgttttgctttatgccgttaagtgaagcgctggaagtgctggtgctcagaaacaccctgtgtgaagtttcggatgtagtcaggaagggcgctggtctgttctttctctccaacctcagagcgccggggactctgtacactgctgaggctgcagcccttctcagtccctacacttttccatctaatggggagctaacctgtgctttttctctttgctgatgacaccaactggccatgaacccgccacccaagccaagcagtgtgccgtggccacagcagcgcttctcatcacggtggatgaggagccaaagaataagaaagggccagagacgccggggtgctgggtgccctccttcccccaggccctcccgaacacaggcctccgcacagccactcacccgttggaccaaagccacaaaattctctacaaagtccctcaattcttctaatgtattcttcatggcataaaacatgccttaaccaagattaggaaggaagtgcaaagagagaaagcactggtcctcacataagagcagcacatcagaaatgtcgctgaggacatgggtggccaggggtatctgctcatctgccccaggcctgtggggtcccccctggagggacatggggatggccccacctggcccacacacccacgatgggcactagcagcccccaggggccccccaccgtccctcccctcttgaagtgtaagcacttgaagctgtgaactgtggcagtgaaaggcgtaacgacttccctcaatgacaggagccccagaggactgaaaggagttataaaaatatacaaacatagatattttttattctggcatagttcatgtttttaagaaagtaattagtaattaattatctgacactgggtaagaactggaagattgtgggagacttataaattatataagacttataatttataagacatataaattatgactctatgtaaaatatcagtggggagaaacccctcattttccattgaaaattctggtaacttttaagtactttccaaaaatagagacaatttccactggtttaaataatggatgcggaaatgaacaaaagaccatccctaaataactgacgcatttagggtggctaataaaataaatgcagttttttgcaactctttctttttggttttgtttccttttttttctgaataataggggaaaaaaagttttgaattgcattgccccaagtcaggagaaagcacgcggcattctcttcaaggcccgttctgtcctacatcactggaaagcggctgagggcctgcctcagcttttctgcaatcgtttcgtaaaattgcacttgctgctccaggtacaggcggatgacactgttgtaatcatagatccggttactgtgaaagtgattcatctcagcttgcaacgcgtaagacatgatgctgactctcttcaccatgttctgtttgtcttgtagggtgattttacttgttgcaactagtttgtcactttctttcactttttctattgctccctgtgaaatataaaatgcagcagtatgaataaagctgaaatgattagtcattagtttaaaatataacaatgctaatatattctataactgatttgctgctgaacaggaaatacctccacaaaataagaagagaggaaagcatctaaatttaacttccttcaagtccctggaagcaaaaggtgaattcctccgctagggcatcgaactcgag

SEQ ID NO: 64285 - DNA, 2693 bp, Homo sapiens
gcggccgcgggctgcatgggcagcgcccgcgccccgccgctgagccgtcgcggagccgcgcagccctcggagcacgcccgtgcagcctgccaggactcttccagacacgggatttgtcggtgaacaacgcagagctgatgcagacataatatatacagccctgcacctgggacacacttccattggatttaaaagacagtcctcgtcagcactgactttcagctatggaatcgcagacggttgatgatgaagcgccggccgtgtaaatgaagatcgagtgaggagcaggacgatgcccaagggtagggtgcccttaaagccccccaacaaggaagagctttcccctcagcagcgaccatggtggagaaccagcctgggaaaaaagataaagataaagtttctctaaccaagaccccaaaactggagcgtggcgatggcgggaaggaggtgagggagcgagccagcaagcggaagctgcccttcaccgcgggcgccaatggggagcagaaggactcggacacagagaagcagggccctgagcggaagaggattaagaaggagcctgtcacccggaaggccgggctgctgtttggcatggggctgtctggaatccgagccggctaccccctctccgagcgccagcaggtggcccttctcatgcagatgacggccgaggagtctgccaacagcccagtggacacaacaccaaagcacccctcccagtctacagtgtgtcagaagggaacgcccaactctgcctcaaaaaccaaagataaagtgaacaagagaaacgagcgtggagagacccgcctgcaccgagccgccatccgcggggacgcccggcgcatcaaagagctcatcagcgagggggcagacgtcaacgtcaaggacttcgcaggctggacggcgctgcacgaggcctgtaaccggggctactacgacgtcgcgaagcagctgctggctgcaggtgcggaggtgaacaccaagggcctagatgacgacacgcctttgcacgacgctgccaacaacgggcactacaaggtggtgaagctgctgctgcggtacggagggaacccgcagcagagcaacaggaaaggcgagacgccgctgaaagtggccaactcccccacgatggtgaacctcctgttaggcaaaggcacttacacttccagcgaggagagctcgacggagagctcagaagaggaagacgcaccatccttcgcaccttccagttcagtcgacggcaacaacacggactccgagttcgaaaaaggcctcaaagcacaaggcccaagaacccagagccacagaaggccacggcccccgtcaaggacgagtatgagtttgatgaggacgacgagcaggacagggttcctccggtggacgacaagcacctattgaaaaaggactacagaaaagaaacgaaatccaatagttttatctctatacccaaaatggaggttaaaagttacactaaaaataacacgattgcaccaaagaaagcgtcccatcgtatcctgtcagacacgtcggacgaggaggacgcgagtgtcaccgtggggacaggagagaagctgagactctcggcacatacgatattgcctggtagtaagacacgagagccttctaatgccaagcagcagaaggaaaaaaataaagtgaaaaagaagcgaaagaaagaaacaaaaggcagagaggttcgcttcggaaagcggagcgacaagttctgctcctcggagtcggagagcgagtcctcagagagtggggaggatgacagggactctctggggagctctggctgcctcaaggggtccccgctggtgctgaaggacccctccctgttcagctccctctctgcctcctccacctcgtctcacgggagctctgccgcccagaagcagaaccccagccacacagaccagcacaccaagcactggcggacagacaattggaaaaccatttcttccccggcttggtcagaggtcagttctttatcagactccacaaggacgagactgacaagcgagtctgactactcctctgagggctccagtgtggaatcgctgaagccagtgaggaagaggcaggagcacaggaagcgagcctccctgtcggagaagaagagccccttcctgtccagcgcggagggcgctgtccccaaactggacaaggaggggaaagttgtcaaaaaacataaaacaaaacacaaacacaaaaacaaggagaagggacagtgttccatcagccaagagctgaagttgaaaagttttacttacgaatatgaggactccaagcagaagtcagataaggctatactgttagagaatgatctttccactgaaaacaagctaaaagtgttaaagcacgatcgcgaccactttaaaaaagaagagaaacttagcaaaatgaaattagaagaaaaagaatggctctttaaagatgaaaaatcactgaagagaatcaaagacacaaacaaagacatcagcaggtctttccgagaagagaaagaccgttcgaataaagcagaaaaggagagatcgctgaaggaaaagtctccgaaagaagaaaaactgagactgtacaaagaggagagaaagaagaaatcaaaagaccggccctcaaaattagagaagaagaatgatttaaaagaggacaaaatttcaaaagagaaggagaagatttttaaagaagat

SEQ ID NO: 64286 - DNA, 1283 bp, Homo sapiens
tttcgtcgcagaggcgcggcggctgtacaactcggccgttgtcaccatgccggtcgtccggaagattttccgtcgccgccggggcgactcggagtcagaggaagatgagcaggactcagaggaggttcgattaaaactggaagagaccagagaagtacagaacttgaggaagaggcccaacggggtgagtgctgtggccttgctggtgggagagaaggtacaagaggagaccactctagtggatgatccctttcagatgaagacaggtggtatggtggatatgaagaaactgaaggaaaggggcaaagataagatcagtgaggaggaggacctgcacctggggacatcgttttctgcagaaaccaaccgaagggatgaggatgcagacatgatgaagtacattgagacagagctaaagaagaggaaagggatcgtggaacatgaggaacagaaagttaagccaaagaatgcagaggactgtctttatgaacttccagaaaacatccgtgtttcctcagcaaagaagaccgaggagatgctttccaaccagatgctgagtggcattcctgaggtggacctgggcatcgatgctaaaataaaaaatatcatttccacggaggatgccaaggcccgtctgctggcagagcagcagaacaagaagaaagacagcgagacctccttcgtgcctaccaacatggctgtgaattatgtgcagcacaacagattttatcatgaggagctcaacgcgcccatacggagaaacaaagaagagcccaaggcccggcccttgagagtaggtgacacggagaagccagagcctgagcggtcccctcctaaccgcaagcgtcctgctaacgagaaggcaactgatgactatcattatgagaagttcaagaaaatgaataggcggtactgagttgtgcagagtgggatgtaaatatcgccttcctctccctatatccctcccatgaaaaatggcttcctggccgggcgtggtggctcctgcctgtaatcccagcactttgggaggccgaggtgggcggatcacctgaggtcgggagtttgagaccagcctgaccaacatggagaaacccagtctctactgaaaatacagaaaagttagccaggcgtggtggcacatgcctgtaatcccagctgctcaggaggctgaggcaggagaattgcttgaacccaaggggcggaggttgtggtgagccgagattgcacctttgtactccagcctgggcaacgagcaaaaaactctgtctcaaagaaaaaaaaaa

SEQ ID NO: 64287 - DNA, 4159 bp, Homo sapiens
ttttttttttttccaaaagtgttcttttagtttctaggtaacatatagttgtataaatactctatttttatatgcacttccacaaaagcgatataattaaaaagtttttttcattagaaataaatgtataaaaataaatatgttattataggcatttattactaactatagtccttcttggaaggaacacccaaaccaatacttataaagtacatgtaatttatagtaacatattttactatatacatatggaaaaaatcatattctcacagaagagctgaacagacattcaccaggatacgactgttggaccagctgctggagatggacctgctacccctcagcagcctccccaccacaagacaagtgatctcaatgtccccaaacctgtgggaccctgttctacacacctcatttttgttccggcgtttcatcctccttgtgtgattgtactgattttcatgagacacaagttacttctttacatccatattcccaaagcagggttacatggtaggaaagaaaggaagttggaggtactaagctcattgtgtctcctctagcttttaccagcatctaatgcttcactgctttttttccattgtagactttaatgcacttgaataaatacatggagttgttttttcctcaaaatgaattacacaaataaagactgagatggtccaaaaaaggaaagaggaagccatttgcgttatttcacgttgctgagcctttctctcatgttgaacaatctgaagttttaattctcggtagaaataatgtataaacattctctgaaaccatagcagccataaacagtgctggtcaaagatcctatttgtactcctttctccccccattgttagtgaggtaaagtaaaacaggtcttagtaaaatctcacttttctcctacttttcatttcccaacccccatgatactaagtatttgataagtaccaggaaacaggggttgtaatagttctaactttttttgacaattgctttgttttttctaaacttgtaatagatgtaacaaaagaaataataataataatgcccggggctttattatgctatatcactgctcagaggttaataatcctcactaactatcctatcaaatttgcaactggcagtttactctgatgattcaactccttttctatctacccccataatcccaccttactgatacacctcactggttactggcaagatacgctggatccctccagccttcttgctttccctgcaccagcccttcctcactttgccttgccctcaaagctaacaccacttaaaccacttaactgcattctgccattgtgcaaaagtctatgaaatgtttaggtttctttaaaggatcacagctctcatgagataacacccctccatcatgggacagacacttcaagcttctttttttgtaacccttcccacaggtcttagaacatgatgaccactcccccagctgccactgggggcagggatggtctgcacaaggtctggtgctggctggcttcacttcctttgcacactcggaagcaggctgtccattaatgtctcggcattctaccagtcttctctgccaacccaattcacatgacttagaacattcgccccactcttcaatgacccatgctgaaaaagtggggatagcattgaaagattccttcttcttctttacgaagtaggtgtatttaattttaggtcgaagggcattgcccacagtaagaacctggatggtcaagggctctttgagagggctaaagctgcgaattctttccaatgccgcagaggagccgctgtacctcaagacaacacctttgtacataatgtcttgctctaaggtggacaaagtgtagtcaccattaagaatatatgtgccatcagcagctttgatggcaagaaagctgccattgttcctggatcccctctggttccgctgtttcacttcgatgttggtggctccagttggaattgtgatgatatcatgatatccaggttttgcactagtaactgatcctgatatttttttacaagtagatccatttcccccgcaaacaccacatttatcaaacttctttttggagtctatgatgcgatcacaaccagcttttacacactgtccttgcacacagacagaggtggaatctgggctacatggagtaccatctacaaccttgggctgcaaaacgaagaagtagccaatgcctttggcttggcagatgagcttgcacctgtcctttggtgagacgccagcgtacttgggaatccattccaccgcaggcccactcccaaaggaagcttttgaaaactcgttgtgtgcttcacattgttcctctctaaaggtttttccattattgtctggacagtcctcaaggttacaggatctgtagcgcactcgtttgccttcacagtacttccctccattctttgggactgggttgtcacattccctcatcgtgtactggactcctccaccgcacgttctcgaacagtctccccaaggcccccacattccccagcttccatgaaaaggcgtatcaaaatgctttctgtcggttttgttcacacacttgccgttgatacaccatttcccttctccacagctggtgccatccgcccacgggaagtgtttggtttgacacaccagcaccccaccagaggtgccggtacaccacaaggtgctacatgtgctggctgcatcagggcagtgtttggagtcctccccaaatgtaaactggcactgccggttggcatcgtacgaggtgccagggagatcgcctgggagctgtatgggattctgaggcttgtccatcaaacattccccatgaccattatccagaaatgatgtaatcatgtaggcactgcaaggagaccaaggctggctgtggtccaggttggaaagcattgacgccatcatgtgggaatcctggttcacaccattaaggctggcacactgctttgcatcatcatgtggcatgttaaacacgtggcctaattcatgggctgtggtgaaggcagcttgtaaaccatcatcttctatgacggagcagcttctgctcggatcacacacagttccaacatcagccatcccaagagtatcacatgtctgggacccacacaagtcctgtctggtgaaaagaattgctgtgtcatagtgctctgcatcccggtcactgggtgggttgtgctgcttctgccagttgcaaaagttccgcagagtgagggcagcattggaggtcacttccggccccttctgttcatcgtggatgaccaagatcttcaccaccaccaggctaactgaattacgaatgctggggtgtttgtacaatctggctgccaccgaaaacaacgtgagaaggtaatgctttagaccactgccgtggaattctgccatcgactggtctgccacaagcatggtttccacatagcggtgactggacacaaatcgcttctttcttatgcttccagttcctgtgggctgtcctacgccttgcagtgccgggtcctgcggcgaccactgaggcccttcgtcctcgccctcagtcccttcgtcctcgtcttcggtctccgctttcccagtcggccggggctcgtcgtccacgaccccgcacgtgccgcctacgtcgccctgccgattccgccgcaggaggtggaactgtagtggtgccggcggcttctcccctggggcggcggtggcgaggcgctcgctggcggcgggcagcggctggatgaaatacgcctcccccagcaggtagaaggcgccgcgcacgccctcgcagaggctgagggcggcagccgagctgggatcgccattcacggtgccggagtagaagcagtgcgccaggtcggtttccggaagcggcgtctcggacccggatttgcgccccacgttctggagcgtgaagccgggcgccaaaaagctgctgtcgggccgcagctccagatccagctgctggtcaaaggcgtgcaggcggaggcgcgtggtcccgtgtcccggggcgcgctccagctccggcaccactagctcctcgtcctcctcggaggggcgcccgagtgcgtccgacacggccagtagcgccgcggcgagcagcagcagcgtgggtacgggcccaaagctccgagaccccggagcccgctccgcgttccccat

SEQ ID NO: 64288 - DNA, 1816 bp, Homo sapiens
  misc_feature (1)...(1816): n = a,t,c or g
tcgtggaattaacattgctgccatcactgaatcagacaagttcttcatcaacggctccaactgggaatgcatcctggggctggcctatgctgagattgccaggcctgacgactccctggagcctttctttgactctctggtaaagcagacccacgttcccaacctcttctccctgcagctttgtggtgctggcttccccctcaaccagtctgaagtgctggcctctgtcggagggagcatgatcattggaggtatcgaccactcgctgtacacaggcagtctctggtatacacccatccggcgggagtggtattatgaggtcatcattgtgcgggtggagatcaatggacaggatctgaaaatggactgcaaggagtacaactatgacaagagcattgtggacagtggcaccaccaaccttcgtttgcccaagaaagtgtttgaagctgcagtcaaatccatcaaggcagcctcctccacggagaagttccctgatggtttctggctaggagagcagctggtgtgctggcaagcaggcaccaccccttggaacattttcccagtcatctcactctacctaatgggtgaggttaccaaccagtccttccgcatcaccatccttccgcagcaatacctgcggccagtggaagatgtggccacgtcccaagacgactgttacaagtttgccatctcacagtcatccacgggcactgttatgggagctgttatcatggagggcttctacgttgtctttgatcgggcccgaaaacgaattggctttgctgtcagcgcttgccatgtgcacgatgagttcaggacggcagcggcggaaggcccttttgtcaccttggacatggaagactgtggctacaacattccacagacagatgagtcaaccctcatgaccatagcctatgtcatggctgccatctgcgccctcttcatgctgccactctgcctcatggtgtgtcagtggcgctgcctccgctgcctgcgccagcagcatgatgactttgctgatgacatctccctgctgaagtgaggaggcccatgggcagaagatagagattcccctggaccacacctccgtggttcactttggtcacaagtaggagacacagatggcacctgtggccagagcacctcaggaccctccccacccaccaaatgcctctgccttgatggagaaggaaaaggctggcaaggtgggttccagggactgtacctgtaggaaacagaaaagagaagaaagaagcactctgctggcgggaatactcttggtcacctcaaatttaagtcgggaaattctgctgcttgaaacttcagccctgaacctttgtccaccattcctttaaattctccaacccaaagtattcttcttttcttagtttcagaagtactggcatcacacgcaggttaccttggcgtgtgtccctgtggtaccctggcagagaagagaccaagcttgtttccctgctggccaaagtcagtaggagaggatgcacagtttgctattttgcttttaggaggacaggggactgttattaaacaaggccttaacattgggtggcaaagatttgccttntttggattttaaaaaaaaaaactagattgactatttatacaaatgggggcggctggaaagaggagaaggagagggagtacaaagacagggaatagtgggatcaaagctagggaaaggcagaaacacaaccactcaccagtccttagtttttggaccttcttctcccaaggttagccttcccttcttcaggaagntggggtgtttgtttttcattgtttttttttttctatt

SEQ ID NO: 64289 - DNA, 742 bp, Homo sapiens
tttttttttggaagttatgaaagaggcttttaatgaaaatactgtacagtttatgtgaggcaaaggcagggggccttgtccaggaagggaagaggcccaagaggcttcctgtccccttgggggcagcagagccaaatgcttgggctcgggcccaagctgcctgccctgcaggggtccagggaggtcctgatgagtcctgccccttcccttccagagggcctgcctggcagccagcagcagggtgtttggggagcacctgttcccacacaagggtccttttagtccattccaacaggtgactccgagcagccctgaaggcttggggagggctcctgcctggcaagtgggcctggcacgagtagagggcagaggcccgccctgggtgaggaacatcatagccaggcgccgccgccgtgcgagtagctgtgctcctggccggcgacgaagccccgcagcagctcggcctcacccccaaacaccaggctctccacatccacctccagctcctcttggtctgagtctgagcgctcagaggagaggcctgaggagtccagactgtccgcccgcagccgctcccgctccgccgcccctgccagcccccggagctgctccagttcattgtgcactgaccgcccgctgtcctgcgcgccaggagcctgggggggtcgcttcttcctcctgtggatggggcctggactgcgatgcgggcacagggacgcataaccatgctcggcctcgtgcc

SEQ ID NO: 64290 - DNA, 1468 bp, Homo sapiens
tttttttttttttgcactcatagttacagtttattacagtgaaaggatacagattaaaatcagcaatgaagaaaggcacataaggtaaggtccaagagaacttccaattatcctctcctggcagagtcttcaggataatgcttaattctcccagcaatgatgtgtggctacaatgatgtgtgcacagagtattaccaaccagagtagctcacccatgcctaggtgtccagggcttttactagggattgatcacattggcatgcttcactgcccacatggctaacttagtctcctcagcttgaccttgcaaggtcaagctgatactgcatggcccaaggcccacaggtaaacaaaaacactcttatcaggcaagatattctaatggcttagaggttatctcccaggagccaggcaggggcctattctttatttggaatgtccagggttcaaacatcccaagttcatcctgtatcacacaaaaggattaacttcaaaagtggtattcttggccaggtgtggtggctcacacctgtaatcccagcaccttgggaggctgaggtgggaggactgcttgagaccaggaattcgacaccagcctgggcaacctagtgagatcccatctctatcgtaatttttctaaaaagtggtattcttaagtcaagttactaccctgattgatgacagggagagagaccaggaaacccctgtgttgtaatcccttaggaaaccttacacctttacttgctttattatcaggtaatttccaggatgtaagccatacagccagaaggcagggtacaaaggagaggaggcagagatggtacactcatacagaagcttctcctgattgtccactgaatagaaggcaagctttccctcctcaaggttcagccagatgcccaccaccccaggtctgtctgagccaaggacagtttccttgaccatgtgccatgcagagagctggctagtccccttccattccacacaacaagagtccatagtccttcccaggacctggtcgcggctcatctcccaggaagccaccccaactgcccagtggctgcaattcctagtgtccacttcccagtaatgctttccagaagacagggcctgggaacataagacctggctggtagaaaacctctcacagctccagcgatagggttgtgggcggtgagacacagtcactgtacgggaatccttggacacctccaggctgcaggaaaggctcttcaagttaaaggttggatggatggcccctcagcaggtttaggaagaggcagttggctatagttggtggccacagcacagatgcagaaatacctcagcaggtttgggaacaggcagttggctgtagttggtggccacagcagagatgctcaaaggttggcgggactctgagtgctcttgggtctagagtctcaacctgctttgcctttgctcgtgccgaattctgcaggcgggcaat

SEQ ID NO: 64291 - DNA, 2144 bp, Homo sapiens
ttttttttttttaaattaaccagatctgtcttttaatagttaccagaatttagatgttaattccccagaggaaaaatgtccatggcacagtttttctggaaaagttcacatgtagacagtgaagcttctgaagttaggcgtcaaattagtagtgacaatcttttttttaatcttgaaagtccctagttttaaagaaagtagaatccatctggggcatgtctgcatcacagggtatcactcaagagtcatcatcaggccaaaaagactctgaagggaaccaggagggtttggcccttgctgtggaaagatgctactgaaagtataagagaacaccctaatgcacgcgtcaggcacgaaaccgtaccatgccccgctaagacatgggaccagagaacacgtcaacgtcaggccgctccaggaaaaccatccacaaagacaacagaagctaacccgaggtcgacactgccatgaagagtgttggctgaaaccgcagttaccagtgtctttactggacgcgaacatccctaaggacacggctgtgctgcttcctaagcatacgtgaccacgatactgtctttccccgggtctccttagcgccatcactgcaccaggcccagcatgcctcaagtcctccagagccttctcctgagacagcactaggggccacgtcagaccccaggctgcagcccttcaccgtgcccgtccccggtccggtctgccctgctggggccggtgggtatcatggggacccctgtgtagacacggacaccggagagcgtgggacaggaggcgtctcagagctccccacccacacactcaagggtcagcgtcactcatgtttccttctgttcccatggtgcctccaaaagggtttccaaacaaagtcatcattgattaccctggagtatgtcaataagccaaacaccagcagccagataccaccaagctagtcaccactttaaaagaagatgagctggagaacgaagcagccctctgatggacccagtcagtgcagtcgggactcagggagacacccggggacccctgcccagctccctgccggaggaaagactagggaagggaagcagaggaggaacgaagggcgccggcagagagagtaacaagtagaaacttcgccgatctgggagcaggccgagaaactctgttgagctgctaaagaattcttcattctcatgtgattttcttcatttctgtcttcccagttactaccaaggagctaaggaaagttcaggaatactttgtttagtgtcgccataacatctccaaccatgcattaagtttaaccaaaagctgcaatattccagattcttaaattctcaatggcaaccaatttatgctcaagttgaaaatctggcaagcaccgtacgccttcagcacacgcgtgggtccggattttcccatcacacacacgctctcccccgtccaaggtgcctgtttacttctggtctgcgcgggctcaggtttcaaagagcttgctgaaggcggcccccacctcggcgatcatgtcggaggtggtggtggagcgaccgtgcttctggaaggcttggtggttgcactgcctggtgagagagcaggcgccaaacgcggccaccaggagagggctggacccatttgttttctgtggtccagcaaggagcgcccagtgtaccaggacgcccagggagcccgacaggaggtccccttgccctccacacctgcggctgctgccttcctggctgcacacaagcacctgctggccgttggagaggatgtcgcgctctcctttctggaccaccgtcacgttgcccagggcttggctgagtcttagcacagatccatggctgtcatcgctgtccatagggcctctgagctatgacaacacaggaagacagagaaaaagcaaagtcttcctcagacacacgacgacagatagccctgtcccatccgccatgagactcatgctctcgtgtctaaagggatcacccaggcacctgttaaaggccatgtaggtgggaggatgcccaggatatcacctgcagtgagtcctccgagcaggtgctgacacggtgcctgctccagtgcccatcctctacctcatcagagcaggctgaaggagggaattccaccacgctggactaaaagaa

SEQ ID NO: 64292 - DNA, 2834 bp, Homo sapiens
ggcacgagagcagcaacgggcagatgtttcacgcccactggttctgcgctgggacagacacagtcctcggggccacgtcggaccctctggagctgttcttggtggatgaatgtgaggacatgcagctttcatatatccacagcaaagtgaaagtcatctacaaagccccctccgaaaactgggccatggagggaggcatggatcccgagtccctgctggagggggacgacgggaagacctacttctaccagctgtggtatgatcaagactacgcgagattcgagtcccctccaaaaacccagccaacagaggacaacaagttcaaattctgtgtgagctgtgcccgtctggctgagatgaggcaaaaagaaatccccagggtcctggagcagctcgaggacctggatagccgggtcctctactactcagccaccaagaacggcatcctgtaccgagttggtgatggtgtgtacctgccccctgaggccttcacgttcaacatcaagctgtccagtcccgtgaaacgcccacggaaggagcccgtggatgaggacctgtacccagagcactaccggaaatactccgactacatcaaaggcagcaacctggatgcccctgagccctaccgaattggccggatcaaagagatcttctgtcccaagaagagcaacggcaggcccaatgagactgacatcaaaatccgggtcaacaagttctacaggcctgagaacacccacaagtccactccagcgagctaccacgcagacatcaacctgctctactggagcgacgaggaggccgtggtggacttcaaggctgtgcagggccgctgcaccgtggagtatggggaggacctgcccgagtgcgtccaggtgtactccatgggcggccccaaccgcttctacttcctcgaggcctataatgcaaagagcaaaagctttgaagatcctcccaaccatgcccgtagccctggaaacaaagggaagggcaagggaaaagggaagggcaagcccaagtcccaagcctgtgagccgagcgagccagagatagagatcaagctgcccaagctgcggaccctggatgtgttttctggctgcggggggttgtcggagggattccaccaagcaggcatctctgacacgctgtgggccatcgagatgtgggaccctgcggcccaggcgttccggctgaacaaccccggctccacagtgttcacagaggactgcaacatcctgctgaagctggtcatggctggggagaccaccaactcccgcggccagcggctgccccagaagggagacgtggagatgctgtgcggcgggccgccctgccagggcttcagcggcatgaaccgcttcaattcgcgcacctactccaagttcaaaaactctctggtggtttccttcctcagctactgcgactactaccggccccggttcttcctcctggagaatgtcaggaactttgtctccttcaagcgctccatggtcctgaagctcaccctccgctgcctggtccgcatgggctatcagtgcaccttcggcgtgctgcaggccggtcagtacggcgtggcccagactaggaggcgggccatcatcctggccgcggcccctggagagaagctccctctgttcccggagccactgcacgtgtttgctccccgggcctgccagctgagcgtggtggtggatgacaagaagtttgtgagcaacataaccaggttgagctcgggtcctttccggaccatcacggtgcgagacacgatgtccgacctgccggaggtgcggaatggagcctcggcactggagatctcctacaacggggagcctcagtcctggttccagaggcagctccggggcgcacagtaccagcccatcctcagggaccacatctgtaaggacatgagtgcattggtggctgcccgcatgcggcacatccccttggccccagggtcagactggcgcgatctgcccaacatcgaggtgcggctctcagacggcaccatggccaggaagctgcggtatacccaccatgacaggaagaacggccgcagcagctctggggccctccgtggggtctgctcctgcgtggaagccggcaaagcctgcgaccccgcagccaggcagttcaacaccctcatcccctggtgcctgccccacaccgggaaccggcacaaccactgggctggcctctatggaaggctcgagtgggacggcttcttcagcacaaccgtcaccaaccccgagcccatgggcaagcagggccgcgtgctccacccagagcagcaccgtgtggtgagcgtgcgggagtgtgcccgctcccagggcttccctgacacctaccggctcttcggcaacatcctggacaagcaccggcaggtgggcaatgccgtgccaccgcccctggccaaagccattggcttggagatcaagctttgtatgttggccaaagcccgagagagtgcctcagctaaaataaaggaggaggaagctgctaaggactagttctgccctcccgtcacccctgtttctggcaccaggaatccccaacatgcactgatgttgtgtttttaacatgtcaatctgtccgttcacatgtgtggtacatggtgtttgtggccttggctgacatgaagctgttgtgtgaggttcgcttatcaactaatgatttagtgatcaaattgtgcagtactttgtgcattctggattttaaaagttttttattatgcattatatcaaatctaccactgtatgagtggaaattaagactttatgtagtttttatatgttgtaatatttcttcaaataaatctctcctataaaccaaaaaaaaaa

SEQ ID NO: 64293 - DNA, 1602 bp, Homo sapiens
ctgcagaagtggagtttggagtatatccaggagatcgctggctgccgaactgtcccagtggaagttggttcgaggtacacagatgaggaatggtcccagaccctcatgacggtcaacgagttcatcagcaaatacatcgtgaatgagccaagggacgtcgggtaccttgctcagcaccagctctttgaccagatcccggagttgaagcaggacatcagcatccccgactactgcagcctgggcgatggggaggaggaggaaatcaccatcaatgcctggtttggtccccagggaaccatctccccactacatcaggatccccagcaaaacttcctagtgcaggtgatggggaggaagtacatccggctgtattccccgcaggagtcaggggctctgtaccctcatgacacgcaccttctccataacacgagccaggttgacgtggagaatcccgacctggaaaagttccccaagtttgccaaggccccattcctgtcctgcatcctgtctcctggagagatcctgttcatcccggtgaaatactggcattacgtgcgggctctggatttgagcttctcggtcagcttctggtggtcgtagccaggataggagctgaaagggcctgacatgcagacagcattcatctgttcactaatttcctgggtcctggaatctatagagacaagcaggactgaacctgtgtcctgaagagccttcactgcccagtggcagccctggggggctgagctccagcactggacaggcacagagcaggggctgcccaggaaggagcacactccaggccaggggtgcatggcagaggaaggtggggagagcccagaaggacattgcagacagacagcctgcatggggactctggcatcagaaagccgaatgtttttgggaaacgggtgggtcacacaggcaggggtgaaacatgggctctgaggttggctacctgattcaaacccggccgcgctgcgcacctgctgggtgacttggccaggatcccccacttcgctgtgcccatatggaaaagagggcaaggccagtcctcactgccgagggccgagaaggcggtgccgagcccctgctgctgcatgaaccttagccgctgtcactgatcccaattactctgatccttttgcccttccttcccataacggcctgctggacgccacagcctgaatactggagagagctgggcattgcccaggtcacaggagagagtccgtagagacctgcgcaggagccgggacccctgctgagcagtgggagctttctgtcatccccatggctcaaggataacctacctgcctgcagagaagtgcgaaggtcttgctggatgacttttcacccgcactcacccaggagcaggctcccaagtgaagaaaccaccaaaccatcaccagctcctagaagcctccctcccaccaccttctagtcaccatcccccagaagtaatgactctcaaacctgggggatttgaggccagggggagagccaggctctatgctttctgtaattgtgtctcgtttgtgtgcacgcaggtttgttttatgttttagccattaagattttccccagccaaaaaaaaaaaaa

SEQ ID NO: 64294 - DNA, 2671 bp, Homo sapiens
cgcacggaaagtttggaggcttagcaaggagggtggtgccggcctccgcccggtggtggcagaactgcctgtgcgagcacggcttccacgtgggctgcgccgccgggcgtcatgtcgggcctaagagacacgctctacagctgtgaaatctgaagttcaggtttgcatttccttactgctttgtcttgaagacagaacgatgccaaagaaagcaaagcctacagggagtgggaaggaagaggggccggctccctgtaagcagatgaagttagaagcagctggggggccttcagctttaaactttgacagtcccagtagtctctttgaaagtttaatctcgcccatcaagacagagacttttttcaaggaattctgggagcagaagccccttctcattcagagagatgaccctgcactggccacatactatgggtccctgttcaagctaacagatctgaagagtctgtgcagccgggggatgtactatggaagagatgtgaatgtctgccggtgtgtcaatgggaagaagaaggttttaaataaagatggcaaagcacactttcttcagctgagaaaagattttgatcagaaaagggcaacgattcagtttcaccaacctcagagatttaaggatgagctttggaggatccaggagaagctggaatgttactttggctccttggttggctcgaatgtgtacataactcccgcaggatctcagggcctgccgccccattatgatgatgtcgaggttttcatcctgcagctggagggagagaaacactggcgcctctaccaccccactgtgcccctggcacgagagtacagcgtggaggccgaggaaaggatcggcaggccggtgcatgagtttatgctgaagccgggtgatttgttgtactttcccagaggaaccattcatcaagcggacactcctgcggggctggcccactcgactcacgtgaccatcagcacctaccagaacaattcatggggagatttccttttggataccatctcggggcttgtatttgatactgcaaaggaagacgtggagttacggaccggcataccccggcagctgctcctgcaggtggaatccacaactgttgctacaagacgattaagtggcttcctgaggacacttgcagaccggctggagggcaccaaagaactgctttcctcagacatgaagaaggattttattatgcacagactccccccttactctgcgggagatggggcagagctgtcaacaccaggtggaaagttaccgaggctggacagtgtagtgagactgcagtttaaagaccacattgtcctcacagtactgccggatcaagatcaatctgatgaaactcaagaaaagatggtgtacatctatcattccttaaagaatagtagagagacacacatgatgggaaatgaggaggaaacagagtttcatggacttcgcttccctttgtcacatttggatgcactgaagcaaatttggaatagtccagctatttctgtcaaggacctgaaacttactacagatgaggaaaaggaaagcctggtattatccctctggacagaatgtttaattcaagtagtctagtgcctttgcagaatcaaatgcctactattttatatgcatatattaaaagaaaagcaaagacctgagccgaggagaggatgaattcaagtttccttacctgcgtatctactaacaaacatgagacctccctgttacaggtggtcagttggccaaatgtactaacgggcacatgaaagaaagaacagcaaattaccaagtgtctcagaaaatgacaaaaccatattttgacaagtttatttaatccagtgtggtagaaaaggcacaattccaatgtatcatttagaattgaatgtcattaacctggctttgttctttggaagaaacaacttctttaaagagcttctttggctctagaaaaatttcaaacaattaaaataagaaaaaattttaaactggttttttataatgaaaatatacatacctttgtgtatagacaagcccatgcccattaaaataaagttatcctgtaacataaattttattaaataatacttccccacagatgagaggcacgcaacacctatggacaaaagggagttacagaggctgcttaaaagatggagaaaagcctgagattgaaggaggaaaaaaacccagtatttaaagtctataaaaaatactcaaaatagtggggtcctccgagtttaaaatagtccattggttatttttacattctaaagtgccatgtaggttgatattttttaaaatatcattggagaatttaatcctttcctttataaaaatagagcatttttcctgcctttcctggcaaaagttggggataaaaggaaaaaaagttgtcaaaatgtaattttcagtcccaattcacccaggaaaacatgcttgtgaattgtgcagtaaaaggtggtaatgactactggaagctaagtcaaagggtgatttcccacctgaattttacttacttaaataaaagttacttacaatgggagtgaaaaactgaggtttctgttatttagtagagaaatcaactccacgtttacttaaagagatggtaaggtcaaggttcaaatgctactgtgttttaatttggatatttgaaatttctcttgaggc

SEQ ID NO: 64295 - DNA, 1841 bp, Homo sapiens
ggagtacacctgcggtactccttccggaattcacgggtcgacgatttcgtgcgaagaaatcattgtttaatgccccgcacattttatatttgtgacgactagacaatttctctggtttcttggttgaggtgaccaaggaagaaaggcacattgttaaacctctctatgatagatacaggcttgtaaaacaaatgctgacaagagctagcatcactcctgtccttggatctccatccaccaagcgaaggggtcagatgttacagccaatcatagaaggagaaactgcacatttttttgaagaaatcaaggaggaagaagaagatggtgttaatctgtcctctgagttaggtgatatgttgaaaactgcagtacaggtacagtcttcattaaaaaactctgaatctgatgttgaagaaaatcaagaaaaactggctctggatctccgattgtcaagttctcgagcagcttctatgcctgaattattggaacaactttggaaagccagagctgaaaaaaagaaactacgcaaaacgttgcgggaatttgaagaagcattttatcaacaaaatggaaggaatgcccagaaagaggatcgtgttccagtgcttgaggagtacagagagtacaagaaaattaaagccaagcttaggcttcttgaagttcttataagcaaacaagattcttcaaaatccatataagatacgttccttgaaaattcatatcataaagtcagttgtattccttgaagctatcatcgtgtgtacttggctggtacttaaattcgttttgtcaggcactcagagaatctcattttgtacttggttgtggtgccactaaacaaaacaaatgatgggagagtaagtaggccctctcaagggagcgtaagtgatgttccatattaaccacagactgtcctctccacctttagcaaacatatggtttacttcattgttttgtactacagatacatccttttagcaaaagactggaattttatcctttcaacttcaagaactttggaaatgcaagctttttgttattaccaactttttgtttctcattactgaagaaaattggaggaaaatcttcatactgaattcttctgttgcctttttcttacagaatgactgaaaatttgaaagaaaagcctataaaagggcacatacgcaactgtgttctctgttttcctagaaaaccaaaatcaaactgagatttcaagtcgtactatggaacacctttctgtttaattcccaaagtgacatcttctcacaggtagtatgttagtaaaattttgcaattcgctggtcacacagctcccggatgaagataacagttggtagaccaaaaggtgacctcgcttagtatattgaaaacacacaccacacatcacacacagaactgaatcataccacgtgctgcctatgggacttcagttactgtttcctgagttactgtttatccgctggcaatggtgtgatttgtctggatcagatccgtgctattccccaacccacctccagataatgtgagaaaatagccatgtcagtatgtaggaactctgatggtgctcagatttgtgtgttcaatcaatgggcttaaatcagcaaaatattatgcctaaagtaaatctgttcttaacaagggctctaccactgcattttcacatgtaccttcagggggttatctttttttttttcccctcctattttaatcagcaaaatccttaccaaaacaacgacaacaacgcctttttaaggaaccacccttggtgcaatattaacatgctgttaaaagcacttgtttacaggatgggtaaggggttgcccctggttttatacttt

SEQ ID NO: 64296 - DNA, 1307 bp, Homo sapiens
ttttttttttttaaaaagccatttattttaaaaaactggtttgtcaaatcacatacatgagcagatacacaactaccaaagtggcctgtaatagacaccagtggggcggtcaccacacagtacctgaaaaatacagctaaaaaaggaggagtctgttgagtatttaatttcagatctacttgactccttgttgaatggctttaagttagcatatagtgagtgagaggtagagtcccaagtataatagctgatgcctcagggctccatttaaaaacaaaacaaaaacaaaaccatttctccctctgcacaagggaagcctatcctattttttttttcctttgcgaaaacagaagccaagtttctcttctcaaatggttcagcattcccaatcaaaaagtggtgtgtggtaacctaggtattgtgcttgttgagccatttaattttcctcaccttccgattcggattcttcttctgcattttgtaaccactcaacaaatttcttcatctggtcaagaaaaacacttttgcctttagcaacatgtgcttccttataccatttcagtattgcttcttcgctcagaacatcagctttataaaagagaaccacaatcttctgaaaggctttcatgaaatggatgttgtcgtagcagtattcctgaaccttctggaggaggatcagctctgactggccttgggagctgaacacggccagcaggggagcatattgcttcaggtgcttcagagcctgctctgcaacaagttcttccttcttgttccactcaacagcgttcattatacatgtccacagaagaccaatcactgctgtttctggaagatcattcctcttcatttcttctttgacataaagcaccacctccttgatcgggcattcctgagaaagacgctcctggagctccttctgcagttccttcctggtgcccagggactgctggactcggaggaagtcggaaagctccttaagacctgcgtcagtgaagtatttagcaaaatgatccacactctgtctgttaactggaaagagttcaagcagcctcttgtctaagttggcttttctcaaagacgaggtaacagagttggcatctttttctgccatccatgctttgaaaagcttgacagcaaatgaggccgcaatgcctgttgaaaaacaaaagagaatttcattccttttacgagcaaaaccaattgtgatggtgtgcaaagcaaccaggtttcctgaaatgtgtaaataactaaaagactaattttggtacaaatgaaaagtcaatagacctctaggcaaattctcc

SEQ ID NO: 64297 - DNA, 2550 bp, Homo sapiens
agtctacatcggctccttctggtcccaccccctcctcatccctgacaaccggaagctctttgaggctgaggaacaggacctattcagggacatccagagtctgccccgaaatgctgccctgcgcaagctcaacgacctcatcaaaagggccaggctggccaaggtccacgcctacatcatcagctctctgaagaaggagatgccctcggtgttcgggaaggacaacaagaagaaggagctggtcaacaacctggccgagatctatggccggatcgagcgggagcaccagatctcacctggggacttccccaatctgaagaggatgcaggaccagctgcaggcccaggactttagcaagttccagccgctgaagagcaagctgctggaggtagtggacgacatgctggcccatgacattgcccagctcatggtgctagtgcgccaggaggagtcacagcggcccatccagatggtgaagggcggagcgttcgagggcaccctgcacggcccctttgggcatggctatggggagggggctggagaaggtatcgatgatgctgagtgggtggtggccagggacaagcccatgtacgacgagatcttctacaccctgtcaccggtggatggcaagatcacaggcgctaatgccaagaaggagatggtgcgctccaagctgcccaacagtgtgctgggcaagatctggaagctggccgacattgacaaggatggcatgctggacgacgacgagtttgcactggccaaccacctcatcaaagtcaagctggaggggcacgagctgcccaacgagctgcctgcccacctcctgcccccgtccaagaggaaagttgccgagtgatggggtggggggacattcagacgggcagtgttagaggaggagatgggagcggtgactacacacacacacacacacacacacacacacacacaaacatgcacacacacatatgcatatcttgacattgctctgtaggagagagaggaccatgacgcccacgtttgcagctgatacttgtttgggcacacctccaagttctcgggattagaaggacaagagcactcccaggccccagagtctaagcctaagtctctatcgctcttcccctctcctcggccactccccagataccagacctgaggcaattcacttgccagcacagatggccaacccacctccagattccccagtgcttccacacccgggctctgagcaaatggaaaagacttttcatttagtagacaattcacttctttttctgtgcttcccctatctgctttggcttcctaataagaaatccattcaagagctaggagatctgagggcaggcgggcagctgcagggaggagaggtgagaaaggaagcgtcttctagagacattggcccaggagctctgttctttcctaatctaagcctctgtcttcttcggcaaaccttgctttgaactctgccagtatttcattttaaagaatcccagagcgggagagagaagagaaaaaaattgataagagtgaggaaattgtcctgtagtctattgaaaaccagtcaaggtggttttagttcatagattttgttagatgttctttccacctggcctatgatgtttagatgttcatacttgactcacatttacccagcccctcctgcgtaccaggagctgtgttaggcactttatatacattattctatgtggccctcactgatgccccagggaagtatgcattagccttcccattttgcagttgaggaggctgagtagcctcagaagggtttaggcgaccttctgaaactcacagaagtcacgtgatggagagaggattcaaagccagggcctcagaccctcacacacttgtctgtgctatgatgtatgcaggatcccagcattgatacccaatgacaaactatggagaacaagcaaagtatgcaggccccctgcagcctcccaggacaggctggcaagggaggagggccggccagcatttggtgggccatcagtctggccatctgtcacgtcacagaagcaaaccgtgccttctggctctgcgccccatattcccagcatcatagacatccaacagcaccagcaggagagtgggctagcctgctggatgctgttcgtgcctgtccctgctctgcctcccacccagttgcctgaatcatcccagctcagatgcagccactgtctcttgtcaagtgggacctcatactattctcagaaggctaacttgagaggtttggggccttgttccccagagggtccccagggactctgcagtgtccttggcaaatccccactgtactcaatgccctacattctcttctgtggtctctcccctggcttgcttcatggccactgaaccaatcactttgtatgctatgctcctactgtgatggaaaacaaaatgagtataacttattttatatccatattcagactatatagagaatattctatgcatctatgacgtgcttactactgcagtgcatttgtcattagtcttcatgttaatacagtacatttattaaattggtaa

SEQ ID NO: 64298 - DNA, 789 bp, Homo sapiens
tttagcagtctggatactgtatttctaatacatttactctgacattcttttgaggaatacatggagaactgacaattggttatgttagtttacatgttcccttgttcttattacattaaacgtatctgtaagaagggtttgcttagcatccccagaaaaaaaaaaaaagtgttcacattctttaggtctgacccgtggtaaggagagggaggattagagaacatctactactgaccatatggaagttttggatgatataaattcagagattcagaccagctgaatcaaattaaaatgtacatgtaaaaaatgtgttagataatgggaggcaggacagagagagagccaggtgagtggggagtcacgctgaggcaggacacagaggcaatcagactagcatgtggcgtttcctatggagggcaagatggtcagaacgggagaagctgcggtcacagtccgggcactggaaaggtttgattccagtatgttttcggaaatgtcttgttagttcatcagaccgagcaaacttccatgtgcacccttcccatgtacatttgtagggtttttctcctgtgtgtgttcttctgtgtgctttcaagtgggagcttttagtgtacactttgttgcatccatcataatcacatctgtgtatcctccgcttcctttgagtatccggggattccacaggtaaaggtctcttcccaggctgcacgatgaccgaagggtgattctcttgcaacaatgcttgcgggggggacactgagttcattaaggggggtgacatttctc

SEQ ID NO: 64299 - DNA, 648 bp, Homo sapiens
tggaactgaacagtctattcaacaacaaattgactgacggctgtgcacactccatggctaagctccttgcatgcaggcagaacttcttggcattgaggctggggaataactacatcactgccgcgggagcccaagtgctggccgaggggctccgaggcaacacctccttgcagttcctgggattctggggcaacagagtgggtgacgagggggcccaggccctggctgaagccttgggtgatcaccagagcttgaggtggctcagcctggtggggaacaacattggcagtgtgggtgcccaagccttggcactgatgctggcaaagaacgtcatgctagaagaactctgcctggaggagaaccatctccaggatgaaggtgtatgttctctcgcagaaggactgaagaaaaattcaagtttgaaaatcctgaagttgtccaataactgcatcacctacctaggggcagaagccctcctgcaggcccttgaaaggaatgacaccatcctggaagtctggctccgagggaacactttctctctagaggaggttgacaagctcggctgcagggacaccagactcttgctttgaagtctccgggaggatgttcgtctcagtttgtttgtgagcaggctgtgagtttgggccc

SEQ ID NO: 64300 - DNA, 1071 bp, Homo sapiens
  misc_feature (1)...(1071): n = a,t,c or g
ttttttttttttgcaaattagaattcttttaatataaaaaaaagtactaaaatacccacgtggttctgctgtgttatttgccctaaaggaagtgaggggcagagtgaagaatcccagtgcagctcagtgggcccagaaatgggcctttccgtaggataaggcgtgcccactccacctccaccagacttctatcccctctgctgttcccagcccccaattcctgcagcaggaaaccccagtggtctggctttggcactgggagtagaaggcacctgaagggctggctgggtgagtgaggacaggtgacctttaaaaacaaaacgacaccgtggggtggggaagcaggtcatgcagctgtggcagctggcagggcccactcctccatggcacaggtgggcatgggatggccacttctccagaagtgaggaagcccagatcccaacagaatactttctcaaaattgtttttggtacaaaataaatggaaagaagatatggggtggggtgctgtggaggccgggccagccaccctccccagaccttagatcatagcgatgctctcgggggcacagttgaggtgggtggaggtgctgctgctcccggaggacttgcaggcccggccaggggtaggctgcagtgcagccaccagtgtgtctgaggagactgccccaaactcgtagctgaaggtgccatagaaaatgaggatatcgatgacacacacccactcacacagggctgccccatgttgcagctgagaactctcatggacaaagaagactccactgaggaccagggtgataaaggcgatgacagccagcacacttcgcagataggccacagccaggtccagcggggcggtggccccttggtaggagagagcacagtgcaggcaaacaaagagcagccccgcagggaaggccacgccagctccaacgtagtgcagagacctggcatgatccacctgaaagttgccaaccaccaagaggcccgcagcgttggtgcagcctgtgatagtccnnnnnnttngcggccgtactgcaaaatgggttttcatttggggggaaccgctacg

SEQ ID NO: 64301 - DNA, 1349 bp, Homo sapiens
cggttcggggctgtaccggggacccacgccaggtggccagtgcatctggaaacccaactcaatgccccccgaccatgagcgaaacttcggcttcacccagtttgccttggagctgaatgagctgacagcagagctgaaacggtcgctgccttccaccgacacgagactccggccagaccagaggtacctggaggaggggaacatacaggccgctgaggcccagaagagaaggatcgagcagctgcagcgagacaggcgcaaagtcatggaggaaaacaacatcgtacaccaggctcgcttcttcaggcggcagacggatagcagcgggaaagagtggtgggtgaccaacaatacctactggaggctgcgggccgagccaggctacgggaacatggatggggccgtgctctggtagccctggccccgggggcaggaggctctggttcctcactcctcctgcctccaccccctaccatggacacatgggtgaggccgggctccccgcctcactgcccttgagaccaaaggggcagccctggccctccctcccctctgctggccagagggtctgcatctcagcccacccccaaccccaccgtttggggtgagaagcagaatctgtgcttccccagtctccttgccccagacaaccagcatgtaagacccttcccgcttcaccattccgattcctgtcccctttggggtacttgggggagactctggctcccaggatctgttccctatttcagtgccttcctaggacacaggggactccttgacgctccccaggctttctgtgcccaggcctctgtccccagcggtgaggttgcagtgagtgaaggagaggaggtgatctgttctccctccccttctgcccatctccagcatcttcttccccttccctggccctgcagggccttctccagctccctttggttagtccctggccatccctcctgtcctggatcccttctccctaactgcaaaatgcctgcagcttccagctccttcgtccctgatcctcaagcggttccctcccgtctcagctcagcggatcccccagagtggaggaggcctctccatgaggaggggagcagcccaaggcacctgtcctctgacccaccggcagcgagtgcgcaggtgtgagtgtaagttcatgtaggagagtgtatgcgtgtgcgcctgtgccctgcttgcaggcaagcagggctccctcatgtagcccggccttccccctgctgggggtccaccacatcgctgctctttctcacagtctgcctctgatgagggcgaattgctatgacattccaagctccaataaagactgtcccagactttgaaaaaaaaaa

SEQ ID NO: 64302 - DNA, 1021 bp, Homo sapiens
ttttttttttttttaaaggtacaaatttattaaaactttgcagttaacaattattgaagaaattagtatgttaactataaaaacctagaagtcccaggaattagatttcaaaggatttggtttcaaagaattccttataagtgattttaaccattacattctttgttaaactgggactttttctactttggggattattttgccccagctgtggccatgtttaaaattagtcaggcaggcacatgaagttgtgggagagatgatgaggttcgcactcttatccaagttttagcaaataggcactgtatttcccatttaatgggaatgcagtttcttctgcggttctttggcataaagaggctctagactccccatttctttcactcaaggaagagccatttgcattcttgtcctcacacctgagtacttgtcacaagttaaaacactggccaaatcaccacctcaggactccttgtatgcattcagataaaaacgtctggggtgggggaaggtgctttccctcagttcttgttctcacacatctgtcatttagttggtcacagttgggcaggtagaagcgggttaaaagttttaaaactcataataatcgtgtccagagataaatgaaggctgttgttaacaagcatgacagaaaagcctggaccagctgttttctccaaaaagccagtggaaagggggtcctgaagaagtgacaaaagccatcccagccgccctgagcctgcagccaggcgcggtgctgccccatgagccgcgagctcagcaaggccaccaggcgctggcagtcccgggcgacgtcgccctcctgctcctttagccgcggctggaagccccacttcttccaccgggcggtcaccagcggccctctctccagcagcgtccctgcgaaggtcacgagcgtcaccactaagccccaggtggggccggggctgtcggagagcacggaatccgccatcagcgccaccagctcgaagcggttcccggggtagccgaggtaggcgga

SEQ ID NO: 64303 - DNA, 1283 bp, Homo sapiens
acagaggcaacggctaggggagcggaggttcaagccacatgtctgcgtcctcgggggccagagcccgccagccctcgcggatcccggctcgcggccagcccgagcggctcgggttttaaaaatcaatttgattggccacaggaaacgtattttggcatctctgggagacaggctgcacgacgatcccccacagaagccccctcggtccatcaccctcaggacaggagactggggagaaccttccattaccttgcgacctccgaatgaagccacagcctctaccccggtacagtactggcagcatcacccagaaaagcttatcttccagtcgtgtgattacaaagctttttatttaggttctatgctgataaaagagcttagggggacagaatcaacccaagatgcttgtgcaaaaatgcgggctaactgtcagaagtctacagagcaaatgaagaaggtccctactattattctttctgtctcatataaaggagtcaaatttattgatgcaacaaataagaacataattgctgagcatgaaattcgtaatatctcctgtgctgcccaggacccagaagacctctcaacatttgcctatatcacaaaagatttgaagtctaatcaccactactgtcatgtgtttactgcctttgatgtgaatttagcctatgaaatcatcctaaccctgggacaggcattcgaagtcgcttaccagctagcactacaagcaagaaaagggggacactcctccacacttccagaaagctttgaaaacaaaccctccaaacccatccccaagccccgcgttagcattcgcaagtccgtgcagatcgacccatctgagcaaaagactctggccaatctaccgtggattgtggagccgggccaagaagccaagaggggcattaataccaagtatgaaaccacgattttctgatactcgccgtcctcctgtcctcgcggtgccttgctcgccaagcggtcccggagcaggctttccttcgcgcctccgcgtccacccagcccaggaggaagactgctctgagcgtgcggccttgttacgggcgaaaggccactggccattcctggggaagttctttctgcaccagtgatggaaaacgcaagactttccagtcgcaacccctgagaggcgtgagttgagatgggttttccctgatgctcccgactcccctccccaccacctaccaaggtatttctgatgactccgccccagtacttgctttgcttcatttggggaaaataataccttttctttaaaaaaa

SEQ ID NO: 64304 - DNA, 972 bp, Homo sapiens
cgctctctcctgagcataaactcctcaccacattcaccttggtacccactgctgcttacatggctcctgctccgtgggaacgtcccgcagatgttttcctaaccaaggtgctttcccgttgcagatcgtggcaggttgatcggcggcttgcctgacgtggtgaccatcatggaagggaagaccttgaatctgacctgcacggtgtttggaaaccctgaccccgaagtgatttggttcaagaacgaccaggacatccagctcagcgagcacttctcggtgaaggtggagcaggccaagtacgtcagcatgaccatcaaaggcgtgacctccgaggactcgggcaagtacagcatcaacatcaagaataagtatggcggggagaagatcgacgtgacagtgagcgtgtacaaacacggggagaagatcccggacatggccccgccccagcaagccaagcccaagctcatccccgcgtctgcctcagcggcaggccagtgaaggcgttttcctagcctggagatgggaaaatatgcttggcagagacaggaatgctgtgtgcttgttccaaatgagcagctggcatccgagtggtgtcctgtgtgggctgatagttgatcacacattgtgcttttgatttttgcatttggtgatgaatattttatacccgtctaagggagaaagctaatgttttccacaagactgaacaacgtgtatttacacgagggtagacggcagatgcctgacagagagtgggttggcagacaacacactagcattttcacgggtgtgggcacatgggtgtggcacctggacgtgtgcagcatgtggcggtctgtgtgaagccaccgtgcttctctttggggggccgcgagatctagcatctctgaaatcctggctgtcgaggctttgaagcatgtgttacctggttaagcttgttttctcttgctttaggcaaataaaagtttaaaaatc

SEQ ID NO: 64305 - DNA, 2002 bp, Homo sapiens
gtcgacaaagccttccatgacctcgttagagtaattaggcaacagattccggaaaaaagccagaagaagaagaagaaaaccaaatggcggggagaccgggccacaggcacccacaaactgcaatgtgtgatcttgtgacaggcctgaggccctgggcacagtgacggtggcctggccagccctcgggacccctccccacctaactgcactgaaaccatttctaaccacaacccttggcccaaggacttggtacaggaagggagaagggcaggtgggcagggagcagacagggtctggctttgcccagagggcacgggctttcccacctctcaaagagacaaggaagccacctgtaagcagaagcagcatccaagtgcccctggcccccccatgtgttgattcaacccggttcctccccctctctcggtgggtgtgttgtttattgtaactacatagtgttggtttgatgtggaagtgtttatccacatacaaagtacaaaacaagccatgaacaagcttctttcccttaccccccatccacaatgtctgagcttgggatgtcttttatagatttttaaattattttagtgattattattttattaaaggggtctgggctcactgcctggtgaagtttcaagtgttcagcagacctctctggtaacatatctggaatattgttgttgttttttaaccgagttttcccatcagtgccaaaagtctactcaatctgaaagtagagtgtctgagaggacagaaggtaatgggaactgtagctggaggcctcaggccatgggtcaaacctgggagggaaagagaccctacacatggcctagaaatgagagaagagagaggtatttacccagaggattttcctatggttggggatgcaaatattagaaaacagattgtattttgctgaggggagtggctgtcatgagcatgtcagttctaaaaggggttttcattatcctggaaatgtataaactaaagtaagctgattggctttgcaaacatgttcatttgtttttcagacagtatgggttaagttctctgccctccccaggggtctgaggaggctctgggtttctcagatctgtctcttgctgcgttttcacatcagctgtgctgcttggtgcctctctgatacgaatacactgacacgtcaaagtaacctaatgtggacaccatccagaaaactccagttcatgctggatcttaaccaaaaatgattcaatactgttatcactaaaacagcaccaagacctgaagccatcttcccttggagtcaactgactaccacctctataagcctagtcaatgagcagaccccttccagtatttgtaaaagtagtactaggttgcctttttggcaatttttattgacctgttgaatcttgactataaaatgatctgagaagtaaggaaggctgggctgatgtgtggctctcatataccttctgcaagggggcagtctccccagctccctgatgatgctcacccccgcccccccacctcaggtgctgctggtgtgagccaaagactggagtttttccagctggggtgggagtggagagacaacaggaacaacgctgcaccaaagaaaaggtcagaataaaaggcagcacagctggtgaccttattttctagatgttacaaatcaggtcactatgcaaactagaatatcctcagcaggtggcctggccactctggagaaagaaacccaaggaaagtgagcacccaactggatgccaagacacccgggttctgaaaatgtgctgtgttcctacctcggcaagatcaccagcactgaggggcccagctggagaatgattctgctacaaaaggagacagttgagacttttgcttgttggaaatcaaacttcttatttgtctaaattgcccctttttctgttcctaaaaggaaggataagagagaacattccaggtgaggcacttcaaagtttccttagaccctatagtgttaagaggtattttaaac

SEQ ID NO: 64306 - DNA, 1057 bp, Homo sapiens
tcgtgtggtggaattcacggcatcctgcccccactgcgcacagaggccacagagtccgactcagacagcgacggtacgggtgactccagctatgccagagtggtggggtcggacgccgtggactctgcacagtcctctgccctctgtccgtctcttgcagtggtggggtcagatgctgtggactctgggacctgcagctctgcctttgctggctgggaggtgcacacgcgaggtataggctccagactcctcaccaagatgggctatgagtttggcaagggtttgggccgacacgcggaaggccgggtggagcccatccatgctgtggtgttgcctcgagggaagtcgctggaccagtgtgtggagaccctgcagaagcagaccagggttggcaaggctggcaccaacaagccccccaggtgccggggaagaggggccaggcctgggggccgcccagctcctcggaatgtgtttgacttcctcaatgaaaagctgcaaggtcaggctcctggggccctagaagccggggcggccccagcggggaggaggagcaaggacatgtaccatgccagcaagagtgccaagcgggccctgagcctgcggctcttccagactgaggagaagatcgagcgaacccagcgggacatcaggagcatccaggaggctctcgcccgcaacgctggccggcatagcgtggcgtcagcccagctgcaggagaagctggcaggagcccagcgccagctggggcagctccgggctcaggaagccggcctgcagcaggagcagaggaaggcagacacccacaagaagatgactgagttctagagaccccacaagcactatggacgaagcgtgggaccccagcacgggctgccctcaggaagaccagtgttgcccgaggaggggccggcctgctggcctggggcgtgcggacactgctgagtggagacagagctgcggggtcccatctggacacttacttgcccacctgccagtgtcttgggcatttccttggcaaggacattaaagtgatttcatcacagtgtcaaaaaaaaaa

SEQ ID NO: 64307 - DNA, 4061 bp, Homo sapiens
ttttttttttttagggggttaaatgtttattaaatcaagcttttaaattatatatccacctacagtctataaacaaatatagtacacatgtatgtaaaaggctagcagataagaaccagtggaaaaactaaagttccctttgcacaccggcacctcatcacaacaccctcttggtgtggatgccatggggccatgctgtagtcaaaagttaaatgaaaaaccacaagtttagtttgactccgtctcctagggtggatttcattcagatatttgttccatattataggagggtggatcctagcaaggcaacagtgtagtttttacattcacagattggctgaagtagtacaaattgagctgctaatctaggtgtctccctccctgttaccatacttcataagaaatgtgaattaaaatgaacaatggaccacaggtggttataaaaatagataactcgcagagtcataaatatctacagttagtagagcagaaacttctaaaatttacctttttccataatgtgcagaatatcctaagtatgttcaagagacacagtcagcagacttcagagtggtaattacaagggcatttgtaaagaaataacactcgagtacaaacccagagtaagaagctgaatgcagatgaaaatacgcaaaacacgcaaagttccaactcctcacatctcattatgctacttactagacaccacaattagcttacagccctttatatatcttttaaagtaactttttgttacctgtgtacaaactttaacaaagatttttcatgagacaagcaaagtgggttaatggtggcgctaaaactgctgaaacttggagtgttttgtgtgctttcgtatacttctgtgtatggggctttaaaatgctccaaaaatgttttggatagagtttttaaaattcccatgaaaatctattttataatcatttcaaggtatagaaaaaaagaaatcctaaactggcattgagggacaggcccaaatctcacaaagtaacttaaattctaggaatatataaattacattcatatgttcatttaacacgtatcaagtgctatgtaaggtaactgtaatggattctgaagccaatctcatttaaaacagtacagtaaatcccattctaattctacaattaaagcacttattccaggtaatgtgcgtttcagcaaagctgacatcttgtacaacagtgtcaccttaaagcttcatcaaagattcacagcaggcctgaactgtaaaagttcagaaccaacaatgccacaggtagttattcatcctaatttctcgcagggagtgaagggtctacttgagtgatcctaaggtcacctaagcctagaacagtgttccctgaaaactccagcaagtttcctcaccaaaatctcttcagtgtaatgtgtttgggacttgctaggctagaaaaatgggttccactgatgtataaacatacattcgacaccttcaagaggtgtacagacatagtgtttcccagactcacttgacctttccagggaacacctggaataatcactggctcttgggacagtcatttcctagggaacacaattagaggaatgccaagttaaagcagattttctaaagtagtggttcacatattgtagtaagcatcagaaacacagatgccacaccccttcagaagtccagggtgggacctgggaacctgcatttctgagaccgccccttcccccacccccccacaagtgaagctgatgctgctgcaccgaagaccgcccttggagtggcacttgttgagaggatggcctgcatagatctcagctgcaggaagccctcctatggcctcaggaaaggctgcacatggcatttgcacaaccaatgagtcggaggtcaaatcagcccagtgacttctcagagggtccatgcaaccttggcactgacacttgaactcctggctctgtacccctgcctcacttaggtgacccaggaggagtgactgcatcttaacaagaggacttaacagtagccccttgcaccccccagtggatcttgtgatgtttaagataaatgtttgctaaaaaatgcactaactagcctaaagcatcatacaagtgtctgttaatcagaagaatgtgccagccacagcaggaaaatcccagatgaattttctgtcttgttacctctgagccttgacgaaggcatattctgacaactaacgaagagaaaagaggctaaaaatgcagacaactgcagtgagggggaaatacatgagtggattatctaattaaaaatgcctgattgttaaaaaaacaaaggtcagcccacaatcaaagtagttaattatgctggctttgagatagtgtttaaaagttaaatatgttgatctttgaacacactcactcctccactctaccatgttaatgctggttaaaatttaacactagaaaaatgagaaaaaaaatcctccactcaaatacatatgaattacacctaaaatatttggctgagatcgttccaatcttataagctacgattgtgtggaaatttcataagcaattttgaaaaaaagacatcaaattttggctcatagaaacatccacagaatgaggaataaacccaccattcacatgtttgcatgtgtgtttagttaatggcccagtaccactttggctaatgaactgcctctcacaattacaaaaacgaacctgtaaaaattcatacatatccgtgatgagattacagtcaaacatcatgttgccaagtcctggtttccaccgtgaacccaaaagattgatcagaaaggcagaacttcccccaacacgttgcatgattcactttatgtatgctctggatggctctgaagacaagacaacatctcttgaactggtctgctttcgtagcagatctgatacactgcagtaaacaatggaaacttgtccagtagtcccttctgtttgaggatgcggtacacttcagcagaagtctgcggtccttggagcttttgcccattcagcatctccttctccaactcttcaatggtcttcccagttctggcgaaggcctcggccaccctgcggttccgccctccgtaacaggtggtgatcaggtcggccaccccgcagctctctaggaaggtggctgtagacacttggcctttgcagaagatcctggcaaaagcaatcatttccatgagtcccaggcggatgacggccgctttggtgttgtctccacagcggaggccgtcgcagaacccagctcccacagctacgatgttcttaagcgcaccacagagttcaacagtgtctgcatcatcaaccacggtaattcgaaaatttggagtctgcagaagttctttgaagagaaggccgttctccattactttgctgccgatggtggtctcacagaacttctctgcagccacctcattggcaatgttggctcccatcagcacactgatgtcaatacccatcttctcacggatgatgtcagaaatgagcttcagcccctcggggccctcgtctatgcccttgatgagggtgattcccagcgctttcttgggcactctcccagtgatctcatcacagattctgtgaatgaactggtggggaatgacaaacaccagcaggtctgcatcctgcacagcctcgctaagatttgacatggcaaccacattttctggcagcttgtgtccaggaagatattttacattttcatggtcattatttatgatgtctgtcagttttctgccattcactgtttcttcaaagacccacatcttgactgtggaggcaaatttctgaagtttcttgacgttattaccaattatttttgcaacagctgaaccccagttccccgagcccacgatgcacactttcaggggcgccgctgccatggccgggccgaatgtagccgcctggaccgtgcttccctggccggctgcccacctccgcctgttcagccttgcccgcagcggctggcggcggccccgcccctttcgcctctccgccaatggtcgcggccacccccgcccggcgccgggggccgcagctgacagcggggcaggacccgcttc

SEQ ID NO: 64308 - DNA, 4741 bp, Homo sapiens
  misc_feature (1)...(4741): n = a,t,c or g
ttttttttttttaaagtttatagaaattctttattattagacaaaaatagactctcttttttcccctattcatgtgatcctactctgaatctctgctcagaggaggcagtgactcgctccccacccctctcccatccctgccgtgctggcacctgcagctgggtggaactggcaggggctgatcccctggagggctgacgttctcctgcaggtggggctgcctgatctccttcggggctcaactgctgatgcctcctcacccctcacacacccatctctgccatctgctcacatgcaaggtcatcttgtgggcctgtccacttaacttagcaggctgggggcggggaaggagagcagtgtcccaggcctgatgcccactcctcattccctaagggagggtgctttctcctgggtctcctgggtccaggccaggggatgtgagggctgtggggtgctgggaggggggcagtgttgatgtgggctctgagcttgtggccttccttcattttctctggcccagtagaactttggtgatgaaggtgacaatggcgccagcaggctgatctgggtcaagctctgcaaagaggtgacacacattctcccaggggcttcccggcttcttggccacgaaaccaaagatcttggaggtggtcccgtctgggttggtccatctccggtcttgagggtcagtgctggagaaggtgatgctgttcactggataatggcggcgaaagaagagcttcctttggttgtccgtcagtgtaatgccctgggctgacaccttgaagtggacaacagctggtgtcgggcgggggctacagctcagagctgcagagctggcccgggccacagcttgggggcccgtcagtgactctgtctccactgaggtcaagtagagcacgctgcaggcagcaccctgacgcaggaggtctgccgctgtgctcatgttggtgggcactggagcctctggggtctcttccagaggatctttgctgggaatgcgcaggcagcagggcagggagatgggggagatggagtgctgggagaccaaggcggacaggctgccaaagtagggctcactggggcagcccttgatcttcacccctttgggcccagtctcgatgaggaaatggcggaccagctgttccacggggtcccctttccagggctgggcactgggtggcggtgtggccaccttgagggccagcccataagctccttggaatgaatgactgtccctgatcaggaaggccccagggtccttgtccttcagcagggcaatggcttggtcacgggacaggtgtggcttgtaccagaacttggatgtatcctggacaaacttgacattgctttggctctcttgtgtaggaggctctggggtttgggggacattatctgagagcagaggtgcgaaggtgacatggtgactgatgcctctggctggcgatgatgcctgctctgggccccagggtcctggctgttgccccggcccgggcaggtggcgtttctcaggaagtgggggctggctaaggccattggtgtcataggaggcagccagggggaaagcaggtgtaggtgagctctgaggcggctctgggctggccacaagccagggcatctgggaaggcacaggagtgaggggagacccatctgggctgtcgggggggcctcgagggccttgccagggggcgtggcggaggccaggaagtgtggtgggcacagggctccgaggactggcgccatctgagtggccccctggactcctttcctgaggccagtcactgggcgagctgggagggaaggtcggagagactgggctaggggccagaggctcaggcccacttcccgacggcagctcaggggcctttccggtgcctgcctgggaaacagggggcaaggcctcgccaggactcagtctctgagtgggcgctgaggtgggggacctggtgtcctgtcgccgggtgctttccttgccctggactggactgctggtgtgcaggggcgtggagggaccagacaactctgacgaagcactgcatggggcatctcggggagaccgaggcagtgtgctgtgcccactggggccctccctccaggacaccggctccagcgactctgcagatgccaaaggtcctgctgaggccaggtgcccaggcaatgggtacctgtcccctccctcctccgtagggatctcgtagctcagcttcctagattgtggatagggcgggctgcccggggaaatggagccagcccgtggggagtgggcaccagggctgggataccctctgccctctcctggagagccacagctatgaggcacacggccatatgctgggcagtaactgggaactgctcctccatagctgtatgtcaccagggcagggtaccctggatgcccatacctgccttcggggcacatggtgtaggagcagccctcgtgcccttcctcgcctgccttgggtggcttcaggcagctgtagtcaggcatcggggcatggtgatgcccacaggcaggcaagagcagaggcagcgggtgcccaggccgcactgggtgcaggagaggcttgccagcctcacttgcccacccttctccagcctccctctccagccgcagtccatacaaggctgctgtaggcagcgccagcttctcctcgcaggctgggcatgggtatagggcaggcagcccagggtcctccaggatgaccacctcccggtagcctggggcgcggtagccaaagtccccagtggctggtttccccatctcaggtgggtaggggtatagcccctctgacagcgatcggcagaggcgcctcttctccatcgaggcctcggcgtagccctggggggatccctcatagcccccgtaggccagtcgcctcctctccagggttccctctggccggtagtagcccccattgggaaccccgcagggctcccggtagccctggcggcaggagcagtggcggctgaggccaggcctatggcctggatacactccgaggtgggggcctccgcccacagtgggctgctcttcgtcatctaggatggccgtctcgcgcccagctccccggcccccactggccactccgcagcctcctaggaggcgatccagctcctgccgttcagcagctgtagggggcggccggccaggggactcagcagccggctctgtggtcagcgtggaggaatggcctgagtcgctgctgacagagagcatggggggtggtggaggctctggagagggtgccgggggggtctgccggggaggccgctgcacctgggcataaggactgccatccaggggaccccgggtgtgggtcaaggagccatccacactgtcctcgtggtgctggttgaagttctcataggagtcccagcgcacggctggctcagtggtgttgtagtcgacagagaccgaggggtcgttccgtggagtgctgcctttgatcttctcggggctggaggagaagacaaactccacggaggcttggaaggggaacctctcatcagtccaggcctcgtcaagctggtccttggggaaagtgagctgtggtccgtggatggtgcaggtgtggaactggactcggaacacgagggtccggtctgtgccccggccacccttgtgataacatgttaccatgacatcgcctttgaggaggagggctggctccaggctgatgcaaagctgctggggaccagggcctgcaatgtgatagactccagatgtgtagacaagctgcatggactggtagattttaaggaagggctggaagcctgtgccaggttcaaaggctggcagcatggggatgagcacatagtgcaggaagagagggctgctgttcattctgatggagccagatagcagcccactgaagtagctgatatatcgacgctgggagggctgcagttctgtggccaccttgtcctcgcagaatttccgcatggtaagagtggccagtgcctggtccgcccctgcagagatcttgctgtagtgcatgtaggcagaaacgatgaccccaagcttgcccttgtttcccttgcagtatagtacgaccacgtgctgtgggtcagcactgagccatgtctccatggctttgcagatggagcacagcttgtccaggggtggagcatgcagctcaggccagccgaagtcttgaaccttggggtttaagcgggtcaggtcatgccttttctctgaaaggttgaagagcaggtacttgtcccggtgcttggattgcagcacatgggccagctcgcgcaggtggccccggtgccgctgttcatcgggccgcgcggggaaggcggcggccaagatgcgctccgtcacgtaggtgaggtctaagtcccagcgccgctccatgagcgggtccaggctgaagctcctgggcagagtgctgcgctgctttgagtggttcagagatttggtggatcccaggtgctctatgcgcctgactggggccgtgtttcgccgcaactccacgggaggcaaggcctgacaggctgaagtcacctttgcttcacattttctgtgcgtcgccaccttgcagactctgcacgaaacgcctgtcccatcgatggtcaccttacatactgcacagactggaggtttcttccggaaaaccttctcccggaagctatgaggctcagctttcctaggcttcatggctctcctgggtctgctctcgtgnnttccacgcnctcngaagtggtctcgattnnnnnncncccgggnnccttcccc

SEQ ID NO: 64309 - DNA, 3034 bp, Homo sapiens
ttagttcttagaggaaaagtgagacacaaaagaataagagacaggataggtaggaaggaaaccttagactgtgtgaatctattctttgctaacaacagacgctacaaaaagttctcatttgaaatatcttgtcaagctacagacaacacgttttcttgacatgattttaataaaaaatacagctgacataacagattacatgaaactatacacaatgacattctctgcatagtaaccaacactgatgtgtgtacttgaatttttaaatggattatttataatcctttaaagtgcaatttattgaaaggtttaagcaaatcaggataaaggatctttctaataaatgactaacattaaagagatgctatattgatatatttagataaatctttcaaaaatcataattgatttctatagatgccaaatttacttctgttgtaacaatgacctgcccccctcaaaccccaaacttaattgctgaggattaagaagatcctctaattggcaagagctttttctgatgttaatatttttgtctgtttcaatacatctaactaaaaagaactatgggtctagagtagttgctttagcagccctgagttctataaccacaatggtattcctgttagaacttaagagaatgttgtgaacgttccccattctatttgaggagaaaacaaagaactcagttgctttctgatttagcaaagtaactatgctttgggctatagtgttaatgtctaagataaaggtagcaaaaattggagttatctaagaatcagaaaatgctttagagaaatgaactgtaagaggaatgtttctaggagctgtctgatggggtagaagggattgcaacacaaaggccatttactgctgtgattgaatattgtcattgtttttctgtctatttcctttagttggtgaaaatatttcaatatgctgctgtcccaaaagcctggccattagaggataaacaagactcctttacagggttaataaaggagcaagatcttaagggagcaatgccagcctaactttattctgcttaaagaattatttctctcgaaaaagctgcttacatgagcatctgcaaaatagtactgtttgtggctgtactggctcagcaattactttccccaggaagagggtagtttggggggtaggggtgagtaggaataaaaaagaacttttccctccaagtgtaaacaggaagcttcagccgatcttcggagcactgtgatcacaggttttggctttcctcaaagttcctttttggaaattctggatggagctgagcaaggcccctcggctcatgcccattcacagcctgagacgagagctgggcaggtgcctcggtgctcgcaggaggcaagggagctgctggtggtggtggaggtggaggaggtggaggtaatgcagatatccctgatgtagagggtggagttggcgatgacggggacgtgagaggtgagctggccccagatcctgctgaattattggagttgctgtacttcgctgaatgctcttcactattttcaagagcagatcgttttgacttctttcgagctaaaatctttcttttttttctttcctcctcagatccatggtgggactgagctcttgtcagtcttcgatgctggtgaatctgtttctgttcctcaattagtctcttctctatacattctttggcaattctcaatgcctcttttaactttgtagggatcttaaactgtggtttttcagaagtggttagtaaaacatcgctgaataatggcatctgtaagagccgggagatggtaggcatgccatttttacaggcttcacaagacagcgtagactccaacacggccaccacagccatggacggggcaggagggaaggagtccacaggcaccgagtctggcggtcgtccataagtcatttcatacagtaagtggccaaagcagtggacatccacactttccaatgtattgattttcctgaattgtgaaaaataagatcggtagaaggaaggcaggcccaataaggaattctcaaggtccagcagccggcaagtgtccccatcgagcatcacattggaggcgtgaagatgcccataagggaatcccttgtcatgaagaaacttcagtacctctaatatttgccgtccatatgtttttatttgctggagttccaggccctgaatcttcttagggttgcagtacttctttagaaatgggtcttttggttttgccttgtagatcagatccttcaatgttcccttttcgttaaacatcctaattagcaacgctgaggattcattagctgtggcaaaggtaacccgatagatgtaagggtgcaaacaagaaggcagaagtttgattagacactgaaaatctttatctgacaaatacttgtctgggccaaggtcagcccagcttaacactagccgttcctttggctgatttttaatcttcatcaagaaatatttcttccttattctccaacctatgtctttcaaaggttccaccacctcccactttggttctgatcggaagaacatggaaacctgttgcaaggcaatctcagtatagtttgcggaatagttgtttggatctaaaaacttcttaaccagctcacaattagacaagatatgatttgttgtgatcacgttgagatagttctgaagacctttctgcctttcagctatgaattcacgatccatgttaccaatcaattttttgggaggaagaggtagacttaggcctgcaatctgtaagctgttgttaagcaaatcaaagtcactgtatcttctaacaatctgccagctgttttccacagaaattcctctttgcactcgaataatatattccgtgtgggactgcaggctctggctcgcctcgatggctgctgtcagcggcaccgtgtcgtccagcagcaccttgccggctggcggcttctccatgaaggccatcccgggacgcccggccgccgccgcctagggacgcgaggtaggaacccgaggcgccgactcccgccgcccgcccggacgaaa

SEQ ID NO: 64310 - DNA, 1461 bp, Homo sapiens
cataatagccatcgacttcggggagcaggccttgaaccggggcattgctgctgtcaaggaggatgcagtcgagatgctggccagctacgggctggcgtactccctcatgaagttcttcacgggtcccatgagtgacttcaaaaatgtgggcctggtgtttgtgaacagcaagagagacaggaccaaagccgtcctgtgtatggtggtggcaggggccatcgctgccgtctttcacacactgataggtgaggccgccgaccgccactgacgaatctagctttggcaatttcttattccttttcattgatttaaatgtatttattgagataagtggtttcttcactaattatcaaatgtttcttatgaaattttcaggggatagaaggaaagcgcttgtgctcctagcttaagacaataatgtgttttttctggggagctgtagttttgtgtctctgattcccaaagtgaaaagcagtgatttcattagtaggcgattacatctaggaataacatttggtaaggccaataaaatagcaggtgctttcgttagagatatgtgtgcgtcattgtactgggtcattaaatcttaagaataaaaatagaatgacttatttagaattaatgcttattagcagtgagaacaaatgacagattgttctatttattaatttgttctaggatcttattctattttattcaaagacaagactaaatgctcttgtgatagcattcctttccccatgaaacaacaggaaagctgtatccataccatacagtgactggccctcccagtttaacccaagaccccctggaaaagcagctctccttcagggctggagttcctgctgctgctttcttggtggggataaaagccttcaggccatgacttccgtcgtggctttaaaacagctttgcttacctggcataaaaattgagtggtacctctactgaaaccagttacataaaacactgtgaatgacacttcataaacccattgtgtaccttaaaattgttactgattgtttaagacgcgtgactgtcagtggtgaataaaggaaccaaaagattaacccagaccgtttacagtgtgtttgcatggcagctaatgcttactcacataactgcgaatctgaaagtaaataaggtaaggcctttgtggttttcctttttaatgtgacataaaattttgtgctaagaacattgtggaagagagcgcatctgctgatggaccagacattcagccaaagcgttgatattgatcctttaatttgtgctcagagcttcagggcatggagtaaagaggagctgcctctcatttcctcagtttatgccctgaaggctaactgtggactgagtatttgcacatgtacttgtatttgaagtaaatttctgctacatttgacctgagccattttcaaagaatacatgtacagtatttgggaaaaaaaaaaaagtcgacgc

SEQ ID NO: 64311 - DNA, 1065 bp, Homo sapiens
gaatccctatgttaaacccgtggtttctcatgaattagatcataatttaacattgtaaaatttcagaaactattgtgctaatatttagatttcaggaaggaatcagactaaatcaattacctccattcattgttagaacagaagatataatagcttactaactgatatgagttatgaatgtcactatgacacaaaatttgctgtgatttgctaatctggctacaagtgcagtatttttcatgaatgacaacacacagcatttccaacttgtaacatgaaactccagctcataaagagtgtattgtgtgacttgaaaaagtctgattgtaactaagtaacaaccgttcccctgaaaaaacgaacaaaatccattaggaaatcaggcacagacggtattgatcggtttttcttcctttcctcctgtggttttgtttctcaagacatataggtggttccaacagaagccaacacttgttacaaaataacacagctatttttttccttttctttttctttatctttttctcgtggttccttccgtttacgttcactattcccagattgtcttccacttgatggagaggcttgtgctggctggccctgctgagcctgtgtagaagcagcagcagcagcagctgctgcttgttcctgttcctgatagtattgagaagcccgtctgtcctcttcctcttggagtttctttgctagttccaaatcactgattccttccgggatttgttcccaattgatctcttggctctgctgttcttgttgtagagataatgccataagataatcctgatctatctgatcttgttgtcctttgtatacagtttcaggatctgaaggaggtcgaagatgaaattctgagtcacagaaatttccatcaccatctacgttgtgtaggctttcccaaacaactttctcttcagtaagaaacccctggtccgttaccaacaaatacagttgacccttgtatttggtcatggtgctaaaatgattattccgaaagaacacacaaagttctccttcctgaaccgttgaagttagttcacataatccatg

SEQ ID NO: 64312 - DNA, 5451 bp, Homo sapiens
tccaccgccggagcctcgccttcctttctccctctgcagacacaacgagacacaaaaagagaggcaacccctagaccaccgcgaaggacccatctgcaccatgaccgagaccaccaagacccacgttatcttgctcgcctgcggcagcttcaatcccatcaccaaagggcacattcagatgtttgaaagagccagggattatctgcacaaaactggaaggtttattgtgattggcgggattgtctcccctgtccacgactcctatggaaaacagggcctcgtgtcaagccggcaccgtctcatcatgtgtcagctggccgtccagaattctgattggatcagggtggacccttgggagtgctaccaggacacctggcagacgacctgcagcgtgttggaacaccaccgggacctcatgaagagggtgactggctgcatcctctccaatgtcaacacaccttccatgacacctgtgatcggacagccacaaaacgagaccccccagcccatttaccagaacagcaacgtggccaccaagcccactgcagccaagatcttggggaaggtgggagaaagcctcagccggatctgctgtgtccgcccgccggtggagcgtttcacctttgtagatgagaatgccaatctgggcacggtgatgcggtatgaagagattgagctacggatcctgctgctgtgtggtagtgacctgctggagtccttctgcatcccagggctctggaacgaggcagatatggaggtgattgttggtgactttgggattgtggtggtgccccgggatgcagccgacacagaccgaatcatgaatcactcctcaatactccgcaaatacaaaaacaacatcatggtggtgaaggatgacatcaaccatcccatgtctgttgtcagctcaaccaagagcaggctggccctgcagcatggggacggccatgttgtggattacctgtcccagccggtcatcgactacatcctcaaaagccagctgtacatcaatgcctccggctagcagcccctcgtcctccggcaacacaatggcccctccatctttgtcagccccctgtttctctcctgcctctctgtttctccatctcctcgtcttgactgttttccctacttgctgacttaaccccccatagtgtgggggacctgcagagaaccatggcattccctattccacagtcatctttggacagactttcctctagtctccgggttgggggtgggtgagggaatggggtgggagtcgggggaagtgcagtccttggagatgtactggtgtccgtctcccagcatgctctagagaggcggctctggtgcccatcctcccagcacgctctggggaggcggctctggtgcccatcctcccagcatgctctagagaggcggctctggtgcccctcctcccagcatgctctggggaggcggctctggctcttgccttcccagcatgccctttactacaaagggctatttttcttttctttcttttgtttatttatttttctttgttcactccctgtagaacttggatgaaatcagtgtccatggttctttatgtttgtagtcttgatgtgctcctgtggtattacttcccctctgataggacattgtagccagcctcagcactcagtgagttcatcagggccacacccagtagagaaggccaagcaacctccacttcttcagcaccacacacacgcacacacacacacacgcacacatgcgtgtgcacccgcgcacgcacatacacacacacatatagcagtagcagcagcagcagcagcagcagcaacctttgatcaggagtgagattttcgggttctgaaacctgggacacgagtctgtgaatagtcggttttctcagaataatttgaatctgttttcttagttttcaaatgaccatttccctgatgctctgagcttatgatcacacagagccagtccatcctcatttcctggtggcatctgttcatttacctttgtggactgtagctgatggcacagtgcgggttccctaccagccaggggtttccaagggacctttggaggccatgcttagacacattcctgtacctgagaacaaccacataggcaggaccagatccacatcgtgcagtcgtgtcataaaaaaacaaaacaaaacaaaaaaacactaggagtccactcaaccctggaggtctttgctaattggaattatgtattgtctgttgggctgggaaatgtctctttcatattgtaagtccaggatgaactaggagaaagcaatttgttgccctgatgataactgatgattttcaccctctctagctgaggtaactcagacagtgcatgaggtcagtttcttcttgagaagcagtgccttggtcttgtttctgtggttggttctagcccctgcagagcctgggagctgcaggaactgtctgagaaaatctccctaataggggagtgggttcccagaagggagatctgggaggggtcaggagccactaagttgcttcactccttttttctctaattttctaccttcctctctgttcctgcagacagttttgcccagctttgcttcctggttactagggtctcaggcgtgtccctgcttggagagcccataaggaaattgcctgtcttgtgcctttgtgtctctcatccagtctctggctcttgggattctggtctttgagaaatagtccctgagtattaggatacttttatcaaaatctagtaccagctacggccaggaaagggccaggtggggacctggaaaggcaaaggacaatgttcttttaccacacgttttcacatctggcaacatccttcaattgcgggaaaaggaacttgatttaacagaagaacatggtagagcagcatccagaaagtctgttattcctcttggattttttgaaataatcttcagaggaaggaaggaaaatcctattttggggtatcagtgtttgactagggatcatgaaataataaactgaaaaaaactttagagttcagttgatccaacactttcctttaaaagttgagggagcagaggcccatgggattaaatggctggtccaggtcagccagcaggtgtagggcctgacaagaacatattgtttccctgacccctaggccgtcacaccacaccctccatttcctcatgttgctgaccaggtgcccatatgatttctacacttcccaagccttaccctggcatctttcttttaaattatatctgtcccaggtgctctccacacataggatggtaatgccagtcccaggggagggtgtgatagtaaggaaggccactgttaggtttcctttagaaataaagagatctcagcagcttggaagaaatcccagaagcggaactccatcaatccaagaaagagttgctttgtggaaggtgaaggaagacccacagagtgctcaggatgatgctattgctggagagcgaaagatggaacagccttgtccaggcagaacagtcataagccaggaaatgaaacaaaggaaaacaggtgcctgaatttcctggggaaacatggcttgtttaaggacttggagttatggatggaatttatgggacccacgtgagcagacctgaggaaggctcgatttcttttgtttcttggtccactctgtcactctgctctggtcaagccccatttggtctacagcccatgagaaggaatgaggctggttctgcactctcagcatgcagtccgaaagcatgtgggagtggggagggaaagtgagatgaattaagacaaagaacaggtgccatagaagtagatttctaggaatgaagtggggcagatcttatctttgtggattacaggcactgtactaaaaacaggtttcctatttaatataaaaagaaagtgaatcttcttttggatagaatcatccattcccatcgccgcaccccctaccccccaaacacacacacacacacacacacacacacacacacacacacacacacacacacgccctactttttatttgctaggggaaggtcacagcacaactaaatccaggacaggacattgtgaccatgacccacccacagtcaataccagaaagatgattcagagtctgaaggggcgccccaggtgccaacaagataacctctaccccccgactttgtctctggggtcctgtttctttctgcaaagcccaatccaagactggcatggctcagaggttgtgagaaaggcatggactggaacaatcatgtccagaggggtctggagctttgtttcctgttcaccagcaaaaaatgtctctcccatttttctgaaagtggctgatgtaagaacaggcagaaggaaaaccctttttgtcaataactctgtccttaaggaatggtcctctgggagggctgtgctgctagtgggtacctcagtcacacacccccaaccccaggcagcctctagagccttcttgctttcattttccttgaatgtacataggaacaagggggaaagtctcttactgaagtgcctgaaacccaaagctagagcttctagagacgccgttcttcctgtctcagcttggccagcctttcaacaatgttctctagtttcaagctccagcttctcagaaagaattaaagaacttgctgttcaaattaagtagaaagtgagactcaataataactgaactacagcaaaaggcagagaattacagggagaaaaaacttgtacttaccagcccaattctactctcctcaaactgacacacacacacacacacacacacacacacacacacacacacactcttttttttaggggactaagagagagaagcatgttattacattttactcatccaaacagtaatgcaaaaataaaacggtagaatatgaaaagctcaggatctctcccaaggctacctactgcaggagggccaacaggtgagatgggaagaatggaaacagggaccgattttgtagctcatacaattaggacaccttaggaatagcattgtagtaatggtgatgaatatgctctgccaaattcatccagtctgcaccatcttatagctgcccagcacactcgactgttcatgtggtctctttgtagtgtgagtttggagtgtcctattagcctgttctggttaggaatgagttaacggctctttccctcaaccttagtctagtcccagggctgaggattcagctggatccacatgggtcttgaagggttggcattgaaggaagggggaagcttttttgaatcgctttttgatcacataatctgccattttaagagtaagatttgctttatggaaatcaattcattaataaaaaatgatattcaagttgcaataccatttcacagtgaaatattttgagtacaattttgttgctagaatagtcatgggcaagagttttatgcaaaatgtttcaattatgttaataaataagacaatgct

SEQ ID NO: 64313 - DNA, 2309 bp, Homo sapiens
agacgacgatttcgtggcggtgcagcttgggcggcccagcggatcgtgccgcggcggccgagcgcagctacaggagggtgtccagaagccacaagccatggctgtggggaacatcaacgagctgcccgagaacatcctgctggagctgttcacgcacgtgcccgcccgccagctgctgctgaactgccgcctggtctgcagcctctggcgggacctcatcgacctcgtgaccctctggaaacgcaagtgcctgcgagagggcttcatcactgaggactgggaccagcccgtggccgactggaagatcttctacttcttacggagcctgcacaggaacctcctgcacaacccgtgcgctgaagaggggttcgagttctggagcctggatgtgaatggaggcgatgagtggaaggtggaggatctctctcgagaccagaggaaggaattccccaatgaccaggtcaagaaatacttcgttacttcatattacacctgcctcaagtcccaggtggtggacctcaaggccgaagggtattgggaggagctgatggataccacacggccggacatcgaggtcaaggactggttcgcagccaggccagattgcgggtccaagtaccagctgtgcgttcagctcctgtcgtccgcgcacgcgcctctggggaccttccagccagacccggcgaccatccagcagaagagcgatgccaagtggagggaggtctcccacacattctccaactacccgcccggcgtccgctacatctggtttcagcacggcggcgtggacactcattactgggccggctggtacggcccgagggtcaccaacagcagcatcaccatcgggcccccgctgccctgacaccccctgagcccccatctgctgaaccctgactggtaaacaactgctgtcagaaaagggctgggcttgggaaggggaggtggaggccaggtgtccccagacctctaacccttgcccctagcagcctcttctttgtggagcctctcagtgtgggcagccctcgcatgctggggtcgggccagctctccccgaaaggtcttgacctgaatgatggccggggaagcctgcgtgtgcccctttcagagacggagcacctgagatgtgggaggtgcagcatgttcccctgggcccctcagaaagtcgagcttggaggccagcctggatctgtctctcccttcccctcctgggaccattctacctgtgttctttgaccctcggagcagggacaggcaagacaactggcaagcttgcagctgccctgatggtgcaggtgcagggaggtgaccatgtaactctgaccaatctgggaagtggagggtgggctcatgggccgtgctctgcccctgtctgctgctcccagtctttcgctctgcctgcctgctcagaagaggtggctttggcccagaggctcaggccgggactgagatggacagacccagggtggggtggggtccaggttgggtgtggactgtcctcactgtcagtggagccccagaagctagatgggtaccaggtggggttaggttcccagaggactgagggaatcctgtacaggatgtcccagggtagatggggagcaggattgggacctgctctgacagctggacacatgagccctggatgagtatggtaagggggtttgaagaatcccctgtccacctcccaaatccaggcccggccccctctggcttggagagcattccaagcccccaccccacccctagaactgccattcccaagacctctgtctcccagccaaccacccttggaacttgcctcttgtcctgctggaaagatagcagtgttctcctgacttcgccctactgcatgcagccaaataaaaggtgtgcccagcctaacctgtgccctgtggtttctggaaggaaaggcagactttaggtggtcctgcctggacctgcagatggtacaatggcatggcttctgtctaaggtacagaggggttggcatttcaggacctaggccatcacagaaacaggttcatgggcagccccctcagtgagctgcaggtatctcacctggcagccgtccagtactgctggcttcctctggaggcccagccacaggctggggttggggtgtgtggacatctctgggcagctcttgagtccaccttgtgccagatcagcagtgccacccaggctctgcctcctggtgttattctttgccaacagctttacggccattggatgaagccgccccactttagaatggtgcctggcacacggctggtgcgaaatagcaaaagctttgtgtcccccccacg

SEQ ID NO: 64314 - DNA, 1035 bp, Homo sapiens
attctgaggaacggggactgtccccggcgctcggcctccggggctctctgcgagcccggggccgcggggactccgttccagccgccgcgtccgaggcggacccgttcctccaccggctgcgccccatgctcagctccgcctttggccaggatagatcactgcgaccagaggaaattgaagagctccgagaggccttcagagaattcgacaaggacaaggatggctacatcaactgccgggatctgggcaactgcatgcgcaccatgggctacatgcccaccgagatggagctcatcgaactgtcccagcagatcaacatgaacctgggtggccatgtagattttgatgacttcgtggagctaatggggcctaaactcctggcagagacagcagatatgattggtgtaaaggaactgcgagatgctttccgagagtttgacaccaatggtgatggggaaataagcaccagtgagctgcgagaggctatgaggaagctcctgggtcatcaggtgggacaccgagacatagaggaaattatccgagatgtggacctcaatggggatggacgagtggactttgaagagtttgtccggatgatgtcccgctgaggccgcgagggcccctccaggactgccaagctcccaaaggcggggctaagaggagctagagcttgcctcacccgctgtagccgccgagagccccaggatgtactggcggatggggcctgcctgcaccccggggaggcgcccaccccggacccccacccctccgcactgtgaaagactaactcctgcaactggaaaagcgggggcgcccgccgacgaggaggccaccgtgccaagccggcaggagttcatgcccaggcgccaagggccatgctgcccagctgctgctggctgggtgggccagggagcccgccagcagaccccacacagcatgtccgccccgaggcaaagcctcccaccttcgctctgcgcccgtcccagctcgcctcagccctgttatctcagaaccaataaaaatatttccaagagc

SEQ ID NO: 64315 - DNA, 2224 bp, Homo sapiens
agagcgccagccagactgcaggtgcatagcttctggagccgccagctgtgcccaagagctcctcagagcctgctgtccatgcccctggtacccctggaaaccctgtcagcctctctaccaactcctccctggcctcctctggggaactagtggagcctagagtggaacaaatgcctcaagccagccctggccttgccctcaggaccaggggcagctcaggtccccagccagccaagccctgcagtggcgccaccccaacgcctctcttgttggttggagacaggagcccggtgccttcccctggaagctcgtccccacagctgcaggtaaagtcctcctgcaaggagaatccttttaaccggaagccatcacctgcagcgtccccagccacaaagaaggccaccaagggatccaagccagtgaggccacctgcccctggacacggctttccactcatcaaacgcaaggtccaggctgaccagtacatccctgaggaggacatccatggagagatggataccattgagcgccggctggatgccctggagcaccgtggggtgctgctggaggagaagctgcgtggcggcctgaatgagggccgtgaggatgacatgctggtggactggttcaagctcatccacgagaagcacctactggtgcggcgagagtccgagctcatctatgtcttcaagcagcagaacctggagcagcgccaggctgatgtcgagtatgagctccggtgcctcctcaataagccagaaaaggactggacggaggaggaccgggcccgggagaaggtgctgatgcaggagcttgtgaccctcattgagcagcgcaacgctatcatcaactgcctggatgaggaccggcagagggaggaagaggaagacaagatgttggaagccatgatcaagaagaaagagttccagagggaggctgaacctgagggcaagaagaaggggaagttcaagaccatgaagatgttgaaactgctaggaaacaaacgtgatgccaagagcaagtcccccagagacaagagctaacagcacgagaagccagttggggactgccccctcctggagcagctcctgggctgtgctctgtttgaagggggcgccctgctcccctcagatcagtcaggaggaagatgactaaggggagggatcctctgggtgatggcctcttcctcctcagggacctctgactgctctgggccaaagaatctcttgtttcttctccgagccccaggcagcggtgattcagccctgcccaacctgattctgatgactgcggatgctgtgacggacccaaggggcaaatagggtcccagggtccagggaggggcgcctgctgagcacttccgcccctcaccctgcccagcccctgccatgagctctgggctgggtctccgcctccagggttctgctcttccaggcaggccagcaagtggcgctgggccacactggcttcttcctgccccatccctggctctgagtctctgtcttcctgtcctgtgcaggcgcccttggatctcagtttccctcactcaggaactctgtttctgaagtcttcagttaagtttgagtttatgactgagtggcctgtactgtcagacgtgaatgggcctgacgggcaaatccatccctctctccctcacagttccaggagcggcttccctcgtctccccttactccacagggagcctcccttgccaggaccagggctgcgacggccatgctggggcaggtgagtgctctgttagctgctcccagtgctgtccccaggctgcagttctggtccctggttgtcaggtaggaagggtgcacttgaagcaggtgctcatctcggttccttaacgtttatagtctgacccctcacttaggctttcctctgccaccccggtccagggaagaggctcgctcccgcccatggtcatcactggtctgtctgctctgttgtctgttctttccctgactccctcccaccgaaggcctgatggctactcacccctctgggatggctatgggagaggaggagtgatggggaccgccaccttttctgcaggaaatgtgcccagcagctcttggtcaaagcactgttgctataagctatctctgggatgcctctaggcccccttccctctacacacctctgggaaaagattacactgtattaactctcgaggagtttcctcaccaataaacagacaacctcaaaaaaaaaa

SEQ ID NO: 64316 - DNA, 1238 bp, Homo sapiens
ttttttttttttcaagtgtagtcacagtttatttctgatgtggctgaatctagggacaggcgggctgggctgagtggggggcgtgtcggcgatggggctagaactccaccttgcaggccgggaaggcgtcatcctgcatggacaccatgctgttgctgcccaacaccgtgatgcccagcgcctggtgccgggcgtgcgtctctgcgtaccacgtatgcatggccaccgagtcgaaagtggggatcagggtcacctgcaggtcacggtcccaatgctgcttgctggccagtagcgcgtccaggacggcccgcatgccttcctccttgcgctggtcctggccactgatgacgtagcagagcgcgcgcacgcgctggaagaactcctcatccaccaggtgggcgctgctcccgctgggcaggtaggccaggtccaggtagaccggggacttgggtggggtggctgacaccccgggccggctgctggctgaccccgacgggcctcgagtggcagtcttgggggttgaggactttctggacaggggtgcccggcctcccttctcactgggctcactccgggcactgagtggtcggctggcacggtccccaccagcaagccccttggttttggcagcagccactggagtggctttgggggcggcagcgcgtgagttggggcgggccaggggcttccgggtgcggctgacgttctccgtttgccgtgctgtcttggggggcagcatctcggggtccaccatgcagatgctggatgggtcaggcagtggtggggggaccttgagggggtcaggcaaagggtcgtggcgagggactccaaagccctctgtgtcttcgtctgagtctgccgcaccgggggccaggggcacgggatccgagtcagacagggtgggcagggactcgctgaccgatgtgggtggcgtctcctcggcccccagcccacctgcccgttcctgtgaccgggcactgctgtcattcgagctgccgggggacgcaggtgccggtgccattggcaccgccttgcgatgctcaaattcacagggtgacaccaggcacaggtccacatcgtgtggggaagccgagcgccgcgcccgggggccacgcagcgggaggctcagcccagcctcactggtgggggcggatggcggcagcaccgtgctcaaaggacaccgacagggactcgtccacctcggtcgagtgcggggagcccacctctgcgggtagtga

SEQ ID NO: 64317 - DNA, 1375 bp, Homo sapiens
agcggccgcgtgcaggggctgctggaggaggaggcggcggctcgaggccgtctggagcgcacccgtctcggagcgcttgcgctgccccgcggggacaaggcccggacgggcgccgccggccgccagcgcccgcccgtctcgcagcaagagaggtggagaagagcgagtacttgagaaagaagaggaagaagatgatgatgaagatgaagatgaagaagatgatgtgtcagagggctctgaagtgcccgagcagtgaccgtcctgcaggtgcccagcaccaccagcttaacggcgagcggggacctcagagtgccaaggagagggtcaaggagtggaccccctgcggaccgcaccagggccaggatgaagggcgggggccagccccgggcagcggcacccgccaggtgttctccatggcagccatgaacaaggaagggggaacagcttctgttgccaccgggccagactccccgtcccccgtgcctttgcccccaggcaaaccagccctacctggggccgacgggaccccctttggctgtcctcccgggcgcaaagagaagccatctgatcccgtcgagtggaccgtgatggatgtcgtcgaatattttactgaggctggattcccggagcaggcgacagctttccaagagcaggaaattgatggcaaatctttgctgctcatgcagcgcacagatgtgctcaccggcctgtccatccgcctcgggccagccctgaaaatctacgagcaccacatcaaggtgcttcagcaaggccactttgaggatgatgaccccgatggcttcttaggctgagcgcccagcctcacccctgccccagcccattccggcccccatctcacccaagatcccccagagtccaggagctggacggggacaccctcagccctcataacagattccaaggagagggcaccctcttgtccttatctttgccccttgtgtctgtctcacacacatctgctcctcagcacgtcggtgtggggaggggattgctccttaaaccccaggtggctgaccctccccacccagtccaggacattttaggaaaaaaaaaatgaaatgtggggggcttctcatctccccaagatcctcttccgttcagccagatgtttcctgtataaatgtttggatctgcctgtttattttggtgggtggtctttcctccctcccctaccacccatgccccccttctcagtctgcccctggcctccagcccctaggggactagctgggttggggttcctcgggccttttctctcctccctcttttctttctgttgattgtcgctccagctggctgtattgctttttaatattgcaccgaaggttttttaaataaaattttaaaaaaaaaa

SEQ ID NO: 64318 - DNA, 747 bp, Homo sapiens
  misc_feature (1)...(747): n = a,t,c or g
ttttttttttttaatcaggtgaaaatattttattttgacgtgctttttcttgagtgcctgaatgtggtggctcttagggtaaccccagaatcctcactgcggcaacaagacctggccaccaccctcacctcgaccaccacggccttcgctgcagccccactctgactccccgggggctgctcacgtgccagcacccactggccaagcatcctccggcaggacccaagtcctctgtattcagaggccgaccctgctttccagagactcacgaggtggcagagagtcaggctgtggcaggggcccctgtgtatcgaggagaggaggaagagtctgcagaggtttctagggaaggagatagtgtggaagtgactgtggctctggtcctgcctgggaggagatctacaggggaggggcctggccttgggctggccctgccctgcgtgggatctgtgccctgcgtgggatccctgccctgtgtggggtgcgtggggtctgtgccctgtgtggggtgtgtggggtctgtgccctgtgtgaggtgcctgccctgtgtggggtgtgtggggtctgtgccctgtgtggggtgcgtggggtctgtgccctgtgtggggtgcttggggtctgtgccctgtgtgagctgcctgccccgtgtggggtgcgtggggtctgtgccctgtgtggggtgcctgccctgtgtgggatgcatgggganttccccgcactggacaactatctacaaanggggggggg

SEQ ID NO: 64319 - DNA, 1641 bp, Homo sapiens
ggaattcgaggaaactagagctggcagaaagggtggacacagattttatgcaactaaagaaaagaagacaatcaagtgagaaggaaaatgactcaggcactttggacacggtaggcgctgtggttgtggaccacgaagggaatgttgctgctgctgtctccagtggaggcttggccttgaaacatccggggagagttgggcaggctgctctttatggatgtggctgctgggctgaaaatactggagctcataacccctactccacagctgtgagtacctcaggatgtggagagcatcttgtgcgcaccatactggctagagaatgttcacatgctttacaagctgaggatgctcaccaagccctgttggagactatgcaaaacaagtttatcagttcacctttccttgccagtgaagatggcgtgcttggcggagtgattgtcctccgttcatgcagatgttctgccgagcctgactcctcccaaaataagcagacacttctagtggaatttctgtggagccacacgacggagagcatgtgtgtcggatatatgtcagcccaggatgggaaagccaagactcacatttcaagacttcctcctggtgcggtggcaggacagtctgtggcaatcgaaggtggggtgtgccgcctgggagagcccagtgaactgacccttcaggctgagtgtgaagcgtctcagaggcatttcagaacctgagcttttgggggtttttaactgaagttggttgttttatctttcttgttttataattcctattgcaacctcgtgcactgctcgagacacaagtgctgctgtagttagcgcttagtgacacgcgggcctttggtgggtgagcgggactgtgtgtgagtgtgtgcgcgtatgtgcgcacatatgtgtatgtgtggagtatgtgtgtttgcttctccgtggatgaaatagaaactcctcattgtgtgaccaggaatggttaaatcatctttacaaaatgtgtgctttaactgtttacaagtaaaacctaaagttgcaggaaacattttttatttcgtaaagaggtaccaactgtcgctgatgtgatatgtcagaactgaagagtaaatctacttgtttaaatgacttgacagtggtagtgctccatttaataacagtaataagtaataaagtgtttttatttgttaaccagtttaagtggatcctgtggtaacttaaactgttgttctcatcccttatatggggcatttttctttaacaaagaatggtttcagtgaaacaatctagcagagaattaatgtcagaacctttttaaataatagtctgattgatacagtttgtacttatttcatcaagcttttctaagcttaaatattgcatagcttcgagctgtatggactatattatgaaagaatatgtaaagagaacatacagtaatgcacagtccttaatttgtgtataatggaaagttatttacaatataacactgtaaataagaaagcaaagtttatgggaaaattcaatattatctttgtttttgtttaaatatatttttaagataaaggcacaaaaataaaagaagcgtattactgggtatagtatgtgactcctcttctcagactaataaattatcttttgaatccttaaa

SEQ ID NO: 64320 - DNA, 1558 bp, Homo sapiens
ccacctcagagcaaccacagctgggcggtgctgttcgacgggcagagcggctgcatctgttaccgccctgaggagcaccaggtctgcttcctccgcctgatggaggacagtgatcgggagaccctgcggctgctggtggatacctccaaggtccaagaggcttgggtccccagccaggacacccaccacacccaggagctgctggcagtgcaggggagcctcgaagtggaccccgcccaggcgggggctttggtgcagcgcctgtgcatgaggacccccatctactgggcccggcgagcagaggggccccggagacagcggctgatttatctctgcatcgacatctgcttcccgagcaacatctgcgtgtcggtctgcttttattacctcccagactgagcccccgacctggcccagcctggcccgtccccaatccagtgggctggccaggccacctgcaccagggaggacagctgctggcagggactaataaacccttccacctggccatggtggtggtgttctctatggaccgaggccctgaaacgcgggcagggaggggcagagaacacactagcttgggggtgggcaccagcctcagacccctcagcagctttgggccctcggccgactttcccaggcagtgcaggctagcccagtccaggagtgtgcagcctggcttgggtcgagctctgtcacatctggataagcaactgggggctgagagtcccagggcagcctggcccagcaggtcaaggcgccacagggggccatcaggtccagctggcgcaggccggcaggggagggtctgctctgacctgggtgctgcatgggtccctccagctgccaccacctgcaccaggcagtcccgaggggtcacaggctagcccagcacactgtcattgaaggccaggcagacaacagccttctggtggccgccatactctctcttgatctctccagtctccacacaccagagccgggccaggttgtccgaggaagcagtgacgatgtactgggagtcccccgagaaggcgcagccccacatccagccgcgggaggactccccggggttgccgctcttgatgctcagctccgtcatcagggagaagttggacgtcctccagatcttgcacgtctgatcagccgagcaggtggcgaggagcgtggagtcggggctgaagcgacactgcagggcgtagcgcgtgtgggcagggatcttagtcttggggatgagctgggtcacctcgtcaccaatgccccccgtcagattccagacatagcagtttccggtgctattgacagctgccatgtagctggcgtcgggatcgatgtgggcggacgtgatggagacctcgggctcagggatcagctgctcgttgtggtctgttttcaagtcccagatgtggatagccccgctctggtcacccacgatgagctctgcctggttggggtgcagcaccaggactcccaggtgaatgccttggaggtcacaccggaccgcagcatgattgctgctgcaggttaccagcacatccgcatgtatgatctcaactcc

SEQ ID NO: 64321 - DNA, 355 bp, Homo sapiens
acttatagaaaaggtaaaggaaaccccaacatgcatgcactgccttggtgaccagggaagtcaccccacggctatggggaaattagcccgaggcttagctttcattatcactgtctcccagggtgtgcttgtcaaagagatattccgccaagccagattcgggcgctcccatcttgcgcaagttggtcacgtggtcacccaattctttgatgtatgggccgaggggcaggctccaattttcaagcacacgaaggaaggatccatcacctccaccaggatctcgatcagcacgggctcgtactctgccacaaactgatcacactgcttctggtaagggtctggcaggaagctgcag

SEQ ID NO: 64322 - DNA, 1918 bp, Homo sapiens
gcaaggtgaccgccccacggcggccccagcgctacagcagcggccatggcagcgacaacagcagcgtgctgagtggagagctgccgcccgccatgggccgcaccgcccttttccaccacagcggtggcagcagtggctatgagagcctgcggcgcgacagcgaggccaccggcagcgcctcttccgcccctgactccatgagcgagagtggggctgcctccccaggcgcccgcacccgcagcctcaagtcccccaagaagagggccacaggtctgcagcggcggcgcctgattcccgccccactgcccgacaccactgccctgggccgtaagcccagcctccccgggcagtgggtggacctgcccccgcccctggctggctccctgaaggagccgttcgagatcaaggtgtacgagatcgatgacgtggagcgccttcagcggccccgccccaccccgagggaggcccccacccagggtctggcgtgcgtcagtacaaggctgcggctggcggagcgcaggcagcagcggctgcgggaggtgcaggccaagcacaagcacctgtgtgaggagctggccgagacccagggccggctgatgctggagcctggccgctggctggagcagtttgaggtggacccggagctggagcccgagtcggccgagtacctggcggccctggagcgagccacggcggccctggagcagtgcgtgaacctgtgcaaggcgcacgtcatgatggtcacctgcttcgacatcagcgttgcagccagtgctgccatcccggggccgcaggaggtggacgtctgaggctgggcgccggacaagaggagggggcgtgcagcgggctggaggacgggacgtgggacggagcgaggatgtggtgggggctgcggggggaggatgcggaggggtttctgtgcaggacgggagtctcagagaggagacggagtgtgggggagggagggccggccacgcggtggacagagcgagggtgccagggtgacccgaagaccgtcaccacccgacagcaacgcaagtgcctttgaccttgatttggacttttctcccttttgcatttggtgctacagacttgagacaccagcagaagttgtgttcagcccggccccgctgcgcctgtccgggccggggctggcgccggttgtgtttgtgtccaccttgccttctttgcagccaagcagtttttgtggagtgggacttacctgcacgccccaggggtctttcaggattcaggatgacttttcttttacaatggtttcctctcggcagagcccgggttgtgggggatctgtgtggggttctcaacgcagatccatcctggggtctcccgggcagggatggctgacctcgagtcccctcccttcccgagaacccgctctgtcccgagggcagctaacaagggctgagccccaggtacaggttgcctcctccacggcaggaatttttaccaaaaccacaagcaaaaaacaaaacagaccaccacgaccaacaacaaagatggggggtagggttttgtaaaggttctgttaggttcatatttttatatcattttgcccataaatgcggaatttgccgtgggaatttgaagacaaatgatctatgtttttatggttttctagggaaggtgttctgggggccgggctctctccagctgtgggaggcctgctccctctggggggcaccctgggcagggtgggggggccttgggaggcgcttcttgccaaatgcagacgaggggtgagcctgccagcgtttgcgacgtccccgcacgacaggctcatactttctgaggatcgtgcatagcataggacgtctgaacctttgtacaaatgtgtagatgacatcttgctacagcttttatttgtgaattaaagatgcatcgatggttaaaaaaaaaa

SEQ ID NO: 64323 - DNA, 491 bp, Homo sapiens
gctgaggaattcggacgagagaaataaaacgatctagttattgaaaaaccttaacccctatggacacactcacatacacacacaaaacacgtattcccaacgtgatttttcctaccgctgagctgcttttacctatgctgttttctctacctggaaagccccctcttgctctcctaggtgtcactgccaaaatactacctttcctataaggtccaggtatataagcaccatggacattatggagagagtagggggcatggggtccacattttgtatcactgtccaccactcccagcctggaccatctcacactgagtccctttagtattctgattcgtagtttacttatcctaaaaaatgggtcagtaaacctcttgctatggcacggtggctcacgcctgtaatcccagcactttgggaggctgaggcgggcggatcacttgaggtcaggagttcgagaccagcctggccaacatggtgaaaccccatct

SEQ ID NO: 64324 - DNA, 1500 bp, Homo sapiens
  misc_feature (1)...(1500): n = a,t,c or g
ttttttttttttgtacaataactgacttttgcaattattgtgtaatttacacaaggacaacccccaaattcccacacttcgtttttatatttctgccttcattattctttcaatatctacgtcaacagaaatcgtttctcccaataacatatgtggtttgatcctcagccaggggcgcacaggccctacaagagtcccagccctccaacacgggacacctggaccctcccccatttggactgccagcccttggtctgttttgttaacccggggcttctncctgggccccctggtcaccccctggaagaccgtccggtaaggtagggaaatggccaaacaggatctgtgtgatgtgtcaactctgagtaaatccaagagggctgcctagggagcccccaggctggagggattgagaggccagggctgtgtctggttccatttcaaagaatgctgtgatgcattagcagcgttctgctatgggcaacaacccattagaagcacctggaaggggggttttgggaaacgggctcagaaaggagcaaggtgtgtccgttccattcttgccttaggtggctgttccgttacccaggctatgctgtctcagtggccaggtggctgaggaggaagtctgaaggccgcatagttgcaagtggcttccctagggcctgcaggggacagcataggcccaaagctagaggaagcttggaagggcgcccacgctgggtcctgcggggctctgcatactgcaggccaccatggcgctagctccttaccctctggagtctgtctcatccaggagaagacagctggctggcctcagagcgttacatgcaactcgggtgaaaacatttttacatgacacagacacacaatgggctttacctctggataaacttagaaactttccatccaaacgaaaagggtgtatcttctgtatgttgccaagaagcctaaactgagtacaaggacgatcttactttaatcaagttccagaatgagggtacacagcttcgaaaagcagtctgtagcagaagatgcaagggtgtgtgtagccatgtttccagaatataccaaaggaaacacacacaaccccagtgtggccttttgcgaaccctcgatgctgctccatactgggggcaggcggctacttcgtccagctgactttgggaatgtcgtaatgctccgtgagtgtgtccaggtgtctgttgaagtcctccactctctgcttgtgggttttggatgccttctttaggatcctttccatttgccgcttctcctgcattttctcgaaggccgcctgggccggggtccgcttgtccaggccgcgccgcttctcctcctcgttctttttgctcgttcccattgcttccaggagtttcgctttgtctttgtccttctttttcttcttccgcttggtcactcccagctctgcgacgcctttcagcttcaggggtcccttttggacctgctcgtaggcctccatgacactctccagtgctt

SEQ ID NO: 64325 - DNA, 885 bp, Homo sapiens
  misc_feature (1)...(885): n = a,t,c or g
tttttgagggtcaaatatctttaaataaagtgccaggaacaataaatactgtacaggaagagagtgcacgtgaacgtccagatctgtggtttcaacctcgagactccaaggacctgcaaggggggtggacaagggacccgggatcagggaggctccgggtagacaagaggggcaggactggggttgcagaggcaagggcccaggtaagtgggctgagggatcccagccacagtaggttccgtatcttgggatggaaggaagctaagggctcccccagggatttggccaaactagcctggggtgagagcctgggccaagggtcaagggtcaggatcccagaggaggggccagggctggaagatccaggaagcactggcctggtttgggagcctggggttaaaggggagcccgtggaggccccaggggtgtggtgacccaggggctcacgagtagctctgatgctgttggcgccggcgggcagagcgcatcttctcgaaccgggcctccatctcctccagcactcgcggtgtgtaacggacaaccagcttcaccgagccctgggccgccttcagcagctccaccgccttctcatgctgctcaccctcaacgctcacaccgttcaccgacaacagttgatccccacgcttgaggcctccatggcggtcagccacaccccctgggatgacccgggagatgtagatgggcgagttttgctctttgccacccatgatgttgaagcctaggccctcatccgtcttgggtagctccactaccctgggatgtgcgtggccctcgctggctgtgaaggcagccactgtggcctttgctgtggcatgggctcggatctcgctcgtgccgaatctgcagcgaattccttnttccaca

SEQ ID NO: 64326 - DNA, 1258 bp, Homo sapiens
ttttttttttttattggactgtaggtttttattaaaacaaacatttctcatagctctaagcaaagcattagaattcatcaagcggactcacatcttttctctgcacagagagggctgaaaagggagagaaagtcccttatgtatgtctagatttggtaaagcgaaggatttcagcgaatgagtcactgaggctatacacgtttgcaaattgtaaggcactggcgggcagagagcacagataaaggacttctggggtcccccatcctgtccagcaacctcccagctcacaccttagcttctaccaagaagggtgaacacagcatccctgctatcttcactcagaccccagaagacacaggaaaccgcacagctccactcccaccataacttattaggagataagtcacattttatcaacttgccatcgcgcctcctatagattatacttcggtaaacccaatctgtataaattcctttgtactttgtgcactttaaatgccacgattgtgaatcacacaagcattgcccaatttgttgaaagcatttttactggaacctcaaaggcccaccatgtggggagcaattattttttaatacccactgggcaggacacgccggtgcccccaaggccgcagtagccattggggttcttgctcaggtactgctggtggtagtcttccgcatagtagaaagtctgtccctcccggatgtcggtagtgatggggccgaagccgtgctctgaaagaaccttttggtagttctctttggagctcagggctgcctccatttgcttggcagaggtcgggtagatggccgagcggtactgagtgccatggtcgttcccctggcgcataccttgggtcgggtcgtgattctcccagaagaccttgagcagttcctcaaaactcatgtgttctggctggtacaccactcggacgacttctgcatggccagttttttctgagcagacttctttataagtaggatttgaagtatagcctcctgcaaaaccaacttgagttgaatacactcctttcaagacccagaatttcctttcagctccccagaaacatcccattccaaatacagccatctgtgttccctctgggaaaggttcgactgttctgttgccattgacatgatgtttggccgctacaggggtctgttccttccggcccggcaaggcctcctgggggctgacgatgttcgaggccgagttgcccatcctcgggacgggaaagaggctgtggaggaggag

SEQ ID NO: 64327 - DNA, 1188 bp, Homo sapiens
ttttttttttttattattcaggcaatttattaaacattacctatagaatattatgatctgtattttacagaagttaaaaagtgatgtattagtattcataacaactgctccatgcaggagtaatagaagtcaacattaagcccaactctattttcagaccaaccatgcaactttagatcagaggacacatgggactctgcatcttaattcctaaatttacagtcaaagacattttcagagataagtattatgaattcaataagaatctaaagtaagttcttaaggcaaatagctataaaagagaagaatccttagtctctcatcttctaaaaacagcttcacaaataatttggaaaatcagcctaaaggtaaatagaaactgcatttcccctccattcttgaagccaatctttttcaagaaatgactaagcagcacctgttgttgaagacagcaataaagcctgaacctgacactcaagctttggtacaggatcagttttctggcttggactggtcaggagtcacttcactcagaatcttcattagtgattttaagcgattgtgcgttagcactatcttctctttcagctctgcaatcttttctgatagaggaacattttgaatatccatctctgatgcatttactatggcttttgtttttaagagatagcacaccattttgtcactggaaaggcagaagtgacctctcaaggcagccagggcagcatgggtagaatacagatggaaaccaacgggaatcccacaagaaccacagaataaaaggttgtaagtactgcctttgagtgaaccttcaatgccaactaggaagggcgcttccaaaacgacgttatttgtaactctggagaagaccacggccccgagggaccgcgacaggtcccaggcgaggtgcaccgagtcggcgagcactgcgtgacactgtgcgcactggaacacagcgcacctctcaggctgcagccaagacggcagctgcgggccggcggctggctcctcagcccccagccctgcggggccgagcggcgaggaccccttcaccacctgcgtatcccactccatggaggtcgtaaaagaagcttggtcaatcgccctctcagtgccaccacaaaagtccccccggggcggcgttgcacaacgtgagcgatgccgcagcggctgagccgccatcttccc

SEQ ID NO: 64328 - DNA, 1251 bp, Homo sapiens; identical to SEQ ID NO: 63981

SEQ ID NO: 64329 - DNA, 1073 bp, Homo sapiens
tcgctgtctcgggccgactctgacccccatgggccacacacctgtggccatgtcctgaatgtgatcattggctctaatgtgctggcgctagctgaggcccagcggcaggccgaggcactgggctaccaggctgtggtgctgagtgcagccatgcaaggtgatgtaaaaagtatggcccagttctacgggctgctggcccatgtggctagaacccgcctcaccccatccatggctggggcttctgtggaggaagatgcacagctccatgagctggcagctgagcttcagatcccagacctgcagctggaggaggctctggagaccatggcatggggaaggggcccagtctgcctgctggctggtggcgagcccacagtacagctgcagggctcgggcaggggtggccggaaccaggaactggccctgcgtgttggagcagagttgagaaggtggccgctggggccgatagatgtgctgtttttgagcggtggcaccgatgggcaggatgggcccacagaggctgctggggcctgggtcacacctgagcttgccagccaggctgcagctgagggcctggacatagccaccttcctagcccacaatgactcacataccttcttctgctgcctccagggtggggcacacctgctgcacacagggatgacaggtaccaatgtcatggacacccacctcttgttcctgcggcctcggtgatggcataggtcacattttgggagttcagaggaggcctacaagggcaaggtcagatggcagagcaaggttggtcctcagggcctctctaagccttagggcccctcctctccttggccttggctgtttggttaactgtcaccttccactcagggcctctgctctatatctattcccttccagccagactggcagatgggggcttccccctacccctgaggatgaggacaagcccctcggccagttcagcgttcccgtgcttctcccttgggcagcctctctcttgagcccctcaccctgtttctttctgtgaagcgagaatgtctgaaaataaataggaccatgccatgggaaaaaaaaaa

SEQ ID NO: 64330 - DNA, 658 bp, Homo sapiens
ctaatgagataatcaaatataacctgcagaagaggactgtggaagatcgaatgctgctcccaggaggggtaggccgagcattggtttaccagcactccccctcaacttacattgacctggctgtggatgagcatgggctctgggccatccactctgggccaggcacccatagccatttggttctcacaaagattgagccgggcacactgggagtggagcattcatgggataccccatgcagaagccaggatgctgaagcctcattcctcttgtgtggggttctctatgtggtctacagtactgggggccagggccctcatcgcatcacctgcatctatgatccactgggcactatcagtgaggaggacttgcccaacttgttcttccccaagagaccaagaagtcactccatgatccattacaaccccagagataagcagctctatgcctggaatgaaggaaaccagatcatttacaaactccagacaaagagaaagctgcctctgaagtaatgcattacagctgtgagaaagagcactgtggctttggcagctgttctacaggacagtgaggctatagccccttcacaatatagtatccctctaatcacacacaggaagagtgtgtagaagtggaaatacgtatgcctcctttccca

SEQ ID NO: 64331 - DNA, 570 bp, Homo sapiens
ggggattatgtagaaagatatgatcccaaaacagacacttggaccatgggggctcctttgagtatgcccacaaatgctgttgggggctgtctccttggtgacagattatatgctgatggtggctatgatggacagacatacctcaacactatggaatcctatgacccacaaactaatgagtggacacagatggcttccttgaatattgggagagcaggtgcctgtgtggtagtcatcaagcaaccttgacttattgatattttacttggaaagattttacttgctggagtggttatttttatattgaatggcaagaatgagaacttccagagatgaaaactcttcaagaacaaggatctctgtagcgttacctactgatgttgaaagagttagtagatcaaacagaatagtaggaaacaagaaaacattaaacttatacaggaaaaatgtctggccatatgttagttagttcgggaatggttattggtaatttgttttgtattatagcatacaataactagagttaccaaaggcttgttttttcttgagcagttgaaaggagagaccaat

SEQ ID NO: 64332 - DNA, 1391 bp, Homo sapiens
  misc_feature (1)...(1391): n = a,t,c or g
ttttttttttttaaaaaggcacataaaaatatttttattttctataaatacattaggaaatgtatttcttcccaacccagtccaccccattaactcaattttttctacataaaaaagatgctaataccaccctcacctgtgactgctaaacagagaaagattgcctggactaggcattatcctcctagttggaaataaaggccctttctgggggcaggaagtgggattttcaggggaccctacagacgtaggcagccaagagtcaaacaaaacaagcatatgcaatagtcataattatgctagtatgacagtatgaattaggtgactcagccaggcacatacaggagttcggagtggggacagtggaagcccacaaaactccatgtttgggccatcagtagacacttggtctgagaaacacagtaaaatgtctgcccgggtagtcacgatcattctagtatgaggtagacaggaagcagagcagggccaggaaatggaaggggccacccaggccctcaggagtccctgacaagggaaggtccctccatgctctctgagggtggcggggctccaaagatcctgggccaggagccctttgttggagcgggccttgtcctgggcagttgccaggcgagcccgttcacgtccccctggccgtgctgctttacgggccctcagttcctgctcagtaggacgctgggcaaatgtccaggagccatctgggcgagcagggtccccatcggccgcaagaaagcgttgtccccgttccacactttgaagatagaagtcggtctcacgcttggcttgagcaacctccgctctcaagcgctgcctgcgcacctggcgctcaaaggcgaggtgctcgctgaggtgggaccaggtgaaacggtgcaagtacttgaggttccaaagatcataacggaaggggctgcgcctgcgggcacccataggcgtgttgtgtagactggccgccacgcgcttggctatgcgcttgtcacggaactccacccatccctcggtgtagtccttggtgtaggaccgctttttccctccggcagctgctgctgccttcttcttgcgtctcacgaaccggtcctcagcctgaaagaagacgcgtccgacctcgccataggcgctgagaaggttgcggacgtgcaggggccggaagcgcggcgggatatggcccaggtacacaatacctggcactacccgcttcttgctgccacaggccgcttcttcggattcctcctgctcctcctccgcatctagtgtctgttctgtcccttccagcggctcttgctccgttgcggccttctccgattcctctgcctccatgttnntgcncnnncnaanngnnagacgaagtcgcangatggaannnnnngccgctc

SEQ ID NO: 64333 - DNA, 1352 bp, Homo sapiens
ttttttttttttgggtttggtttggttttgttttgttttgtttattgtggtaaaatacaaaatctaccgtcctacaaggagggtggcgttcagtaccttcaccacgccgtgcagccatcccatctgattccagaacattctcatcacccagaaggcagccctgtccccattatgtcacctagtcacccccaggtccccctccccagtcccggcacccacgaatcctctccctggattctgtgggattgggtctgtccggggacattttcataggaagtggggatcacagcggtacccttctgtgtctggtgtctctcactgagcgtgacatcctcaaggtgcatccgcactgtggcctgggtcagagcttcgcacctccttgtggctgagtctcattccagcgcgtgggtgcgtgggtggccgcgccgtgctgatcccctcaccttcactgggtgttcggtgttctccgcctcgggctgtcacaaatcgtgctgctgtgagccactgcgtgcaggtctcatcagcgtcgcaggcgggtcggccacagcaggaggctacagagacacagggcagcggccacgcccacgccgcccgtcacagccaccatcgcccagtggtaaaagctcacgcaggccctgcagcagagctctgaggggcaagggtgcaggctctggatggccatgactgccagcccattggccaccttatccaagaagctcatggagccgtacacgaacgctccgctgttcgtgtggggaccgatgaggtcggccgtcatggccagcgaggtgacgaggatggtggcacagccagcacccagcagcacagccgctgcgtacacggccacacccagtccctccgccagcgccacccaggcggcaaaggccaggatcaccaggaggcctgagaagtaggtcatgttcctcccaatgcacttgttgatgggcttcatgaggaaggaggacaagaagccgctgaggtacatcaccaggggaatggtcgcgatgaacttcttgggcaggtggagcgagtaggtgaggtacatggccatgtaggtctgggacaggttcaccatgagcgtggtggtcatgtacagtatgcccacctggtagaaagccggctcccggagccagtgcttccagagcagcaggggctgggccgtggcaggggccaacaggggggtgtgctcgcctggctcctccgcatgcggccggcgcctctcccgggtgcccaggtggaatagcagtgagaacccggcgccgacacccaccaccagcagggacaggttctggggatgcagcagaagcagtcagtggcggcgggcacagccgccgcccctggctcgacccggg

SEQ ID NO: 64334 - DNA, 729 bp, Homo sapiens
ggaaaaacctttagtcgtggctcagaacttactcaacatgagcgaattcacacaggtgagaaaccctatgaatgtaaggaatgtgggaaatcttttattcgtggttcccagcttactcaacatcagagaatccatactggtgagaaaccttatgaatgtaaagaatgtagaatggcctttactcagagttcacatctttcccaacatcaaagacttcacactggtgagaaaccctatgtgtgtaatgaatgtggaaaggcctttgcgcgtggcttactacttatacaacatcagagaattcatactggtgagaaaccatatcaatgtaaggaatgtgggaaagcctttattcgtggttcacagttgactcaacatcagcgaattcacactggagaaaaaccctatgaatgcaaggagtgtggcaaggcctttagtcatggctctcagcttactctacatcagagaatccatactggtgagaagccctatgaatgcagagaatgtagaaaggcctttactcagagttcacatctttctcggcatcagagaattcatactgctggagctccgttactctcatggggactttgagaatggtatctgggtgttatggatcatggagcagaaatacagaaggagtctgcaaccctgatgactttgtggaacagccatactagctctggtctgcttgcctcctgtttctctttaaataaaattaaacatcttaaa

SEQ ID NO: 64335 - DNA, 1618 bp, Homo sapiens
  misc_feature (1)...(1618): n = a,t,c or g
cccatggccacgggtgatggcgccaagaccctggccatccacgtgaaggccctgacggcagactccatccgcatcacgtggaaggccacgctccccgcctcctctttccggctcagttggctgcgcctgggccacagcccagccgggggctccatcacggagaccttggtgcagggggacaagacagagtacctgctgacagccctggagcccaagcccacctacattatctgcatggtcaccatggagaccaccaatgcctacgtagctgatgagacacctgtgtgtgccaaggcagagacagccgacagctatggccctaccaccacactcaaccaggagcagaacgctggccccatggcgagcctgcccctggcgggcatcatcggcggggcagtggctctggtcttcctcttcctggtcctgggggccatctgctggtacgtgcaccaggctggcgagctgctgacccgggagagggcctacaaccggggcagcaggaaaaaggatgactatatggagtcagggaccaagaaggataactccatcctggaaatccgcggccctgggctgcagatgctgcccatcaacccgtaccgcgccaaagaggagtacgtggtccacactatcttcccctccaacggcagcagcctctgcaaggccacacacaccattggctatggcaccacgcggggctaccgggacggcggcatccccgacatagactactcctacacatgatgcccgcccacccgggctgccccgcctcagccccagctgccctggcgtggccatgtggctttgcccagcctgctgcaatccaagagagcaaggaagagaaattccatgggtgactttcctccgcagaaagcaaagtttggggagggctgacgattttgtagaacacaacagtgacaattttttttaaaagaatagaaggcaggagggggaattcgacattgttgaagacataatttataccaagttatgcccagttggggagggaaggactaaaaataatattgcaggcagggctgggttgggttttttttttttcccccctgaactggaaggatactacctgtacaacatcttgtggacacctcatgctttgttcaaggccatcacaaaggaaccgcccagggagaagcagccggctctcaaagctcccacgcagttttccccgccactggccactcgctggcgacccgatggaaggttttcaggctcctcacaaaggagagagggaagaaaagatcttttgccctggagatatggtcctgaaatctctcccctggcttattccataccatttcccttgcagatttgcagaaacatggcatctttcactgcattctttgaacaatcatgtagtcgattaaaaaaaaaaaaacaaacttttttttcctaggctgaagcccttttaagttccatgcccccccctccgaaaaacccccgggggaagccgtaactttccctgccacctggaggggcatttgtctgcctgtctatccctgggggggggcctctaaatacagaggggtaaatagagccacatgcacggtccttaccgttttttttggngcagttcttaccatttcctgaacaataaaatggg

SEQ ID NO: 64336 - DNA, 2384 bp, Homo sapiens
agacaacttgatagccacagccctttgtctttctggcagcgggtctcagtctgatttgaaggatgtggccagcacagcaggagaggagggggacacaagccttcgggagagcctccatccagtcactcggtctcttaaggcagggtgccatactaagcagcttgcctccaggaattgctctgaagagaaatccccacaaacctccatcctaaaggaaggtaacagggacacaagcttggatttccgacctgtagtgtctccagcaaatggggttgaaggagtccgagtggatcaggatgatgatcaagatagctcttccctgaagctttctcagaacattgctgtacagactgactttaagacagctgattcagaggtaaacacagatcaagatattgaaaagaatttggataaaatgatgacagagagaaccctgttgaaagagcgttaccaggaggtcctggacaaacagaggcaagtggagaatcagctccaagtgcaattaaagcagcttcagcaaaggagagaagaggaaatgaagaatcaccaggagatattaaaggctattcaggatgtgacaataaagcgggaagaaacaaagaagaagatagagaaagagaagaaggagtttttgcagaaggagcaggatctgaaagctgaaattgagaagctttgtgagaagggcagaagagaggtgtgggaaatggaactggatagactcaagaatcaggatggcgaaataaataggaacattatggaagagactgaacgggcctggaaggcagagatcttatcactagagagccggaaagagttactggtactgaaactagaagaagcagaaaaagaggcagaattgcaccttacttacctcaagtcaactcccccaacactggagacagttcgttccaaacaggagtgggagacgagactgaatggagttcggataatgaaaaagaatgttcgtgaccaatttaatagtcatatccagttagtgaggaacggagccaagctgagcagccttcctcaaatccctactcccactttacctccacccccatcagagacagacttcatgcttcaggtgtttcaacccagtccctctctggctcctcggatgcccttctccattgggcaggtcacaatgcccatggttatgcccagtgcagatccccgctccttgtctttcccaatcctgaaccctgccctttcccagcccagccagccttcctcaccccttcctggctcccatggcagaaatagccctggcttgggttcccttgtcagcccccacggtccacacatgcccccagccgcctccatcccacctcccccaggcttgggcggagttaaggcttctgctgaaactccccggccccaaccagtagacaaactggagaagatcctggagaagctgctgacccggttcccacagtgcaataaggcccagatgaccaacattcttcagcagatcaagacagcacgtaccaccatggcaggcctgaccatggaggaacttatccagttggttgctgcacgactggcagaacatgagcgggtggcagcaagtactcagccacttggtcgcatccgggccttgttccctgctccactggcccaaatcagtaccccaatgttcttgccttctgcccaagtttcatatcctggaaggtcttcacatgctccagccacctgtaagctatgtctaatgtgccagaaactcgtccagcccagtgagctgcatccaatggcgtgtacccatgtattgcacaaggagtgtatcaaattctgggcccagaccaacacaaatgacacttgtcccttttgtccaactcttaaatgacggacctgactggggaggaagaagaagagaaactgatgtgaacaggaagcgcgggttcaagatttctaaaactctatatttatacagtgacatatactcatgccatgtacatttttattatataggtaatgtgtgtatagaaagtctgtattccaatgttcgtaaatgaaactatgtatattatgcagaaacagtctgttccccctcatcttgcaattcctttgggggatgcagattgtagggaagatgatgtttagtttggccttgaaattatgatatccctgcccagggctgttttcaaatacaatataaaaaccacctaggaacctgctgttgctctaaggccattctgctttggtttggctcagcctctagtccatttccttaaggctcatgtatgcagatttaaagcctggtgctcacccactgtccaaccagatgccttgcttaccgaaagcctccagaagcctcagtattgttttagccactctactccaaatggataaaatgagactctgattgagaaaaaaaaagtaaaaaa

SEQ ID NO: 64337 - DNA, 1695 bp, Homo sapiens
  misc_feature (1)...(1695): n = a,t,c or g
ttttttttttttgcaaccttgaatttattttttattgaaacacagtacagaaaacaccaaacgtcactcgacagcagtgagctcatagctgtaatggagttggccccagatgccaaaccacctctgctgaggtgtgacttcctctggagggtgacatggtcaaggaaagggaaggtgttctctgtcaaattcagagaccatgtgcacctccaacaaaatcacactccctacaagttccagtgtgcccccagtgggcaccccgtgggcacatctttgacaatggggaaggggttaacgggaagtaggtggggggacatccaaccccaatggggcacatacccaggaatgggaatgtaggctgctgagtcttcttggagaagaagagagagctatgcccacagttcagcttgtggggcccctgagacaagggcccacagtgtgcggagaggattccaaaggaggaggaggatggtgacatggacagtgactctggggctgcgggccacgatgtggcaaaaatggagcagctgggtggaggcaagatgaggggctgaggagtggaaagacaccagaatggggcagggagagcaattccactcagagtggagcagggaacagccagcatattagggccaagacccggtcagccagcttcaaccccttcacacgcaggatgagctcatggaggttgatctgccataagttgaaggcctcgctgaaagagatctgggtccttctgaagaatgaacaggtattcttcttcttgtgctcagctagcgctctgatgcagcaacgtgacatgttgagaaaggagctggcgctggcgcgggtgcccagggcggcctcaatgccacgcagcaggtcgttggtcttcaagatgagcagcatctggcgcggcacgtggttgaggagatggctgatctgggggaggtagttggccgcgttgttgcgaatctctaagtcctcagtggcagtgacgggagcttggctgatgcctctgttgaccgagtcccacgatcgcgccgtcagcatgcaggcaaacaaggggtagagatccccggctcccagtcgctggctgtactccttcactctcttcatgtcagtccagatcagagactgccagaggtggcagtaattcaggcggaattcttccgtgagcatctggtaaagcccatggtccaacaggacaatctccgcctttcccgtgccggggtgcttccgcaccagtacattgccggggtggggatcgcagtgcacgaagccattgacgaagatcatctcactatacatcttgcccaggtggcgtgagatctgaaagagaagaggggcaggtgggagctcctctccactcacatctatccgagggacctctgtctggtctctcaatgtggtcacttttaaggggaggccagagaaaatcggtgggccggagcggttgtggtgggagtgattgtttgagatgacatactctttgagtttaagatttcttaactttagctgcaccttagaatcatgaaaccatgtgggcggtacaaggcaccagtattttttaaagttcgaggtgacgtgaacatgggattaggtaggagaactgcactctccacctcccacacccgccccccgacttgtcccccatttctctcccctcgtgccaagcttggcgtagttatctaatagcgttttcaatnngccccc

SEQ ID NO: 64338 - DNA, 958 bp, Homo sapiens
ttcgtgccgcaatacatttattattttatcacatatttacattccagtaggcagcctgtccccctgtccaacaaggccctttggtcctcactggtcggcctgctccagacccccaggtgcaggcgcgtgtccggagtcgaggctccgcgatgtcagacgttcagcaggaggggccggtgctcctcgtctgcagcgtcgctgggaggaatttcataaatgacaaacagggaggagtacaggcagcccaggaaggacacgaggctggagaagtacatcaccccgttggcactgcccacggccgaggtcaggggccccaggaccagggagaccagaatctgagccaggaagtactggcagctcagcagagagatgtccacgcccatgccccgccgggtgccgtccgcactggaccctgcaaacttcttactctgatagtaatcgcagagcagcgagtaaggcaaggtgcacagggtggaaaataaaatcccgtaggttatgcagagcgacaggaccacgtagaggttcctggagagggtggcaagcccggtccccaggccgaaggcgagataggcgatgaagtagagggtgcggacgctgaggaactcctccagcttctccaggatagctgagtagaaggcagcactgaaggcgtagatacacatgccccagcagcccatggtcacgccgctgttgtacttctgatacgcctctgatgtgtgcggggccttggggtccccctgaaacaccacctcgcccatgaagtctgtgtagaagagcaacatcccctcgaatgagagccaccccaggaagtggttgacgcagagggtgcgtagcgccttgggcatgttgcagatggtggagcagaggcgccccacggacagaggctgctccgcgcgctcgctggagcccgtcagctcgctctcatacttcacgccgttgagcaggatattggccaccc

SEQ ID NO: 64339 - DNA, 2124 bp, Homo sapiens
ttttttttttttccagagacaacttctaagtttctctttatttcttttggaaacaacctccattcttcatctctcaatgtagtcctggcctagtgaaaaagaaggcttttctttctggcctccagagactgcttcctttgtaggaaaaggaacaataaacacttcccattaggtttctgtctccagataccaatcagggaatgactggccaggactggaacttaacggccttgagaacatgtgggatttgtctttgagccccattggcttgtgatgttttcctctgtcctccctgagacagttgctcctgtcctgggggggctctgcctccacctcccagtccaggatgtctgaggtggttgcaggctgcttgctgcccagtttccagtctgttctggtccagggaagcaccaccccatggcccttgctgcttctggcaggggtcctcaagagctcaccatgtcccagtgctggctcatgagtgaggactcacatgggttgacgacgatttccttgccgttctcggtgccatcaccgaacatatctgtatcgaggcagaggtgggatgctatgtgctcgatgtgggaaccagttttggtccattgctgtcggtcatctccattcttgcaaaggacaagaaccactggggcgccagggaacaaggtgatgactgacaggcacagctcctcctggaggatctgctgggtgtatgtgaaggcccatacctgggactttgcatcttcgcctttgaccttggcacaggggctcaactttaggtttggggtttcttggttgttctgcctttgagattccaggcacttctgtctctgtcggatattgcccttctggatggaggactccttggggatgctgagttcagggtagatattctccaggtaccacttgaagctctggcagcgcagattcttcctcaggtccaatctgctctcaacattcccgaagggcctctccagggcgaatggccgggcagcgtaatagtattgcttgtattcatccatccacacttcagctgtccgcttggtgttctttatatacgtgttggcatttccatcagggaaaacgtaggggtgcttcttccggaagacgtgccccactcggctgcaggggacgatctctaggctgcccccgcacatccacactcggaaggagatttcaaagttctccccaccccagatgtccatgtccatatcatatttccccaggtaatcaaaccaagctttgtcgatcacgaagagccctccagctatgataggagtcctgatgggctccgtggggtccaggcgccgagccttctgctctggggagagctgctcccactggaagtggaggctccagtcaaacccccctctgagctccgaggcagactcgatgtaggtgaaggtgtccaggttaatgatatcgatcacagggcacaccacccgcgtgtagtcctctttgaccctgtgcaacagaggctggagccagtccctgttcacctcacagtggctgtcgaggaaagtcagagtggtgccctgggcgatgtcagcgccccgaatccgggaccggaccagaccttgccgttcattattgcgcaagcatttcaccttgggcaacttgatgagctgtttacagtcatcagggtcattgctgaagtcatccactaatatgatttcccggatcagatgcgtaggggtgcggtttaatacactgcggatggtcctgagcagcgtggagcgggcctcgttgtggaaggtgatgatgatgctagtgggtggaaggtccgtgcaatacaccagcagtgtgcatctcagatggcgagtgtccgggatggcccgattgctggagatccgctcactctcccgctggttgaaagcatacagcttataggggtcgtcaccaacgcgccactttttggcattcagataccgccgctcatcaaactggtcccacaggtcgtcccagtcagcgtccgaaggcttaggggtctgcacttcaggtcccgtcggcacctccaacttcctcttggttacccagaagaacagcagcaccgtgatccagagcaccccgaagactggcagaaccagccgacgagtcaggcgccgcatggtcccctttgccacgaaa

SEQ ID NO: 64340 - DNA, 1004 bp, Homo sapiens
aaatgcttacgccaagcttggcacgaggctccctccagcttagctttcacccggtggtgttcccgggaggagagggcggagggcggagggaacttgcaccgaagcatcactcgagaccccaaacctccaggcctgaggcccagccagcgcccaatggatgacaaaaagaagaaacggagtcccaagccctgcctggcccagccagcccaggccccaggcacactacggagggtccctgtgcctaccagccacagcggctccttggccctaggacttcctcatctgccatcccccaagcagcgggccaagttcaagagagtaggcaaagagaagtgccgcccagtcctggctggaggtggaagcggctctgcaggcacgcccctgcagcactccttcctgaccgaggtgactgatgtctatgagatggaggggggactcctgaacctgctcaatgatttccactctggccggctgcaggccttcgggaaggaatgctcctttgagcagctggagcacgttcgggagatgcaggagaagctagcccggctgcacttcagcctggatgtgtgtggggaggaggaggacgatgaagaggaagaggatggggtcactgaggggctgccagaggagcagaagaagacaatggctgaccgtaacctggaccagctgcttagcaatctgggttcatgtctgggtgctttggttcctgggggcatgaggggtggagaaggtacatactcccaaagccattcctgggccctgggtgaaaaggtgggagtgcatggatccaagagctctgggcccctcaacctccccagaagatagcccccagagcattggggatttggcctggttcccctcctaacagaagcctccctttttctctttgttggcagctggaagacctcagtaattctatgtatcctttccaaggaacccgtctatgtgtgtgtgttcctgagaggtcagtttcctcccacgcgtccgcggacgcgtgggtcgac

SEQ ID NO: 64341 - DNA, 1490 bp, Homo sapiens
aagtctgggaagttgacgagcagatagatcactacaaggaaagccaagacaaatttctgtggcaagctgcattcataggcaaggaaacactgaaggatgaaagtggtcaagaatgtaaaatatgtagaaaaatcatttatctcaacacagactttgtttctgtaaaacaaagactccctaaatattattcatgggaaaggtgttcaaaacatcatttaaactttcttggtcaaaatagaagctatgtaagaaagaaagatgatggatgtaaggcatattggaaagtatgcctccattataatcttcataaagctcaacctgcagagagattttttgaccctaatcaacgagggaaagccctccaccaaaagcaagcccttagaaaaagtcagagaagtcaaactggggagaaactctacaaatgtactgaatgtggaaaagtgtttatccagaaagcaaacttagttgtacatcaaagaactcacaccggagagaaaccttatgaatgctgcgaatgtgcaaaagccttcagccagaagtcaaccctcatagcacaccagagaactcacacaggggagaagccctatgaatgcagtgaatgtggaaaaacctttatccagaagtcaactctgattaaacatcaacgaactcatacaggagagaaaccatttgtatgtgacaaatgtccaaaagcctttaagagttcatatcatcttattagacatgaaaaaacacacattagacaagcattttataaaggtattaaatgtactacgtccagccttatatatcaaagaattcacacaagtgagaaacctcagtgcagtgaacatgggaaagcctctgatgagaagcccagtcccactaaacattggagaactcatacaaaagagaacatttatgagtgtagtaaatgtgggaaaagcttcagaggaaagtcacacctctctgttcatcagagaattcatacaggagagaaaccctatgaatgtagtatatgtgggaagactttcagtggaaagtcacacctctctgtccatcatagaactcatacaggagagaaaccttatgaatgcagaagatgtgggaaagcctttggggagaagtcaacccttattgtacatcagagaatgcatacaggagagaaaccctataaatgcaacgaatgtgggaaagcctttagtgagaagtcaccactgattaaacatcagagaattcatacaggagagagaccctatgaatgcactgactgtaaaaaagccttcagtaggaagtcaactctcatcaaacatcagagaattcatacaggagaaaaaccttacaaatgtagtgaatgtgggaaggccttcagtgtgaaatcaactctcattgtgcatcacagaactcatacaggagagaaaccttatgaatgcagagactgtgggaaagcattcagtgggaagtcaactctcattaaacatcagagaagtcacacaggagataaaaaccta

SEQ ID NO: 64342 - DNA, 956 bp, Homo sapiens
aacgccgcccatggctacaactggggcctctggtgcatgtacatcatccccccgcaggactggctggaccgcggcgacgagtcagcacccatcaggaccccagccatgatcggctgctccttcgtagtggaccgcgagtacttcggagacattgggctgctggaccccggcatggaggtgtatggcggcgagaacgtaaaactgggcatgagggtgtggcagtgtggcggcagcatggaggtgctgccctgctcccgcgtggcccacatcgagcgcaccaggaagccctacaacaacgacattgactactatgccaagcgcaacgccctgcgcgccgccgaggtgtggatggatgacttcaagtcccacgtgtacatggcctggaacatccccatgtcgaacccaggggtggacttcggggacgtgtctgagaggctggccctgcgtcagaggctgaagtgtcgcagcttcaagtggtacctggagaacgtgtacccggagatgagggtctacaacaacaccctcacgtacggagaggtgagaaacagcaaagccagtgcctactgtctggaccagggagcggaggacggcgaccgggcgatcctctacccctgccacgggatgtcctcccagctggtgcggtacagcgctgacggcctgctgcagctggggcctctgggctccacagccttcttgcctgactccaagtgtctggtggatgacggcacgggccgcatgcccaccctgaagaagtgtgaggatgtggcgcggccaacacagcggctgtgggacttcacccagagtggccccattgtgagccgggccacgggccgctgcctggaggtggagatgtccaaagatgccaactttgggctccggctggtggtacagaggtgctcggggcagaagtggatgatcagaaactggatcaaacacgcacggcactgaccccacct

SEQ ID NO: 64343 - DNA, 855 bp, Homo sapiens
gggccttctcctcagtatagcactccatggtgctgaggttctgcagcacacggtcgcgctccagctgtgtgtctcggatcttgttctgcagcagaatcagcttttcctcatactggtgcttgagcgtctgcaaccgccgctggctgttctccagctcgtcgatcagcttctgcttgatttcgatctcacaagtcaggtcggccaggtccgcctggaagttcacctccttctcctcggggtctgagtctgagtccaccaggctctcttcactgcccgagtcctcatcttcatcctcgcgcccttcctcctcctcacagccactctcgtctcgctcttcctcctcctcctccgcctcgttctcatccgtctcctcgctgttctcctgttggagttttgccctctttttgaaggcttccttctcggggctcttcctccgctgcctgacctccttcttctttagccgctccaggtcctgcttggccctgcggatcacctccgaggcatcctccatggagctggcagggctgcccccgaaggccggggcggctggagaagcacccagggagtaggggctcctagccgaggcccgtgagaggctgcggcgcagggactcgttcatggcttcactctctagaagcttagtccgtagctcctcgatctcccggatgtagttctggatcagcgcaccaatggcctcattgccatcgccggccttggctagcagcaggttggcctcctggctcatgagctgggtgacgcggttgttgatggcatcgatggcctcctgcatggctttcacccgcagccgcagggccccattctccttctgtagcatggcattctctcggaacagat

SEQ ID NO: 64344 - DNA, 1666 bp, Homo sapiens
  misc_feature (1)...(1666): n = a,t,c or g
gcggccgcagcacctgatttccccctcagtggaatttccaacacactgccctgagtgccccagttaggcctggcacccttggctggtgggaggggcaggccctctgcctgtctgcttacagaagcccagggccagagggtggtggaagccgggtagacggacatgtcttgcccaaagcgcatnatgaccagagagccaggcctgcatacagtagttggaggcatggggcagaaagcactcccctccctcgagcactcacctcacctccaggggcaaaccccagcaagagacgcacccagtggttttccagcccacaggaggccctgccctcattggccccctctctcctttctgatttgggcccaactgtcgccgtggagcctgggccaaaggcacttttggaaacacggatgccagtggaggccacagcagctccgggccccatggggctactgccactctctctggaaaacaggccggagccccggaaggagccccctgaaggccactactggcagggcagtgcccagtggcatctctcttctcttctgttcctctggttggtgcagctgccaatctgatgccagacagacacccaaaggtgtggaagggtattgcatctcttggcaagttcacagtctgtccggttcctgccattccctcctcctcctgagagcagcacgttgcatatgaaaaacgtcccatccaggatgcaatgtaaacaatgcagaaggaaggtccagccgcggggctgagcagggatgtccaggtaggctcctgccttatacctccgtggcaatgacacattcattcctctcctctgatatcaaacacacagactggtacatggagtccctgggggagcatatcgctgatatccgacactctggcttttcactgtgtaaccgcagtggcgccttctctcctaagctcttgtcactgtggggaaactttcctggcatggtcccccgccccaggggccctggggccagattatagtccaatgtgtggttttgctgtttgccacagttggacttgtccaggccacagtccacttccagctccttcttctggtttgtgtttttaagctgggcggcaggaatcaggttgtccttctggaagtccgacaagttgttcatggcttccctgctgccgtcgtccggccgtcgaagccgcagctgccgcacagccactgccaccatgcccagcagtaccagcagcactgccagccccacacccagcgagacggccacccaggggaagctgggcggcaagcccacggggaactcgcagcggctgcccacaaagccataagggcagttgcacacaaaggtgtctgtggagaggtcggtgtagcaggtggccctgttgaagcagggactcgaggcacaggcatcgatggatgtccgcacctcacagcgtcggccagagaagccggcagggcaggtgcacatgagcccattctccaggtcatggcaagtgccaccgtgggcgcaagggttacgggcacagtcgctgacgtggagttcacagtaggtgcccgtgaatccaggacggcagcggcacatgcggcttggacctcggttcaggcactgtcccccgttggcacaggggttgctggtgcacctgtccactttcttctcgcagttggagccggtgaagttgg

SEQ ID NO: 64345 - DNA, 6506 bp, Homo sapiens
ttttttttttttcatgcttagtgttttatttcctcaaaggagccacgccattggccttcccaaatacctcctggtatccttccaatttccaccactcccaaccgtcagattccattcagcttcctccaacctcagaccaaccactttcttttcacaagctcagaccttccaaatattttaaaaatgaataaatgttaaataccaactttcactattacagaaaggggcagctagaaaagtttactctgtgcacaagactgcgacaccccgctcgtagaagctgcgaggatcctcctttgtagcaatttcgaagtccacggtgaagatgaggtctgcacgggtgaagttcaggtagacaggtaaggttaccacactggccttcttctcggtgtttgtctgcttgacccagcgcagctgcgtcaggggaagggcggttgagatggcattggacagtgacagcttgttgttgttgcacgtggccccttgaagtttcaaacccgtgactccgaagctgcaagcgtcaagggtggcgccctgtgaggtggtgacgttgacttccaggcagagctcctccagggaccagctgttggcctgggccacatactgcctggtggcagtgatgtacgcctcaggcacgaacaggccacccaggcacacgtggatgttctttagctccttggcgccaccagatgcagctgccagtgagatgttctgcagctgtttgatcctctcgctgaagtcggacacccactggatgacggtcatgccggcaggcaccgtgtagtgggaccagctccgaggcaagatccctttcactagctcgttgatcagcgtgcgcaagtagttggtctgcttcttctttccttcgcacacctggacgacatctgcaaggtcctggcgaacgtcctgaagcagctttgcgcccatcttcacttctctctcaaagaacctgaacaaaggatccttgatattctccacggtgcgcttgaggtggctcagcgtctgggggatgaggtgcagccagttggacgcggtggtgtgcagtgtccgcatccaggcagggcgcccgtcggacgtggagtctgtcctcgtcttcttctcagtctctgcgtaggccaggtcgtcctcatcctccaacatctgcatcttcagcattttactgatcatgtccacaccctgtgtggtaaggaggactctctcggcgttgttgggcaggcccagccaggagggcgtctgggtgtcggggagcaactccacccactgcacaaactcctctcgcctgatgccatctggcatttgaatgtctttatgtccgtcgaccttgcatgccagcttaaactcactgtcgaaactcctggttgtgaacaggcgctccaggaaggtgttgagcagacgctggtcaaactcgttgtccacgcgcccgccataaatggactgggccattaaggtctttagtgcagaccacgggatcttatccggtgagatgttctgcctgcccttggccgtgtcatccagccacgtgtccaccgtatcgcaagctgaccgcaggtcagactctccaaattcatacttctttgaccaccccagtggtgcgtatcgtaagcgttcttggatgatcgcatgaaaccaggccagcaggaagtacaagcgggcacgctcgttgggagacttgcatatccgtgagacgggaatgctgctgaacgtcctcagcatgttggccttcacccctggcggtggctcgaacacaaagatgcggcccgcacggagcagattcacaggcaccttggggttgatctccatggtgaggaagagtcggaagcaggcatgcggctgcagggaatgcaacttcttctccagctgcatcagccaccctggggccagatgcacattcttcagcatcacccacctgcccgactttacagcggtgtttattgccttatctgcttggttaaagccttctgcagagccgattgcaattgaagtgatctgcgtgttctgctcggctgcaaggtcctcgacatgtccactggcatcataaccaggcacagagcacattaagacaggagtgttgggcttcacctctgtgcccacaatttgggtcaggtcgagcggctgctccatgatggacatgaaagactccccaaggtttgttgaaacaaacatgtgggccatggccaacaggcgatcgggccggaaagcctggatcaggagcaggcggtggatggcctggccaatgggtgttgcaggtgtttcttcactccagaggtagggcacagtctgctccggggagctgctgtccagccagatgccaaattgctcgtctgcctgaacctttgcaatcaagtccttaaacgcgggaaggcagctcagcctcaccaccgcctccgcctgctccacagtcaggccctggatcctgggggtggagccagcactcaggacaatctcatttcctctcaagaagtgctggaattctgcatcgtaggtgggctcccccacggtgcccttcagtttgattcttgccagcagcatggcaaaggtaatgtggtcctgatgcagcatgcctcgagccactcggttaaacgccacctggaagaggtcctttgttataatggacaggcgctgtgtgtggtcggtgacacccttcaggttcgggttctcgtataggacgttgtgataaatgtccaggaaaaactggagggagtactggtacaagaagtgtatctgcttgagggactccatggtgaagtagatgctgctgcaggcggtggagagcgggaggtactgctgggacacggtctccacctcctgcatgacaatgtccgtctcctcaactttcctggtgacctctgcagcctctctcttcaggttctccagagtggttatgatcgtgtcgtcatccaaaatgcgccctttcacctcgttcagagcttgtagtagagatttttccagctgacgcaaacggagctgaaattccccttgaagtttaagaagatcagatcgtttctcgtccacatcaggtctttctgctttaagtacttcatttagacactggctttgtaaactgctacgggtaactgtgaagtttacaaaagtaacccgggaacagagatctggtgggaactcgacagttggatcccgggtggacaggaagatgacaaacgatggcgacaggtctatgtcctggtccccgagagtgatcagcactctcccccctgttcgccgcacttcacggttcagcaccgggttcaaaactggatcgtagctttccacatcctggaccagaagggggttaccgaatctcagtgcactctctaagttctttctgaaggcgtcatccaggaagctggtccgtgtgatcttacgatccttatattcattcataatgaattctgtggcctgtccagaggggtcaatgatcagcggatacctattgaatcgtttcagcatgatggcattttctgtgcaaaggtcatcagcaggcaaggagctggcctgccagcgaagacgctcatcagcattggaaaggtattccgtcctggcaatatctgtacggaactggatgttggcttgctgtaggtgatgggaccaggtagtgaacaagttctgacgcatctgctggtcaaagtaacccgcgtaggcaatgaacgcagctgacaagagacagtccccagcaatggtggacatctggtttttgaaagtttcacttgttttttcccatcgttcacgttcagcagacaagctcttcagaagagcagtgctccggtttacttttgcctcgacagctgccaggtctgccttgatggcctgggcctctgagatcaggacggcgtattcctccttgtagcgggcgatgctggcttccaggtctcggatcatctgctccacctcgttggccttctgctggttgtccttggcgtcatcttccagcttctgcagctcattgcgtaggggctccactctctttaacatgtctgcatagttaagctgtgcaattgcccatttcaccatagggccgcaagccagggaagcccgattcacaatttcataattgtaacttggattggacatgtaatttttcttcatcttctcccttatggcgtcactgatctcctctgcagagaagttgacgatggtggggatgaagttctcccgcatgatgatggagcggatctgcttccagtctgtggtgctttcccccagcagcaggcagatggactccagcgccagcttcacagcagcaggagggttggccatggacctcacctccaccaggtgctgcttcttgatcgacttcacagcattctgggcctcaatgacggcaggttccaccttatcaagatcttctttgacactcatctgtttgtctgcaattacctcctgctgcttatgcagctgttcctggatttcttggctcataaccttcttcttttcagcctcctgctggtctttcaccatctttttcagcttgtcattggctgctgcattcttcacctccagctcttggctctttatcctcaagtcacgacgcagttcttctacctggtcgactgtctctttgatcttcctgagccccacgttcaagtgcatctgctgctcctccagctcgctccgcttctcgtggaacaggttggcatagtgattgatgaagtccaggtagtggcgaggggtgatggccatcgttctgccgcctcgctttgctagccgagcattcgcctggtgaagagtctgatgaacaaacacacagctgttcacaatggcttcccgatgggatggtggctgcggcagcttatcatacacaactggcatgtaatcaggcacgatgtaatttggcttctccagatccatcttacttgtgaattctttgccaacctgatacagtgcttcggtggaccagtctccaaaccaattcaacacacacctgttgaaaagtgctggtgatgtagctgcccggtccttgagtccctccgaggacgggttcatggtgaacacgacgtggaggttgcggataacctggctagtgaaccacttgtagagctcctcgtgcgagtccagcatcaggccttccttctgtgccccctctttgcactgcgtcatcaaggtggcatactcgtctccttcaaagagaccaggcacctctccattggccagaagggtattcattcgctccaggaatccagaatctaacacattagattcatccattataaatgctatcttttcatttttacagccagaacgtctcaacactgtccgtagatcttcatcaaagtcttcccctgtgtacttcctatggaccttaatctggtacacactcaaaccgttcatccaggcgacgaaacgagacagggtagtttttcctgctccactaacaccaatcagaagcaagtggccttgaggttgacggaatattctgtcaatcctcagcacgtggtctaggacttcattaaacagcaccagcggaacatcaagttcttcttcataaaagaccttcagcctagctttgacataatctcttaactcttcttggtctactgggatgtaatcctttgacagccagttgctgtacaagatgggtcggctcattgccttctctctgtcgatgttagggaagtgcttcagagcaaccgtgtcgatgttctcatcagtccaacgcctctcctcatcctctacgagtctatcttggaagagacgcagagcttcatgtgcccaaatccgaatgaggccttcaacaggcagggtctccagaggtctcagcgcttcaaagatgcctctcacccacctagtcatttcacggggtgaatagatatagtgaggttgtgtatcctgggtgaatctctcctgagacatggtgtagaactccaccatggcagcagtgagcggctctgcatacgtccgcagggatggaatgagcctcagcatggcgcggttgaaggtgccgtagatctgtgtgagggaggcggggcccgggtaatccacatacacgacaggcacgtggcgcaggaacctgtgtgagaggggctttcttccagggtctgtggggggattacaagccccaacaaactggattctctccagcttcacccatgtttgatctgaggtacggtaaaagcctccgtgctccaccatctgtctgatgaaggatatgaccctctgggtcccatatttatccatatctggcaagttgatttcatcacagaacaacaccagccactttccaagttgaacaggagccaaaaccaccccattaggtgtgcgcctgtactcgcagtagtgatcaaaagtcttcagaagcagctctggagtagtagcactggagaagttgagacccaccacctccatgtcaggcaaggcccggagggcgctgaagagtgtcatggtcttgccagacccaggagggccacacaagaccaggggcttgtgttcggccagccaagtgtacaagagggcttcgtggcggactgtgtccagcgttggcacgacgacatcaggggctgccaccttgtgcg

SEQ ID NO: 64346 - DNA, 7061 bp, Homo sapiens
ttttttttttttgtccgtaaggcttttattataaagaagattccagagtcccagctgcccccctccagcccccatgggctctgagccagtcccaacactggctgagttggctgcgaggggcccgcatggcccatcggccacagagggtcgtttctggcaggaacggagtgggtggtagtctcaggcgccaggggcgctctgccaggtctgcccgctctctggaacagtcatttccagtgttgcatggggagcctctcgggacccctccccgggtcctttgcgcaagcggcagctattcacagttggtgcatgatacgttttttaatatataaaagctttaaaaaaaaaagtggtgctatctttagaaacactttcagcaagatcaagtagcccagctacagcctcggtgcatcttaacccctctccttttcctggagacggggctcccagctcctgtgccccccatccctcccctccaccctccctgctcctggagaagcccacagagcaccccatggcgcgggcactgcccactctaccaacagccgcccaagcaacaaaaatctgacactacttgaaactgtctgtggccaggatcctctacgggtgagggggaagtggagataacattttggtagttgaagcagaaaccaatcaaaggtcagttcaaggagggctccctgcaccagtgtggatgaggtagagtttctgggctgcagcctccgggctggcggcctcctctcccccagtttgtgcttggccgcctggatgcacggggctcttggcagcaggaccaactggacgttgtggagcaagtgggtgggcacagtgcaggccgtgctgggcagatgggggagcctgaccagctctctggcctccatcccagagactgatctggggacaggtgggaggggatggaggtgcccaggggtcaaggcgggggcgcccctgtctcagagagcagcccctcctcctgcccccgccccagccgtctctgctcagtatttcccagtctgagtcacaggcacggggtagaagatcaagttgaggcccagtgggcgtccatttctcccagcagcagcctgaccaactctccatgtgtctcaggcctcactgtagcactcgtagatgttgtcctccatcaaagccaccacctgctcaaacttgtgctgcagttgtgtcctccgggccgtggggttggcctccagcgcggccatgatctgcggccgatacctcttggcgtacttataaatctctgccatggccacattggtgttgaactcattctggtatttcctcgactcctcggccagatgggcattcatctcttgctcgctgagcggcgtcatgtcctggatctgcttgtagtagcgctgcacgatcttccggtactcaggaatctccttggcgtagaggagcttgttggttggcgaatccttgcccagctgcaggtcagagatggagcaggcgtcgatgaaggcctgcgcgatgactgaaaggcaggcgtcgatgtggtctgtcttgtcgatgtcaaagacaaactgggggttcttcaggatgttcacccagaaccggagaggaaggctgttggtcttccagatgtgtagggtgtcggggtcggagattcccctcttctcagcctgctcctccaggaagtcgaaaaagtacttgacagccagtgggggcttgtcttcacggatactcagaatggccttgaacaggtcatccagaaacttctgcaacgtgcccttggtggagagcaggcgggtcaggtagatttccgggagcaccttcttgcgatggctctgccggtgagacttcttgggctccgccagctcgtccgtaggcagcaccaaatggaaatacttctctgtgtccaagtctttcactcggcccagtgtgttgtccttcttgtctatgagactcatggccagggaggcaccttcagggatcttgtaatgggccagcgtgttaagcttcttgcggccgtcttccaccactgaggtgtcgtccaggtcccgaaggatgtagctctgtgtgctggaggcgaaccactcaaggtcgacgtcctctgcacgcggccactgggagtagggcacattcttgcagaaggcctccaggatcttctccttgacctgtgtcagcgtgtcggtgtccatggcccgcacgctcagcgagtccatgccacagccctggaaggacacgttcaggttccggggcttggcctcgatgttctcccgcagcagccactcctcattgagtgtgtagcgggccttgcctgtgatggcgtcgatggagcccttgttgatttgctgcttgatggcacacagcagcaggaagaatggctcccccaccgtctcccgcagacagctgtacatgcagatggacatccagttggtgagcatcttctccaccacagactctgtgcgccgcagcatgagcttggggttcttggcggccgaggcatcaatgaggtccaccagcagctccttcatgatgctggtgtagtactccagcttgccgtgcagcgcgatggtcagcagcgaggccaggctgcacctgtcgcgcaccgcaaagtccttctgctgctccagcgcgtggacaaagacgatgaggaagtgcttgttgtcgagtagtgaggagaacaagctaattccctcttccatgttgggccggcagctctcaggaatcttccactctcccagcagtgggtgggtttcctgtgcctgggagctgccctgggagttgagggtctgggagggcagcacgtaacgctcttcataaagggaggaacacttggggaagaaggtgcgggtcacgaagtgcttatactccaggaaggggatgccctggctgcggttcagctccttggtgagatctgtcatgtctgtctgcagctcagcgaagcctttgcggatttcctctcggatctgagattccatctcctccatctgcagcagcgtcttctgccagtaacgctcagcacgtcggctcttggtacagaagacgaacagggccaccacggagagcagcagcaggacgctgcagatgacgatggacacgatgatggccgtctcgctgccccccagctgcagtgtggcgatggtctggttgaagttccctacctggattgtgatgggcagctgccccacggccgcgcccagggactcgttgaccgagcagtggatgattctgtcagagacaatctggatgtcgcagcttacttggcctatcttgacccggtactcgtgactctggagccccaggctgtcctgctccttgtggataacgagggtgagaggctccccggggtggtgcttgatccacttctccctcttggccgtagagaactgtgggttggggaggtagtccaggcggaacctgctgccccgctgtgcctcctcggggtccagtagctcctcagccacagccacctcgtctgcgtaggcccgcccattgatgaagaagtccactggcgctgatgcgttgctcagggccccgggggacgggcaggtgatgagggtggagttgagaaccttgcagagcgtgggctcccggccaatgtggtggacggccatggacacattctgcaccatgtggaaacgctcaccagccactgtgatggtcctgccgccactgacagggctgcggcggggactgatggccgtgatgaccgggttctgcatgtaccagaaggtgaggttgccgtgcacgcagccccgacgctcgaagcgcacacacacaggcaccggagccggcagggccccctcaggcatggtgcaggcgatgctggtatctgtgcgcatcagctccgtgcaggggtctgtgtcgttcaccaggacctggagctcggagcctacatggaggtcattcccatggatggtgatcctggtgcccccggccttggggcccatggtaggctccagggagtggaccaggggcagcacgtaggagaagcggtcccgggacttgccctccttagaggcgttcacggtcaccacacctgagagtggtcctggggctggccctgtgacacacacgatctcctccgacaccgtgtatctgtcaggcagtggctcacaggccacaccaccaatccacacgccgtgggccacgtcactgagccgccggcccaggttccttcctcggatggtcagcagggtcccaccgtccaacgggccactcaggggctcaatcgcgcggatctcgggggcggggcaggtgccagccatgggctgcagaggcccccgcaggcggcagccatcactccacatacacaggtgacccaggtcttcgcggcccaggcactgggaacagtcggggctgcccatggcacagttatagaccatgactgtcatgggctcagggctgtccaggaatcgggctggccgcccctttagttggaggctgagcgggaacacctggctcttccgggtcgtgtgcagcaccacctggtcacagcgtacaacagactcattcacccacacagcctcgaagatctcctccagcccaaaactacactccagggctgcaccctggaaaaaggcagtgttggccagaggcaccaggatgttctgggagccacccgtaggcacgggtgccaggggtgagagcagggtccgggggcagtcctgagggctcgtggggtttggtgaggcctcgcaccgagactggttggaaacacaggagtgctgctggctgcaccagaaacagggccactgtgccgacaggcagctggtacaggctgtgtgggggtacacttgtgcagtgcggctgcagtcgtagatggtgaaattggccttgacgatgttccgcccattgaccctcacagacatctcaacagtcacgtggtcctggttgggggggaagggcggaaactggtccctcggcaggaggttgcagtaggcaatctggtgaccaaaggcagggcctgggacccgagccacagtgcggatgttgttcccatagtcacaggccatctccatgccactgaggctgggcaggctgcccgagatctgcaggatcatgcctgggtactcctggcgcacatcgatctcggaaggcaggacggtcatggcaggacagcggctggggccctcgctggcactggtccagaaatgctgctggctggaattggtgcagtcctgctgcaaggtgcaccgcgtctccagggcacaccagccgcagtaggcgtccgccgcacccacgcagtccccacaggtggagtgcacgttgcaggcggcgaccttcaccctggccatctggtgggacgtcatcaggtaaaggtaaacggagtctgctgggtcaaactgcatgacatggtgcacgggctccccataggccacagtcaccacccgcctgctcaccacctgcatgctctcgttcaggttgatcttgagaagcctcccgttgaccgtgcccaggaagaccgctgtgtagttgttgacgctggccacggccacggaggtgaggcccggggcgcggaacacgggcgtggccttcaggggctgcaggatggacagcgggtgctgcaggtgagcagctccacagtccagctgctctggctggagctggatgttgagcttgcgctcgcaggccggtcccgtgccctgcaccacgctgtcgagcaccgccaccacgtcgggcgccggttccacgaagcaggcggtgcgcgcagctcggatggcggctcgcacgtcggcgaagcggaaggcgcagagtgcggccggagcagcgcgggccgcgggggacccctggggccgctcgaagacagcaaagagccgctcccgggctgggaagaccgacaccaggcggctgtagaggtcgccgcggcccgcgccgcccgcgcactgcaagcccaactggatgtaggactcggtgagcttcttggcgtcgccgccggcgccgtggggcaggcagatgcgcgccagcaggctccgcgcctggctctccttgtcgcccgcgcgcgcctcgctgttgagcgccaggtacgcgtaggactgtgcacccggcggcgggtcggacgggtgcaggaaggcgctcacgaagcccagcttgtgctgctccttggcgccctgcttgatcttgaggatgttgtcgtcggaggggttgaggtcgaaggtgaagagcttggccaggtcgccgcgcgtgtccagggagcggatggcgatctcgggcgtgttctcgaagcggtggtcctccaggctgcggttgcgcgggaagaaggagctgccgtaaccggtgtacgtggcgcccacgagcaggcggctgccccccgcgcccgcggcgggaggcagaactagccccacggtggacgcgttcgggtggttggccgccacgttcagcatgctggggaacaccgtgacgggctcggcgggcggcgcggcgggcgggaagcgcacggccacggccgagatgttaccccggcgccgcagctggcagaagccctggtagatggacccgcacacgactaccaggccctggccggggtccagctgcaggatcttgttgtagttgtccgtgaggcgccgcgggtgctcgcacgaggcctgcggcagctgcggagcgtgacacagcgggctgtcgggcaccgggcccacggccgcctcggcctccaggctcaggttggcgcccgacagctgatagaggcggttgacggccgccaggtacacggtccccgccgcgccgtccagggcgaagttgttggtgggcgtgggcgaggggaaccgacgctggatctccagggcgccggcccgcgccgcccccaggagcagcagcaacagcagcggcaccgggcaccgcggcggcgtctggaacggcggggggctggcggcggcggcccgggcgctaaggggtgcgccgcccgcggcgcgaggagccatccgggcgtgcgcgggctgcgcggcgcggcgagtgcatggggcgaggcgcggccgggagccgggagcccggaggcggcgggaggcggggggcgggcccgggtccgcgaggcgcttcctgcccgcgccagccgcccccggccccggcgcccgggcccggctcagcctcgccgcgcagcccgg

SEQ ID NO: 64347 - DNA, 1173 bp, Homo sapiens
aggaagagagagagaggagtgtgtgtgtgtgtgtgtgtgtgtgtgtgtcagggttgggaccagagcaggaacacacgcaagaagggactgagaattgtatcaacagtgcaaaagaagtcaaaggaattacttacgcataaaatgaggactgttcctcagagatgagtcagtcctgagaagccaaccaagccgggtactctgagtctggatccgaccttgctagaaatacggtctgaggcagcagaggttctatgagagtccacagaaggtcagcacaggctaaggtaaaagcagggcaatagggttcttgtgttctattggcgaaagtagaatagaatagaacagaaaaactgagtgggcaaaatgagaattggcaaaaaggtatcattaggctcatacctaccacaactctacagccctaccacttaccagaatggatagattcctagtcgtgtaaccataaaaacagcactgaagatcacaaaaagggtgtcacagagccgctgatacttggcataattggccagtttggctgcctggagaaaggaagaaagaattgagctggggagaaagtcattcctctcataggaagaaaagaagagaagaagaagatggagaaagagagattgggtttttacctccagcaagaagtctgagacatcatgtagacacatgatcagagttcccactcgaatcatattgttgatgtaggagaaggagataagcccaatggtgaccaagtgatgcacaaacatgatcaggaagtcctaggaaggaatggaaatagaagagggaggtaaaagctgggccctagaaacaccagccaacccaacgtcctgcattattctctgagaatcttaccccaccccatatagaatagtttccattggccgggcgaggtggctcatgcctgtaatcccagcactttgggagggcaaggtggtcggatcacctgaggtcaggagttcgagaccagcctggccaacatggggaagccccgtctctactaaaaatacaaaaataagccgggcttggtggcatgtgcctgtaatcccagctactcgggaggctgaggcaggagaattgctcaaacctgggaggtagaggttgcagtgagctgagatcgcgccactgcactccagcctgggcgacagactgagattccgtctcaaa

SEQ ID NO: 64348 - DNA, 4413 bp, Homo sapiens
atggcacttaagaacattaactaccttctcatcttctacctcagtttctcactgcttatctacataaaaaattccttttgcaataaaaacaacaccaggtgcctctcaaattcttgccaaaacaattctacatgcaaagatttttcaaaagacaatgattgttcttgttcagacacagccaataatttggacaaagactgtgacaacatgaaagacccttgcttctccaatccctgtcaaggaagtgccacttgtgtgaacaccccaggagaaaggagctttctgtgcaaatgtcctcctgggtacagtgggacaatctgtgaaactaccattggttcctgtggcaagaactcctgccaacatggaggtatttgccatcaggaccctatttatcctgtctgcatctgccctgctggatatgctggaagattctgtgagatagatcacgatgagtgtgcttccagcccttgccaaaatggggccgtgtgccaggatggaattgatggttactcctgcttctgtgtcccaggatatcaaggcagacactgcgacttggaagtggatgaatgtgcttcagatccctgcaagaacgaggctacatgcctcaatgaaataggaagatatacttgtatctgtccccacaattattctggtgtaaactgtgaattggaaattgacgaatgttggtcccagccttgtttaaatggtgcaacttgtcaggatgctctgggggcctatttctgcgactgtgcccctggattcctgggggatcactgtgaactcaacactgatgagtgtgccagtcaaccttgtctccatggagggctgtgtgtggatggagaaaacagatatagctgtaactgcacgggtagtggattcacagggacacactgtgagaccttgatgcctctttgttggtcaaaaccttgtcacaataatgctacatgtgaggacagtgttgacaattacacttgtcactgctggcctggatacacaggtgcccagtgtgagatcgacctcaatgaatgcaatagtaacccctgccagtccaatggggaatgtgtggagctgtcctcagagaaacaatatggacgcatcactggactgccttcttctttcagctaccatgaagcctcaggttatgtctgtatctgtcagcctggattcacaggaatccactgcgaagaagacgtcaatgaatgttcttcaaacccttgccaaaatggtggtacttgtgagaacttgcctgggaattatacttgccattgcccatttgataacctttctagaactttttatggaggaagggactgttctgatattctcctgggctgtacccatcagcaatgtctaaataatggaacatgcatccctcacttccaagatggccagcatggattcagctgcctgtgtccatctggctacaccgggtccctgtgtgaaatcgcaaccacactttcatttgagggcgatggcttcctgtgggtcaaaagtggctcagtgacaaccaagggctcagtttgtaacatagccctcaggtttcagactgttcagccaatggctcttctacttttccgaagcaacagggatgtgtttgtgaagctggagctgctaagtggctacattcacttatcaattcaggtcaataatcagtcaaaggtgcttctgttcatttcccacaacaccagcgatggagagtggcatttcgtggaggtaatatttgcagaggctgtgacccttaccttaatcgacgactcctgtaaggagaaatgcatcgcgaaagctcctactccacttgaaagtgatcaatcaatatgtgcttttcagaactcctttttgggtggtttaccagtgggaatgaccagcaatggtgttgctctgcttaacttctataatatgccatccacaccttcgtttgtaggctgtctccaagacattaaaattgattggaatcacattaccctggagaacatctcgtctggctcatcattaaatgtcaaggcaggctgtgtgagaaaggattggtgtgaaagccaaccttgtcaaagcagaggacgctgcatcaacttgtggctgagttaccagtgtgactgccacaggccctatgaaggccccaactgtctgagagagtatgtggcaggcagatttggccaggatgactccactggttatgtcatctttactcttgatgagagctatggagacaccatcagcctctccatgtttgtccgaacgcttcaaccatcaggcttacttctagctttggaaaacagcacttatcaatatatccgtgtctggctagagcgcggcagactagcaatgctgactccaaactctcccaaattagtagtaaaatttgttcttaatgatggaaatgtccacttgatatctttgaaaatcaagccatataaaattgaactgtatcagtcttcacaaaacctaggatttatttctgcttctacgtggaaaatcgaaaagggagatgtcatctacattggtggcctacctgacaagcaagagactgaacttaatggtggattcttcaaaggctgtatccaagatgtaagactaaacaaccaaaatctggaattctttccaaatccaacaaacaatgcatctctcaatccagttcttgtcaatgtaacccaaggctgtgctggagacaacagctgcaagtccaacccctgtcacaatggaggtgtttgccattcccggtgggatgacttctcctgttcctgtcctgccctcacaagtgggaaagcctgtgaggagggtcaaaggtgtggattcagcccgtgtcctcacggagcccattgccagccggtgcttcaaggatttgaatgtattgcaaatgctgtttttaatggacaaagcggtcaaatattattcagaagcaatgggaatattaccagagaactcaccaatatcacatttggtttcagaacaagggatgcaaatgtaataatattgcatgcagaaaaagagcctgaatttcttaatattagcattcaagattccagattattctttcaattgcaaagtggcaacagcttttatatgctaagtctgacaagtttgcagtcagtgaatgatggcacatggcacgaagtgaccctttccatgacagacccactgtcccagacctccaggtggcaaatggaagtggacaacgaaacaccttttgtgaccagcacaattgctactggaagcctcaactttttgaaggataatacagatatttatgtgggagacagagctattgacaatataaagggcctgcaagggtgtctaagtacaatagaaatcggaggcatttatctctcttactttgaaaatgttcatggtttcattaataaacctcaggaagagcaatttctcaaaatctctaccaattcagtggtcactggctgtttgcagttaaatgtctgcaactccaacccctgtttgcatggaggaaactgtgaagacatctatagctcttatcattgctcctgtcccttgggatggtcagggaaacactgtgaactcaacatcgatgaatgcttttcaaacccctgtatccatggcaactgctctgacagagttgcagcctaccactgcacatgtgagcctggatacactggtgtgaactgtgaagtggatatagacaactgccagagtcaccagtgtgcaaatggagccacctgcattagtcatactaatggctattcttgcctctgttttggaaattttacaggaaaattttgcagacagagcagattaccctcaacagtctgtgggaatgagaagacaaatctcacttgctacaatggaggcaactgcacagagttccagactgaattaaaatgtatgtgccggccaggttttactggagaatggtgtgaaaaggacattgatgagtgtgcctctgatccgtgtgtcaatggaggtctgtgccaggacttactcaacaaattccagtgcctctgtgatgttgcctttgctggcgagcgctgcgaggtggacttggcagatgacttgatctccgacattttcaccactattggctcagtgactgtcgccttgttactgatcctcttgctggccattgttgcttctgttgtcacctccaacaaaagggcaactcagggaacctacagccccagccgtcaggagaaggagggctcccgagtggaaatgtggaacttgatgccaccccctgcaatggagagactgatttaggagcattgtgtcccttcgagatggggatccacacactgtgaatgtgatgactgtacttcaggtatctctgacatacctgacaatgttaatctgcaactgggattacactggaactacaggaatgattcctttgaccaccttaaaaactttcacagtggttccgctcgacaccattgttttattatattatat

SEQ ID NO: 64349 - DNA, 2343 bp, Homo sapiens
acctcatcagaaacctcttagatctgctgtttatttgggggtctctggccaaggccgagacaatgccctgaccctcctgaataaagcggcgccccggaagtctcacaaggaccccaacaacagcctcaccctctgggtcatcgaccaaggtctgaaaaagatattggaagcggggggctctatacaggaccctcctggggagctcgcagcgaccgcaaacagccgcatgagcgcctctattctcctcagcaagctctttgatgacctcaagtgtgccgcggagagggagaatttccacagactttgtgaaaactacatcaagagctggtttgagggccaagggctggccgggaagctacgggccatccagacggtgtcctgcctcctgcagggcccatgtgacgctggcaaccgggccttggagctgagcggtgtcatggagagtgtgattgctctgtgtgcctctgagcaggaggaggagcagctggtggccgtggaggctctgatccatgcagccggcaaggctaagcgggcctcattcatcactgccaatggtgtctcgctgctgaaggacctatataagtgcagcgagaaggacagcatccgcatccgggcgctagtgggactctgtaagctcggttcggctggagggactgacttcagcatgaagcagtttgctgaaggctccactctcaaactggctaagcagtgtcgaaagtggctgtgcaatgaccagatcgacgcaggcactcggcgctgggcagtggagggcctggcttacctgacctttgatgccgacgtgaaggaagagtttgtggaggatgcggctgctctgaaagctctgttccagctcagcaggttggaggagaggtcagtgctctttgcggtggcctcagcgctggtgaactgcaccaacagctatgactacgaggagcccgaccccaagatggtggagctggccaagtatgccaagcagcatgtgcccgagcagcaccccaaggacaagccaagcttcgtgcgggctcgggtgaagaagctgctggcagcgggtgtggtgtcggccatggtgtgcatggtgaagacggagagccctgtgctgaccagttcctgcagagagctgctctccagggtcttcttggctttagtggaagaggtagaggaccgaggcactgtggttgcccagggaggcggcagggcgctgatcccgctggccctggaaggcacggacgtggggcagacaaaggcagcccaggcccttgccaagctcaccatcacctccaacccggagatgaccttccctggcgagcggatctatgaggtggtccggcccctcgtctccctgttgcacctcaactgctcaggcctgcagaacttcgaggcgctcatggccctaacaaacctggctgggatcagcgagaggctccggcagaagatcctgaaggagaaggctgtgcccatgatagaaggctacatgtttgaggagcatgagatgatccgccgggcagccacggagtgcatgtgtaacttggccatgagcaaggaggtgcaggacctcttcgaagcccagggcaatgaccgactgaagctgctggtgctgtacagtggagaggatgatgagctgctacagcgggcagctgccgggggcttggccatgcttacctccatgcggcccacgctctgcagccgcattccccaagtgaccacacactggctggagatcctgcaggccctgcttctgagctccaaccaggagctgcagcaccggggtgctgtggtggtgctgaacatggtggaggcctcgagggagattgccagcaccctgatggagagtgagatgatggagatcttgtcagtgctagctaagggtgaccacagccctgtcacaagggctgctgcagcctgcctggacaaagcagtggaatatgggcttatccaacccaaccaagatggagagtgagggggttgtccctgggcccaaggctcatgcacacgctacctattgtggcacggagagtaaggacggaagcagctttggctggtggtggctggcatgcccaatactcttgcccatcctcgcttgctgccctaggatgtcctctgttctgagtcagcggccacgttcagtcacacagccctgcttggccagcactgcctgcagcctcactcagaggggccctttttctgtactactgtagtcagctgggaatggggaaggtgcatcccaacacagcctgtggatcctggggcatctggaagggcgcacacatcagcagcctcaccagctgtgagcctgctatcaggcctgcccctccaataaaagtgtgtagaactccaaaaaaaaaa

SEQ ID NO: 64350 - DNA, 4197 bp, Homo sapiens
aagaaatggaaacgaaggagaagccgaagcccaccccagattacctgatgcagctgatgaacgacaagaagctcatgagcagcctgcccaacttctgcgggatcttcaaccacctcgagcggctgctggacgaagaaattagcagagtacggaaagacatgtacaatgacacattaaatggcagtacagagaaaaggagtgcagaattgcctgatgctgtgggacctattgttcagttacaagagaaactttatgtgcctgtaaaagaatacccagattttaattttgttgggagaatccttggacctagaggacttacagccaaacaacttgaagcagaaaccggatgtaaaatcatggtccgaggcaaaggctcaatgagggataaaaaaaaggaggagcaaaatagaggcaagcccaattgggagcatctaaatgaagatttacatgtactaatcactgtggaagatgctcagaacagagcagaaatcaaattgaagagagcagttgaagaagtgaagaaattattggtacctgcagcagaaggagaagacagcctgaagaagatgcagctgatggagcttgcgattctgaatggcacctacagagatgccaacattaaatcactagcccttgccttttctcttgcagcaacagcccaggctgctccaaggatcattactgggcctgcgccggttctcccaccagctgccctgcgtactcctacgccagctggccctaccataatgcctttgatcagacaaatacagaccgctgtcatgccaaacggaactcctcacccaactgctgcaatagttcctccagggcccgaagctggtttaatctatacaccctatgagtacccctacacattggcaccagctacatcaatccttgagtatcctattgaacctagtggtgtattaggtgcggtggctactaaagttcgaaggcacgatatgcgtgtccatccttaccaaaggattgtgaccgcagaccgagccgccaccggcaactaacctatgaccttctgacctctgaactcttcacccaatgatgacctgaccatgcctgcctgctgatcagttaactggtaatcgcctttgcttgcctgtcgtcagtgcagcgagctgaggcacttgtccgttcgtcttaccatctaaccaaacaaaagacaaagaaattgttgtcctccaactcagcttttttttttttttttttcctgttggggggaagggggttctagaaactgcactgaatagtagtaaagcaataaggcccaattcatcccacagcactgatcatcttttaatatcccaccctaagcgaacggtaagaaggcctctcttaagaaggggagacagatggtccttaactactcaatgacagaggcagttactgtgagagacttctaggaatctttttcttctcatagcgaagtcaaagctctctctgaatgtactgtgtgatgatgcatcatgcatgaaccttcggtcagggatatcattggtgaagtgatttcaaaaagtattcaaaatttgatatgctgtttagtcactacagtgccctcaaagggcagaagttgcagccttttttatattgcctgccaaaatttgaagtattagaagaaagtgtgccatgagagaaaaacttaaggagttttgaaaagtaatgcaaataacaaaactgcaacactatttttaaaaagataaatatctgagttaaaattactgaatctttattttacacctaaaaaaatatgagaacaaggtacatgcattatgtgtcacattactgggcaaactgttcaagtatttttttttaaacctccctgtatagaaaaaaatcattaaggatgtaaaagccatgcttgcctatttgctgtatacatgtaatgaaattgtagataaagtgtagtgcattgaaacaaatgaacaaaaagtagatacttttactatacaagggtgctggtgcagaaaaaaatatatatatttttggaaatgtagcattttatactttcaagtgttataaaaaaaaaagaaaaagaacaaagaaaccctttatttcattaaatgattttttctggtggttgtcaagaaacaaaagaccaaaagagcctttttgtctttcttttttattttttaagtattggaataagtctaaagaaaagaaagtgccttattttccttcatggttcattcaagtcaagtgtctcataaagatcagctcctcccttcagaatacaagttaatgcatgttactcagtcgcccagtatgtgaaagaagatatgagggagacaaatgagttgatagtttgaattataggatttttgccacgttaccttgatgcaaatttgccaaatctgatactgtgaaaagatttgataacttttctaatgcctgactagtaagttttaaaacatcattctttaaaagaatagtttaatacttttggttattccaatcttcaatgttaacccaaaggattctgagataaaaattatgtgtcatctaaacttcagtttacagacaaaattagagctttgttttatttggagaagggggatgcattcatttgattttgttttttgtttttaattaattgaatataataggatacctagcaaatgttttcacaaaagtgaatctttgtgattttcattctagaaaacaatgttttaaatcacccaaatttaatcacatgtctttatatcataccagataactggtgtagtgtatccttttactgtttcaataacctgtgcctgccccaccccttaactttaaaagaatgtgaaaaactagcatcatagtgcatataaatactcaaccacatttcagcttaagcttctaatttctcaagaagttgaaacagttagttatgtagttgaagcaatttgtgtgcaaagcctacatctaaacacttgagtgaataatcattaactgctcagtaccagacgtggcaaatctcaagtgacagtggaccccccccccaccgcccagcttatcaactcgtcccctcttccacaccttcccagcatcacagtcagaggtcagcaggaagctgagtcattaccttcttggtgacctcccccaccatcttgtctcacttggaaaccgttgtcagtttatttactatgcaatagacattcattgttttgtatccagctagctttggtttaatatgccactgctttgtctttctgttacacatacagttttgatttatttacaatatatgctgtgccattttgatttttatattgtttggttggttgaataaatttgcgacactcaaacacttgaggtgatagttgttaaaaacaataccagtatttgatccagtttcatctcaactatgttatacctggacattttagatgtttatcaaaggtcttttatggggaagaaagtaaatgtatgaaataataaatgtgtgacatttatagggaatgttggctctgaacaaacttttgaaaacttggttgacaaaattttggatcaactgaaaaaagcatgacttttgaaatctctgaatgccttggttctcagtattatcattctttattgaatttatttcttattaaaatatgtagtttttaagactttttttctgacagtattatgtaattttttagcgtgggtagatgggagtgtcgcttgtatgttatcgtacagctgacatgtatttttgtctattctttattatcttagtttcatgctatgtatgtaccataaccaacctattgcctatgagaaacatgtaagataatgtatttacagccattgttacaagtttataatgtatttttctatcttgttttatatgtatgttatataacattcaaaaagaatttttttcttgattgagaaaaggatacaaaatgcaaaatccacaattttgataactgaaaattgccaattgttttgcagtactttattatattgggtgtcttgtcttttttgggcttttagttagctaatgaatgaatacattagacacttttgggttttagttgggattttacatagcttgcattttaattctttggttctttgctgtttctattaacccacaggcattattttaataaatgttataataccaacctactaactctggactttgtctgtttattaacctttatatgtttaattaaaataaccaaataaagccaaaagaatgtaaaaaaaaaa

SEQ ID NO: 64351 - DNA, 887 bp, Homo sapiens
cacaatttcagctcactgcagcctccgcctcccaggttcgggtgattttcctgcctcagtctccagagtggctgggattgcgggcgcccgccaccacgcccggctggtttttggtatggttagtggggacggggtttcgccatgttgaccaggctggtcttgaactactgacctcgggcgatccgcctgactcagcctcccatagtgccggcattacaggcgtgagccaccgcctggcatggtgcagaagctggatacctaccaggagtacaaggaggctgcgtcctcttaccaggaagcctggagcacactccggaagcaggtgtttggatcctggatcagaaacccaccggattatcaccagttcaagtgagaaggaaatgtttgctctggtagcaggacccttcatcctgaactgccttcctccacgcaggacaagtcttagcttttttggtagttaaatcagggaacattctttctgagctttgcatctctgttgtgtaatacagatggaatctggaacttagagcaagctatacttgattgaagtagctctctgctaaaatggcatctcactaatgacctcactatctgacttccattgtgttttattgcttctctaaaatatgaaatcagagtttggaacatgatgctttgaaagtactctgcagcagctctgttttatgggttcctacattgattcagcaaatatttattgagctgaaatgatgtttgacgctctgcaagttttacagctttgcctagcatagcgaacatatattttgtattcccagcctttctttcttcagggagccattcttttcccattcttcagtgatcctgctctgtgcctcagacttggctgaaggtaaccttactccctggct

SEQ ID NO: 64352 - DNA, 2550 bp, Homo sapiens
gatggcgcgggagctataccacgaagagttcgcccgggcgggcaagcaggcggggctgcaggtctggaggattgagaagctggagctggtgcccgtgccccagagcgctcacggcgacttctacgtcggggatgcctacctggtgctgcacacggccaagacgagccgaggcttcacctaccacctgcacttctggctcggtaaggagtgttcccaggatgaaagcacagctgctgccatcttcactgttcagatggatgactatttgggtggcaagccagtgcagaatagagaacttcaaggatatgagtctaatgactttgttagctatttcaaaggcggtctgaaatacaaggctggaggcgtggcatctggattaaatcatgttcttacgaacgacctgacagccaagaggctcctacatgtgaagggtcgtagagtggtgagagccacagaagttccccttagctgggacagtttcaacaagggtgactgcttcatcattgaccttggcaccgaaatttatcagtggtgtggttcctcgtgcaacaaatatgaacgtctgaaggcaaaccaggtagctactggcattcggtacaatgaaaggaaaggaaggtctgaactaattgtcgtggaagaaggaagtgaaccctcagaacttataaaggtattgggggaaaagccagagcttccagatggaggtgatgatgatgacattatagcagacataagtaacaggaaaatggctaaactatacatggtttcagatgcaagtggctccatgagagtgactgtggtggcagaagaaaaccccttctcaatggcaatgctgctgtctgaagaatgctttattttggaccacggggctgccaaacaaattttcgtatggaaaggtaaagatgctaatccccaagagaggaaggctgcaatgaagacagctgaagaatttctacagcaaatgaattattccaagaatacccagattcaagttcttccagaaggaggtgaaacaccaatcttcaaacagttttttaaggactggagagataaagatcagagtgatggcttcgggaaagtttatgtcacagagaaagtggctcaaataaaacaaattccctttgatgcctcaaaattacacagttctccgcagatggcagcccagcacaatatggtggatgatggttctggcaaagtggagatttggcgtgtagaaaacaatggtaggatccaagttgaccaaaactcatatggtgaattctatggtggtgactgctacatcatactctacacctatcccagaggacagattatctacacgtggcaaggagcaaatgccacacgagatgagctgacaacatctgcgttcctgactgttcagttggatcggtcccttggaggacaggctgtgcagatccgagtctcccaaggcaaagagcctgttcacctactgagtttgttcaaagacaaaccgctcattatttacaagaatggaacatcaaagaaaggaggtcaggcacctgctccccctacacgcctctttcaagtccggagaaacctggcatctatcaccagaattgtggaggttgatgttgatgcaaattcactgaattctaacgatgtttttgtcctgaaactgccacaaaatagtggctacatctgggtaggaaaaggtgctagccaggaggaggagaaaggagcagagtatgtagcaagtgtcctaaagtgcaaaaccttaaggatccaagaaggcgaggagccagaggagttctgggaattcccttgggagggaaaaaaagacttacccagaccttcaccactactggaaacccaggctgaagaccatccacctcggctttacggctgctctaacaaaactggaagatttgttattgaagagattccaggagagttcacccaggatgatttagctgaagatgatgtcatgttactagatgcttgggaacagatatttatttggattggcaaagatgctaatgaagttgagaaaaaagaatctctgaagtctgccaaaatgtaccttgagacagacccttctggaagagacaagaggacaccaattgtcatcataaaacagggccatgagccacccacattcacaggctggttcctgggctgggattccagcaagtggtaaattggtatttgtaaaaagcaaacaaacattacaaggcagttatctcattgctgttttgggagaggaacgggaaaagctttttgcttatttgtcttttgaaaattaaggctgggcgcggtggctcacacctgtaatcccagcactttgagaggatgaggtaggcggatcactggggtcaggatttcgagaccagcctggccaacatggcgaaacctcgcctctactaaaaatacaaaaaaattagctgcgcgtggtggtgcacgcctgtagtccctgctacttggaaggctgagacaggaaaattgcttgaacccaggaggctgaggttgcagtgagccaggattgcgccaccacactccagcctgggcaacagagactctgtctcaaaaaaaaaa

SEQ ID NO: 64353 - DNA, 1100 bp, Homo sapiens
actggaaaggaaacttttctaccctgagtgcgagataagaacgatgggtggaagagagcaacgccagagcccaggcgcccagaggactttcttccagcttctgctgtccttctttgtggagagcaagctccacgaccacgctgcttacttagtagacaacctgtgggactgtgcagggactcagctgaaggactgggagggtctgacaagcctgctgctggagaaggaccagagcacgtgccacatggagccagggccagggaccttccacctcctagggtgaaaccaggagggattgcttgcttcacttgtacaaggcaggaacggtggcatcgggtgggggaaacttggagttggaaggtggctaatctttgattctatgtttttgatcctcctggcactccagacctgggtgatgtgcaggagagcacactgatagaaatccttgtgtccagtgcccagcaactcctgcctcagcctcccgagcagctgggactacaggcgcccgccaccacgcctggctaacttttttgtatttttggtagagacgggttttcaccgtgttggccaggatggtcttgatctcttgaccttgtgatccacctgcctcatcatcccaaagtgctgggattacaggcgtgagccactgcgcccagcatgttagacaatttttaattcatcctctctgtgctgttgttttctcagctgtgaaaggaatattctggtggggacaaggttacagagttgctgagagggtctcatgacatgaaggtactggccttggcacagtgcctgggggggcggggactccgcacatgcctgtgatgtcacagttactgtcagttcacagcgaaccttccctccttttcctgttgactttcccacactcctgtaaccctccctccctcccttcttcctctctctctctctcactcacgcacacgcacacacacacacacacacacactccattcactgtctccatgactctggagtaaactaacgtctcgagttgccattggaagccccattgtcctcatttagactttcatgggttataggcacttttgacttcctggggtccttcttcagataaaaag

SEQ ID NO: 64354 - DNA, 885 bp, Homo sapiens
  misc_feature (1)...(885): n = a,t,c or g
ttttttttttttgagatggattgaagcgactgcctttattgcatagaccttttcaattgctttttagattggggacggaggacgcgcatgagacgaacaggggatatgaatttccccgcccccacccgcgggtagaggaacattaggtgcaaatcctagcgccggccccggggaacctgcccctcctgggctgattggccagctaaatggaggcaccggagtggatggggcgaggctgcgggccctgaccggccgactcactgaggcctaccccagccagtacattccaggtcctgtcattgggcgacgcgtaaaatagactccgccctcagccatcctggccgggtaggagcaggtggcaagcgtcaggactgagccctgccccgtaagggcggccccagatcagacgccaggccccgccctcattgatcaggcactaccctcgggacgagcccatttctctttaaccgtgacgacgcccaccttccagcatcacgtctggtcccatgaaagcgagcgcaatcctgagacggggccagggcccctgccaccacaactctagcagccaggccacaccccctagctcaggctccgccccattggaatgtaggccccgcccccggcgggtaccaagcttgtttagtttcagggctcccgccccgggcagccaggaggcccagtgagcagtgtaccgatgccagggtgcatctgtgcctgtagcggcccatactccacctgctccccgtccactgtgagcacgccgcgtggtgtgagcggctctaggcggaaggcacggaccgcggcgtagcccagctgcggacagcccaggctgaagtggctaccacgctccgaattccnccgcactggactagggatgntcaacat

SEQ ID NO: 64355 - DNA, 2467 bp, Homo sapiens
ttttttttttttaccacttagattaagttatgaaatttatttatagttttaccttatataaaagccatgtatatatcaaatctcactttcttggtaaagtcatcttattagaaatacaagaagtgcacttaatacaaggaagtaagtttctcggtgccaccaggtgaggtggtacatacactcacatcagtccctcaaacgaaggttttcggcagatttccccttccagacttctgagatgatctgaattcaggaaggtctgagtgaacttcttccagaaattacagtgaaacaagctgaccttaacttttgggtcctcccgagaaatactaatgaaaaaactatttttttccagtgggccctgtgtttgctggcttctcggcatctgcagctcttcaccggcaggcgcggagccccacagcagcagtgtacaagcgcgaggtagcacttgcagccccatcagagacatatgacatcaaaaaaccaacctaaacccatatgccttttggtcaatcagaggttctgctcctacagattaggctgacagctcttggacttatatttattaatatttgtgaaatatgaactccaaggttcttgagctgttcctaaagcaagtttccagcaacagcttttattaacaactgttcatcttgcgatgtgctgtgccttatgaacgatgtctcgtcagaacagaccaggggtggtactgggtttcctatagcttctctctgcatctacaaagcaggttttcaaacacattttacatgtcgaaaccagtgtcataaggaaaacatttgtgacagaaaaacaatgctcagtttaatctaagttaccaagcagaaggtaaaagaactagtatccgctgagtccccaaacctctttcttctaattcatctgaggattttttgtgcttctagaacaagaatgtaggcaggctcccaaatggagaggtaaacatgaccgcgttgtttgaaactacttcattaatttgtaaatcagaaccaaaaagctctggccctcccacttctcttagctgaccctcctccccacttacggataaacagactttaacttccctaacccagaaacacttccaccaaaaatgtatggttataccttatcctaaaaaggcaccatgcaggcatttaagactgaaccagtgaactctaagtatgtagtagtagaaaatatcactaatcaaaacttccagcatcagatggtacaaaaccccaagaggactggtgacatgtaccccggggatggccaaccccagcttcttggcaaccccacaagcccaagcggggagcttcagctctggtcaggtgcacggctgccaaagtctgcacaccttggggacaaggaaaggagacacttgcttcattgtgctattcatgacccagaaaaggtcctggctggcttgaaggacccgagagacaaacactggatgggaggaatgagtgtgaaacaagaggtggagaagctagattatcttccacaggaggcggcagaagctccaggaagtagccgagaaccaatacgaactcgaccgtgtgacaaacaaggttaacagtaggggaagacagctttggcaagagcccaaagggaagagaagggctgacctggggacccacttcccctgtcagaagtgaccctgtcccaatgccatggctcattttcaggtctgttgaacaggtaaggtacaggagtcatagatttcacgtttaatatgtaatggaagctctgtaacatgagacagatagcaagcacggactctgctcactggtcgatgatggagcgctgcaacacctgattcatcatgtcctcttcatcaacatcataatccacaaaagtgtcataagaaaaccggtgccggcgctggatgtgctctctgaagttggcgctgcggtagttggggtctccccagggcatcgaggcacatatcggacaaaccacagatttggtatccgtgctatggaataatttgcagtgttccacaagtccttcctgatcaaagttcttctcaggacagtaaggacaaggaaaggtgtaacggtttggaacattccttggctgaagagatgcatccttaatggtggccttcacaccttccatgatgtaattctggtatttggaacaagtagccacgtgggaccggatcttggacaggaagaaattcttacggcagccatggcaagaagtctctgtgctctcgatctgccgctcgagctccacggctcggacgccaggtgccagagcgctgcgacacaccccacagacaggcttcttcggcttcagacattcctgcaggcatgcagagcaaaagacgtgtccgcagggcacctgtaccggcttctcgtacacctctaagcacacgggacacgtgaagcgtcctagggggtcagcctccgccgccggccccgccagctgcgcagcacccccgcagtcccgctgttgcgccacgaaa

SEQ ID NO: 64356 - DNA, 1010 bp, Homo sapiens
  misc_feature (1)...(1010): n = a,t,c or g
cttcttctttttaacctcaggttaaccccaaagattgtcttttcttggagtgaaatcaggaacatctctttcaatgacaaaaagtttgtcattaaacccatcgacaagaaggcacctgtaagttccaaaggattctattcaggggctactactttttcattcttatacttgtcagggtaacggacaagttatactgtgacgagtagccagtgatagtccaaactcctcatgaggttacattgagggccagagatcctgtgggccaggcaattgctgcaggggagaccacttaacttttcaaatgattctcattccttatgaagaaaagggcagttctgagccattggccaaatgataagcatttcccaaaatgctgtgtttttggtgtggagagccagcctgtccccttgaccacctgggtgcagggactctccccggcacctgacggacagtgggacctgcgagtctcaagggccagatttgcctttcagagctgtcctggaacttacccaagatagggacagtcagacttgcacccaagcattgctggtgcccaaggtttcatcggggcttcacccacttctgttgtcagaggtgtgcatcctcacacaggtgacactggcaggcagtcattttgggaggacatggtaagaaggcgacactttatgtcctgaaatctgatagtattgattgtaatagctgcaaagaccagtgcattatgtaaatttggttttatttattcttctgacatttaaacttttgttaactcagaatatttgagacatacgcacataactgtagcattgtagaatgggtaaggattttgttatctaatcagaaatctagttctctaaaaaaattgccacctgaaggaaattctgttaccaccttaggagcctgttctggaattttacgaaaattataggatggggaaagggacttttgtgttcctccatggttantttttgttnccctaggttaccagtgtttaagccttggggggagggcca

SEQ ID NO: 64357 - DNA, 1001 bp, Homo sapiens
ttttttatcattgacaatgtttattatcaagaaactttaggttttttaaaagaatgctcgttttagaatacaccaagaggacactctgtgacaggacatatacaaacaaggataattaaaatattaaatactatctaaattaaaagaccataattcaaattgctaattataatatttgtgtcggtagaaataactatagttccccttcatgaaattcacccccacgttctcatgaagactatgacgtctcaccacaatttcagttatttaatttacaataatcaatgctgagttttctgtgctgaagcatgcactgttacagaaagcacaaaatcctatttacagggatttttagttttctttaaaatgtatctcaagcatcttttaaagtgcgagctacaaataggttgtatccttaatgaaaaaggcttctttctaaaagaagtatgagatagctatccaatactgcaggaacagttatataactaaccgaaggaaccagcagcactctgctaactctgttttagtgtagcaacctccttcttggtgttctactaccagccaaacatgtactccattgctttggatacaagactttcatctttttttggcgtttgtctgtcagaaataacctgataatcactagtagaggctttgtatgctgtagcaagaggtctcatggtagaaatcctaggagtacttccaggttgtgttggtgtacctagagttttgattggtggtgtaaaggctaaagatggagatgataaagcacatctgtcactgctttccataacacttttgtcaatacatggttttacaccaatcatgatggattctccaaaaatcctcccatctttgcttaaggctttccgagcctgcagtttagattgataacgaatatgcatccaatttcctgtattagacatctgcaaagaataaagctgtctcgtaaaatagaaaatatataaaatctgcctctaatgaattctactagaaaatag

SEQ ID NO: 64358 - DNA, 2745 bp, Homo sapiens
ttttttttttttcaaatgtaggttgttttattgtaaatgtcatcaaaatccagaacagcagaaacatattaatcagtttgaaattttagaaatcctttagcacttgaaaaagagtattacaaatgcatctatatcacatagaaagtcagcgaatacaaactagacaagcaggacatagttcttttctggcattccaggataataagaatatttatcaattaaaaggtcaatatctgtcttcctgaaataactccaaacctgagtcaacacacattcttttcggattggttctgactggcgtaagaagagaaatacagcattttgttttttattttgtttatctaatcacagggaaggataaacaaagggcaaaagtgagagaaaaagttagatgtccttgaatttttttttttagtggttgctactgcatttcatgtttcatttttgttagatcatatacattagaaaagaatgatacattttagagaagaaatatgtacatacatagtatcagaaataattttcttgtattgattcatttaatatggttgtgcttatattcaatcagaaggtcaactcctttgctctaaggttcttacactgctaacaagaaatggcttttttcctgttgcaggtcatgagcagcacacagtgtcctttctaggcacataggatcatcgatcactgtgtggacgcaggctaatcagaattgcacctgaaatcacttgtgcaattagtgatgcaagagtgatcacaggaatcaagactgggagccaagagaaagaacaagaggtgcacaaagaagcagttcggatgggagaccaggaaagctgaggggaaaactgggaaacagattctggaaaactcacagtttgtttgatacccagggttaagagatgggactttgataggagtggtgcttatgaattaagggaggaagaaagaggtgagatcctaatgttggtaaaggtacagagacaaagggagccaaccaagtggtaagaaacttagaaatggaaagtaaaaatgagacttaattctttagtcagggaagccaagccaccaggaaaacttggtaaagagtaagagaaagagggagaaaatatgagataatattttgggtattttggtataactaggggaaccaaaatattattcctatagtataaaaaggaacaaagtaaagcaatatggatctattgggattccctattccaccaatgaaaattatcaaacaataatttgtctctcaggcaatgctactagaagttacttatatagttgccttattgttcatttaatttcagtttaactgaagcgattttgcccttttccttccttctacgtggtcactctgctgttcaaagggtaagcaccatttgttcaggtaaagcaattggtgtttgaaatccttccgatagatacgccatctcagagggctgctaatataactaactgtacaagacacacataattttaggttggccattcttgtgtataggggtaatctaaagctagtagttacaccccacaaaagaaaataaattcttatgacctctttgatcccacctgaaatatctcacaataaacaaacaaataaataataagcaaacaaaaacaaacagtagccttccccagttgcaggggcctaaaatatctcctaatctgaatttcgtctcaggacaggaaactattccataggcttcctcgcaggcttctgtgctggagtttgtcccactgactttggttgtccatctctctacaagaagggaacattctgaaacttagtttaaatactactaggccttagaatcttttgtaggtagttgctgaaacttgaagttgaataatactttgaagtactatgttacattgcattatgaaaaccttcatttttgtagctgtctcttgatctgcccaacatgtcacacaaatatagaagaaacggaatctgcaataccacaaacattacttcccattttgacatgggcataaccatctactccccaagaacttccccaggaattccgcacaatccaatatggagtgcttcctgttttatcaaacccagttatgagaactgcatgatttgcttctccactagagcagtgatgctgtataatgcctcccagataatcttgccagctcactgcatctactatgactaccaaagggccaaaggtaagaagtgcttttgccatttcatcttcttggtcactgaagtcatatgcagaataacctttgattgaaaatccagaatgtgaaccagaaaagtaatggcacagaccattttgtgctttaaaaggatattctgaatctttcaccagttttacttgcatcttgtttaaccagttcaaagcattgagagtagagcctccattgcagccataattattatacgaacagtcaatgacctgctggacacttaggtcttccaggggcttcccctttattgcataagcagattccactgcccccaccacgctgaaggcccagcatcctccacacatctgctggtttctcacttgtgtcacaacctgcttgtccctccagtcaaatcttaacggcaaagacacattggggatggacatatgtacttctgctgagtatctgggaaacttggaaggtttgcttcttaaataaatggctttaaactcttcaggaaacaaataggaaaactgatttattccatagaaggcggtggagttttcactgggaaataaagaattcaagtatcgatgtcta

SEQ ID NO: 64359 - DNA, 1377 bp, Homo sapiens
ggaaagtaacaggcaacgagatgctgggcctcgaggagggggaccttgaagacgacttcgaccctgcccagcacgaccagctcatgcagaagtgctttggggacgagtactacggggccgtggaggaggagaagccacaatttgaggaagaagaagggcttgaagacgactggaactgggacacgtgggacgggcctgagcaggagggagactggagccagcaggagctgcactgtgaggaccccaacttcaacatggacgccgactacgaccccagccagccgaggaagaaaaagcgcgaggcccccttgacgggcaagaagaagcgcaagtcgcccttcgccgcggccgtggggcaggagaagcccgtgttcgaacccggggacaagacgttcgaggagtacctggatgagtattaccggctggactacgaggacatcatcgacgacctgccctgtcgcttcaagtaccgcacagtggtgccctgtgactttggcctcagcactgaggagatcctcgctgctgacgataaggagctgaaccggtggtgctccctaaagaagacctgcatgtacaggtcagagcaggaggagctgcgggacaagcgggcgtacagccagaaggcccagaactcatggaaaaagcggcaggtcttcaagtcactctgccgagaagaggcagagacacctgcggaagccacagggaagccacagagagatgaagccggcccacagaggcagctgccagcccttgatggcagcttgatggggccggagagtcccccagcacaggaagaggaagcccctgtatcaccccacaagaagccagccccccagaagcggaggagggccaagaaggcacggctgctgggccccactgtgatgcttggtggatgcgagttcagccgccagagactgcaggcctttggcctcaaccccaaacggctgcacttccgccagctgggccggcagcggaggaaacaacaggggcccaagaacagctcctgagcaccagggagcaggcaggggcctcaggctcctctcctcaaatcaagccctggacaggtctcgcacccacaagtactatctgctgcagagatcctctcatctgtggccaggcacgcctgtaatcccagcactttgggaggccgaggtgaaaggatcacttgagcccaggaattggagaccagcgtgggcaacttagcgagactccatctctacaaaatgtggtgacacatgcctgtagtcccagctactcaggaggctggggaaggaagatcacttaaggccatgagtttgaggctacagagagctatgattgcaccactgcactccagcctgggcaacaaagcaagaccctgtctcttgaaaaaaaaaa

SEQ ID NO: 64360 - DNA, 1175 bp, Homo sapiens
cacctcagcctcccaaggtgctgggattacaggcgtgagccactgcgcccggcctatgagtcagttttatatgtggtggctctacaggagggcccagccccttagtgttgaggggaggacaccgaaagtaagctgttcactacttacttctttaacttttacttgatttagttctgaaaactcgaatccaaaccctcaagaaaggcctgggcgaggacatgtacagtgggatcaccgactgtgccaggaaactctggattcaggagggaccatctgccttcatgaaaggcgctggctgccgggcactggtcatagcacctctctttgggattgctcaaggggtctattttattgggattggagagcgcatcttaaagtgttttgactagacagagctggaggtcaagtccctgcgcttgccgccctctctctagctgtttcacttagcctagagggggcaagggcaggtggggccactctggcctgcctggtcctctgcgttgtagtgctacctcaatctcgggagaaacagccctatattctaacaagttgagcacagccttcttccccttcgtgtctacactcgttttcctttgtgggcacagctaccaggggcttttggaagcccctaaccacctacttttcaacaaaaatggtactttcgttgtattaattgcaggaccttaacaggtagtcacaatagaagggttgtttctgtattttaacatttctatttcacagtcaaactcggcattcttcagtcagcttgaggatttagcattgttaatcttggactccataacttatgagtcctagcactgattttgaggaaaaggaggatcagaagttcaagggaccgtgaaagccctcagagtcagcacctagtttgagaccaagcaccctttcgaatccctggatggctgagggggctgaggccggctctgactgggcagctcagcccctcccccagagcccagggtcttgcacacccctccctgtaaccaaggaacactctgaaataaaggtgaatggctaaaatctcatctgttcatcagtgggtacagcagataggctgcagtgaatgctatcaccatctacttttctacgtccatttcaaaaccaaacattaaaaagggcatagaagcagacccccgtcactcttcaaactgatactt

SEQ ID NO: 64361 - DNA, 791 bp, Homo sapiens
ctggaaggacaatggagcaccagctgagaagctcatcgttggattccctacctatggacacaacttcatcctgagcaacccctccaacactggaattggtgcccccacctctggtgctggtcctgctgggccctatgccaaggagtctgggatctgggcttactacgagatctgtaccttcctgaaaaatggagccactcagggatgggatgcccctcaggaagtgccttatgcctatcagggcaatgtgtgggttggctatgacaacatcaagagcttcgatattaaggctcaatggcttaagcacaacaaatttggaggcgccatggtctgggccattgatctggatgacttcactggcactttctgcaaccagggcaagtttcccctaatctccaccctgaagaaggccctcggcctgcagagtgcaagttgcacggctccagctcagcccattgagccaataactgctgctcccagtggcagcgggaacgggagcgggagtagcagctctggaggcagctcgggaggcagtggattctgtgctgtcagagccaacggcctctaccccgtggcaaataacagaaatgccttctggcactgcgtgaatggagtcacgtaccagcagaactgccaggccgggcttgtcttcgacaccagctgtgattgctgcaactgggcataaacctgacctggtctatattccctagagttccagtctcttttgcttaggacatgttgcccctacctaaagtcctgcaataaaatcagcagtcaaaccaaaaaaaaaa

SEQ ID NO: 64362 - DNA, 739 bp, Homo sapiens
agatagctcgctgttgtttttgcttcagtcctggtggagaggacactgaagagcagcagccggggaaggagggaccacgggtcatttatgacgagaagaaaggcaccgtctacatctactcctacttccacttcgtgttcttcctagcttccctgtatgtgatgatgaccgtcaccaactggttcaactacgaaagtgccaacatcgagagcttcttcagcgggagctggtccatcttctgggtcaagatggcctcctgctggatatgcgtgctgttgtacctgtgtacgctggtcgctcccctctgctgccccacccgggagttctctgtgtgatgatatcggcggtcccctgggctttgtgggcctacagcctggaaagtgccatcttttgaacagtgtccccggggcagggactggcgccctgtgcctgagtgggtctgaaaaagctttgagagagaaaaaaaaaaatctcctgattagctttttacttttgaaattcaaaaagaaactaccagtttgtcccaaaggaattgaaattttcaaccaaactgatcatggttgaaatatcttacccctaggaactggataccagttatgttgacttccttctgcatgtttttgccaaaacagaatttggggcacagcatcttttcacagggataaaaaaatcttgtggggccagtcattcttatcctcggaatagaaaaacatcgccataattttgagttcccaacgcg

SEQ ID NO: 64363 - DNA, 1314 bp, Homo sapiens
tttttttttttttggaaaagagaaagtaaagatattcctaattcagagccaaaggtacacagcagctgttggcgggaggccacctagagatttatcaaggacgcgccaccccaccaggagcccctcttgatcaccaagtgctttatcttccaagtagtaagtcaatcaagaggtttctaaagataatccatttttgataaattagaatggaaacagtgtctctataatatacatacaaaagtgtcccagttttcaactgtgagcaacacaggtgcacagaccaggtgtcagcgcaggaacccgacggcaggcatgctgatgccccccatttcccgccactcccgacagctccccgggcatggccccgattcccgccactcccgacagctccccgggcatggccccgattcccgccactcccgacagctccccgggcatagcccgtgattgcctggcctcagccctcggccccctgcgtgggcggctcctccccggcctctggtttcttgtgcctgcgcatgtgcctgtacttgtccacgtacgccttcaccaggttggccaccttcacggggttgatctctccactcttgctgtggcagatcttctgcacggccttgcgcaggatgtccttgtactcctccttggtcacctccctcttctggtagaagggcttgatggccagcttcacctcctccacagcacgctcctgcatgtgcagcttcttcatgtactcctccttcttggttttctccgcagctagcctgggggccggggtcttctcctccgagttgctggctgcagtggcttgactggctggctctgaggctggggtcagggcagcgggcactggggccagggtctgtgctgccccacagcccactagcggcaggctcccctgaaggatgaactggaccgtgggctggctgaccagtgcgcagggtgggatgcttgagggctgggccggggcaggcggcaggccggggctgtaaacctgagaggggtctgtgtctgggaacccgggttccggaagcacgtgactgggaaagggcagctcggagaacgcctgcctgacccctgtgggggccacatcctccatgtcccaggctccttctcggggcttctgtggcctgtgaagtggtgcccggggggctctgtcctcggcgggggcgctgctctccgactcctgcaggttccaggtgacccgcttcaccagggctctggaccgcagcaggggggtctgcgaaaccacctcctcaggccgggctgcctcctgtaccctcccactcgcagaggggctgtcttccttctcgtgcc

SEQ ID NO: 64364 - DNA, 2299 bp, Homo sapiens
gggtttcagaaagtgctttctctctgtggacatgaggattggattagaggagtggaatgggcagcctttggtagagatcttttgctagcaagctgttcacaagattgcctgataagaatatggaagctgtatataaagtcaacatctttagaaactcaggatgacgataacataagactgaaagaaaatacttttaccatagaaaatgaaagtgttaaaatagcatttgctgttactctggagacagtgctagccggtcatgaaaactgggtaaatgcagttcactggcaacctgtgttttacaaagatggtgtcctacagcagccagtgagattattatctgcttccatggataaaaccatgattctctgggctccagatgaagagtcaggagtttggctagaacaggttcgagtaggtgaagtaggtgggaatactttgggattttatgattgccagttcaatgaagatggctccatgatcattgctcatgctttccacggagcgttgcacctttggaaacagaatacagttaacccaagagagtggactccagagattgtcatttcaggacactttgatggtgtccaagacctagtctgggatccagaaggagaatttattatcactgttggtactgatcagacaactagactttttgctccatggaagagaaaagaccaatcacaggtgacttggcatgaaattgcaaggcctcagatacatgggtatgacctgaaatgtttggcaatgattaatcggtttcagtttgtatctggagcagatgaaaaagttcttcgggttttttctgcacctcggaattttgtggaaaatttttgtgccattacaggacaatcactgaatcatgtgctctgtaatcaagatagtgatcttccagaaggagccactgtccctgcattgggattatcaaataaagctgtctttcagggagatatagcttctcagccttctgatgaagaggagctgttaactagtactggttttgagtatcagcaggtggcctttcagccctccatacttactgagcctcccactgaggatcatcttctgcagaatactttgtggcctgaagttcaaaaactatatgggcacggttatgaaatattttgtgttacttgtaacagttcaaagactctgcttgcctcagcttgtaaggcagctaagaaagagcatgcagctatcattctttggaacactacatcttggaaacaggtgcagaatttagttttccacagtttgacagtcacgcagatggccttctcacctaatgagaagttcttactagctgtttccagagatcgaacctggtcattgtggaaaaagcaggatacaatctcacctgagttcgagccagtttttagtctttttgccttcaccaacaaaattacttctgtgcacagtagaattatttggtcttgtgattggagtcctgacagcaagtatttcttcactgggagtcgagacaaaaaggtggttgtctggggtgagtgcgactccactgatgactgtattgagcacaacattggcccctgctcctcagtcctggacgtgggtggggctgtgacagctgtcagcgtctgcccagtgctccacccttctcaacgatacgtggttgcagtaggattggagtgtggaaagatttgcttatatacctggaaaaagactgatcaagttccagaaataaatgactggacccactgtgtagaaacaagtcaaagccaaagtcatacactggctatcagaaaattatgctggaagaattgcagtggaaaaactgaacagaaggaagcagaaggtgctgagtggttacactttgcaagctgtggtgaagatcacactgtgaagatacacagagtcaataaatgtgcactgtaatggacttaataactacatgcttgcagtcactggtatcttaaaatattatcatgtaaacaggtcatctttaccttcataactgaattgagtttctgggtttttttttttttggaaagggagtttggttttgccacaccctccccctcccaggttaaagcaatttttttttttcaccctcctgagaagcgggaactaaaggccccccccctgcccgggttaattttggttttttaagaaaaaacggggtttcaccgtgggccgggggggtttaaaactcctcgtctaagggaatcggttggcctcgccctcccaaagggcgggaataacgggcgggaccccctgcccccaccctgagttcttttttttaagcccaaagcgagagcccttatttcagggctaaacg

SEQ ID NO: 64365 - DNA, 1094 bp, Homo sapiens
gaaaaccggaggagcaattggggatccaggtgtcagaggtaggggaaccaggggcaagctggggctgagctggaggtggggatgagagcaggtgtggggacagcaatacccccttgggggtcacctctctgcttcccccctccccaggcttcagttccttccccctgaccctgactccttgaacgtcactgaaaacggcagctattgcaaggagtgggggccgcgggcagccgctcttcagctcgcggcccaggggagtggcgaggggcgccccaaccccctgcccgcctctccgcacaatacttgaacattcatctgtactgaagtgttacttgaaccgggggaatctcggacctgggggagccggggtgtgaggggactggaccagcttggactgagacctgagaccgggccggtgggcgcccatttgggactgcgccacccccaggcttgttcttgttttactgtattgagcggcggcacccgccggacccgcattatggctgggggcgccagcccaagaatggggaccatgggactcctccagcctggctcttcccactctttcatcgtcatggaaacttgtatcccatttgcccagggaactgccactcctggttgccatggaaatagcagccaacggacacctcccgatgccagtgctaaggctggaaatggccccctcttagttgccatgggaacctagtaacagactctgctggccctccttccctgccccttcctcgagcgcggggtggggcttcgggaccccggggatgagccgggccaggtcccgcccctccgcgcaggcctccgggggggccggggcttaccatgtaggggaggggagatctatccacatacctcaggtaacagggaggtgcgcgggtggggggagggctgggcggaccaaaggccggaggggtggggcctggggatagcgagaggcttgagaatggggccgcttgggggagggaagaggcagcccggcgaggggcaagcgggggacccagccgggctgggcccctgggccccgggtctgtacaatacggtttgctataaaactcaaaatcttccagccgggaaaaaaaaaa

SEQ ID NO: 64366 - DNA, 2632 bp, Homo sapiens
ttttttttttttaggtgtaaaaatacagcttttattctgagacattgaccttcactagagtgggacctgtggccccagcctggctggagaagcagtcccagggcctgagtgacaccatttccctttcctgaaataggaacaagttattccaaaggagaaaggagagcccagagagatctgtacaggacctctcttgcacatggtgactggaggcagagggtggggagctggagaggagtccagtccctccaacaaatattgagggcttcaaagagctcttcctggacgtttctcttaatctggatttaaaagggacaggaggtatcttagggtccaagaacataacaggaatgggcaactctagaagtgtttgtgtgtggaaggccctaacctggccctgtcctccctgtctctacctttggctttcatgaagagagattcacagctcagaggaagggaggaatttctccagtcttcactttaacaaactcttttaagttttctgcctaccttatgttccctttggccaatgacccactccctgggaacaagatcttgttgactttcttgggaatctcctaagagataagtgctttgtgtcggagacaagttcaggtaaaccaaccaaggcagtgcctcccacagtcaaagagagaagctggagggccaaagcctatagagttgggcactacagctgctcatgctgcagaggagacagctagtcaggaaccctggagattcaagacaacttgctggtcccctttgcccagggctgtggtcctaatcacagtccttcacctttcccagggttagcctgtgtttcaaatgcatatgatctgcgctgagaggacaacagggggtcaggaacctggggttctctggggggcagactaagacgactccgggatccagacccttctgcaccttcagatgggagctccaggcagctaaggggccgaggagaatgggcagagatcatgctacaaggggaggttctggggatgaggcagtaatccccaccctcagtacaggtctgggttcgccgaactccttgagcctcagtcctttggcggtcccgggctagggccacagcagcatcaaaggaaagactacccccattcctccaagaggatcgagaagctcgggacccccaagccctttctccaggagtcccatcaagccggccaggcctcgggcatggatttgcaggtgccacatgaatcttgctacacattgcactgggcatcttggcaaactgtggcttggggggcaccacaggcacagagcggacctgttggacctgaaccagagtggaagctagacgcatgcccacgccacccaggccaagagaacaggggcatagacagccgtctggactgggctgcccctcaggctccatctcctctggctgaggtggctgtggggctacctcttccatctcagaagagtgaggattgccctctttggcacagtcaacctccagggacgctacacctgaaccttcagagagggtgtcctcttctaaatagtaccctccagccctctggtctccctcagcctctccatccccactctcccgttccttgctgacctcccctgctcctccttcagttgctgcttctgggcttctgctgtcttcaccatctccttggtcttttcttgcttcatggtaccccttctccctctgtcctttgtcctcatcctctctgactccctcagcctcttgtttctgtacaacttcccatttctcctcagcaacttgatcttcctgggccccttgctctaggtcccttccagcttctacctgggcttcctctctttgttcatcctcttctctctcaatttctttttccttctcatctgtatactcatctcctcctggttcctccacacctttagcctccatactgtcagccttcttctgacctttggacttctcttccttggcctctgtctcttccctactcccttctctcaatctgacttttgtctcttggcttcccccagcctcccctctatcctcactggcctttccagcctccaccttggtctctggacttccctctgcctcttccctgatgtctagcctgcctccaggctcagcatgcttgtcctccccaacttcccagcatgcctgctcttccccaccctgtcccagagcctgccttccacatcctgctgcctcgccctccagactccctgaacccttccagattgggggtttaggtcccagaaggggacttaggtcatcataggcactcaggaaaacttcctccccattttcctcctcaacttcaggcctggggccagcggagtccagggaacagcagctgggggccaagacaaactgtgcctcatccagagacaggtcatccaggggtggctccacagagaactcctccacctgaggcccaactcccaggagctcctccaggtagcccatcccagggtcgtcctccccaggggagaaggctgctcctgctgcttctgcctgggccacctccccatcctctgcccccacccactcaggttctgagctgcttgagtcctctaggaaggagaaggagtcctgcacctcctgggacagcgagtcctccagggcaggagccaagtcgtctgggcctgagtctgc

SEQ ID NO: 64367 - DNA, 997 bp, Homo sapiens
gcgccggggctgaaggcctggtctctgtctaggtccatatgggttccagttctggcttttgttccgagacacccctccgcacatttgaaatcaaagggtcagcaggaaaagatctgaaatgtgcagagacttttgtgccttcactacctcttcttttgaactgtagcggaccagagcatttccgtgagggaggttcaggtggaatgtgatcagcgggccgtgctgcatgcacagagtgcgcagagttgagccatcgatctgaggtgtaaggttttttagaacaagccaatttgttattctccctgagctgctctcaccccagctggaacctggggtatatctggcgtcagaatttccccatcctccacctatacgaaggggagaattatcccacgtagacaagggtggcttctgaccagtcagtcccggaggtgggcgggacggagcagtgatgtttttaggtggcaaagggaccttccacagctcatgagccagagaggtgtttgtaactgaaccaggagaccatgtcaatttggaatcactatttctggctgaagtgctttgtgctgtactgctgaggggaacgttgtagttggaggcacgaatggatgaccaggcactagttgaaggcagcgtggtgttcaaggatgaggatgacccactgttcctgtccctgaggtggtcaacttcccgcacagtattaattgaaagattgtttatgacactgccaggagtgacgtaagggtcagtttcagggtcaatgtttggataacctttccatggctcaccaggacgaaattttgcccaagacttcatgcttaacttttcctcaatcacttctgcattccttctcatccgcacacgtcagtctaagcacgccgatctgggctacatcagtagtaagtccagatgtaacaaaaccatgtttgctggagttttgatccaaagatgtgttcacagaaatgctgtccactgtcgtccacttccttagtcttga

SEQ ID NO: 64368 - DNA, 2249 bp, Homo sapiens
  misc_feature (1)...(2249): n = a,t,c or g
gtagaggtggccccttctgtccacacgccatgaggtcgttcccactctccagcaacttgaccggtttagtaaaaaacgatgagctgaaaaaccacatgcaataaacaagaaggagcagccaacaaaatctcttaaaatctcagaaatgttcaataaacatttgcagagcgagaaaataaataacatcgcaaaggagccagtggctcctcttttccccgcatgttccttgggtcaggggtgcatgtgtctcactagaagtcacatgtattaaaagcaggtgagttccagctctctctacaaccccactggcccccacccaaatgctcccaacgggtccctgacaccctcgctggtagctcctgcctttgataagctcctctagcctcaactgcttcttgatcctggctcccttcccagacaggctgcccagaaccctggttcatctgctcactggagccgctttgccagccagccagagaccccctcccagccatggcctaaagagccaacagctgggaacttgggctcatccccagctgcgtctggtcggcttggcggccaactggaaaacccagggcctccatggcgctctggacagaggaggccccgatcccagccccggctgccagccaatgccagcctgtccacttgacagaaaaacacacgctggccgcctgccccagggtgtttccagaagagaaatttaatctaatttacatacttctaggtacatcgataaccaaaatgtggccactgaaaaaagttaaaaggtcaatcagctcctggcttctagctggcccaggattgcaaaataaaaagatccacgttccttattctctacacaaaacgcgtttttaaaaaagtgaaaggtctagggagctatacatagaaagcaacagtgaaaagggagagggagcaggagtgggggaggagagtcccaccccccaaccccaccctccagggccccagagcccctgaggctctttggggggccttgacatggcaggaggcagctgtcagctctgagctcttcccagctgggaaggcccctctcgggggcagccaacaaggatttccgtggcattgtgggctcagtggggggctcccaggccccagcaggccccacagagggagcgtggcttcccctgagcaagcaccgtggcatgatgtggtcgttcaacccaggaactgggggtccggggcaggtcccgggtctcacgaggtgcgtgttgtgtgtgttcgcatgtacatgtgtgtgagaggatattcatgggggagagagggaaccagaacaggggtctttggggtctttgcaaatggccacggatggcagacatcgccctgcctggctgctagacgggggagtgctgtcctcccctgtgaccagaccggctgccatcagagacctggctgctgcccctgctggaccaggtgggcatgggctgaaggaagacaccctgtggccccagagtcctcgggctgggggaagggcagctagctggctcccggcgccctggctgtagtgtgcccggcccccaaggggcgccggtttgaggttttggcttgctcctttggaaacggaaagaaagaggaagagggacgaggacacagaggaggaagaagaggagacagaggtggcacgagaggggatctggaatgcttttgtgttagggagcctctgccgccgctgtctgtgcctgcggggcctgggactcctcaggtggggggtccgctttggagaagttcatctccaggatgtgccgctgtaagtgccgcacccactcttcctggatggagagggggccctggaattccacctcacagaacctgcatgggggaacagagagagggagtggccagtgctgtgaggagaggcggaagcatagccttgccagcatccctgggcacacctgctgctactcagtgtggacagagccagcccaggaggcgggggaagagggacccagaagtcaggcgtttcccatggacagccacctccactcaccatggggtcatggcagggtctcacagagacccctgcctctgtgctcagaagtcactggtgccaggtaagggctactggcttccaggtacccctgccatctggcagatacatagaatctgagacagtagagggcacagagaagcaaatcctaccaaacgcaccaagcccccgctctcctgcctcccgtcgacccggcaattccggnccggtggggcnggcggagactaatcaatgggttttcaat

SEQ ID NO: 64369 - DNA, 933 bp, Homo sapiens
gcggccgcggcttcgcctaccccagcgagctcaaggcccacgaagtgaagcatgagagtggccgctgccatgtctgcgtcgagtgcggcctggacttctccaccctgacccagctcaagcgccacctggcctcccaccagggccccaccctctaccagtgcctcgagtgtgacaagtccttccactaccgcagccagttgcagaaccacatgctcaagcaccagaacgtgcgacccttcgtgtgcactgaatgcggcatggagttcagccagattcaccacctcaagcagcactccctcacccacaagggcgtgaaggagttcaagtgcgaggtgtgtggccgggagttcaccctacaggcgaacatgaagcggcacatgctgatccacaccagcgtccggccctaccagtgccacatctgcttcaagacctttgtacagaagcagactctcaagacccacatgattgtacactcgcccgtgaagccattcaaatgcaaggtgtgcgggaagtccttcaaccgcatgtacaacctgctgggccacatgcacctgcacgccggcagcaagcccttcaagtgcccctactgctccagcaagtttaatctcaagggcaacctgagccggcacatgaaggtcaagcatggcgtcatggacatcggcctggacagccaaggtgggtgggccaagcgcaatggacagagcaggaatgataccaacatgacgcactcaggagcctcctgcccagttagaggagtggggaggctggccaaggctgagacttcgttggggtgggctcaggtctggaaggggggtaccctggaaggccatgatgacaataacgatgggatatttatgtcttcttcaaaggacttaaatgagatcacgtaaacaatataataaaaatcataactaacatttattgagtgctaaa

SEQ ID NO: 64370 - DNA, 1935 bp, Homo sapiens
gaggagatcatcgccctcttcatttccatcacgtttgtgctggatgccgtcaaaggcacggttaaaatcttctggaagtactactatgggcattacttggacgactatcacacaaaaaggacttcatcccttgtcagcctgtcaggcctcggcgccagcctcaacgccagcctccacactgccctcaatgccagcttcctcgccagccccacggagctgccctcggccacacactcaggccaggcgaccgccgtgctcagcctcctcatcatgctgggcacgctctggctgggctacaccctctaccaattcaagaagagcccctacctgcacccctgcgtgcgagagatcctgtccgactgcgccctgcccatcgcggtgctcgccttctccctcatcagctcccatggcttccgggaaatcgagatgagcaagttccgctacaaccccagcgagagcccctttgcgatggcgcagatccagtcgctgtccctgagggccgtcagcggtgccatgggcctcggcttcctgctgtccatgctcttcttcatcgagcagaacttggtggccgccttggtgaatgcaccggagaacaggctggtgaagggcactgcctaccactgggacctcctgctcctcgccatcatcaacacagggctgtctctgtttgggctgccttggatccatgccgcctacccccactccccgctgcacgtgcgagccctggccttagtggaggagcgtgtggagaacggacacatctatgacacgattgtgaacgtgaaggagacgcggctgacctcgctgggcgccagcgtcctggtgggcctgtccctgttgctgctgccggtcccgcttcagtggatccccaagcccgtgctctatggcctcttcctctacatcgcgctcacctccctcgatggcaaccagctcgtccagcgcgtggccctgctgctcaaggagcagactgcgtaccccccgacacactacatccggagggtgccccagaggaagatccactacttcacgggcctgcaggtgcttcagctgctgctgctgtgtgccttcggcatgagctccctgccctacatgaagatgatctttcccctcatcatgatcgccatgatccccatccgctatatcctgctgccccgaatcattgaagccaagtacttggatgtcatggacgctgagcacaggccttgactggcagaccctgcccacgccccattcgccagccctccacgtcctcccaggctggctctggagctgtgaggggaggtgtaggtgtgtgggtgactgctctgtgctgcgccttctcatggctgactcaggcctggggcatctgggcattgtaggggtgcagtggtatgtgcccacccctctcccattatcctttagctttaggccaagagcgttgctcagggcagcttctgcccagggtgggtgggactgagcaggatggattttcttttgataaaagagtcgatgcctgaaagagaaaccatttccttgattgtgtaaggaacttgctggacgcacattagagaataaagctcctgtttctaggctcctatgtgccacctgtgtccctgctactgccactccacccccactctggggaggggaagccctccctggggaagtggaatgcaagggacagagtttgtggagtgccacctgtggtctgtcacctccaacgtcgcacagtgggtgctggcccaacagtgaaacatggaagatccaggaggccttcgcatggccatttctccagggacctgcagggaaagcgttctgggaacagcatgtgcaagggtccggaggagcgagggcttggggccactgaggcgctgtggctggtgaagagcagtggggcgggagggaccatccgggtgacagcaaagggccctgtgccggacgcgtgggtcgacacgg

SEQ ID NO: 64371 - DNA, 928 bp, Homo sapiens
taaaagtcagaactcatttaaagaactttaagggatcctttagaaacatttttacttaatttcaaatgagtgggctgagcatgtagactagcagctttttatcaaacctggcattgtcaggttgaacttataaatacgaataattactactctgacttgtaaatgtagctgctaaagtatgaggtatatttaagaagaatagattagtttcattatacctataagaacaagaattcaaaagtgaggtagtcatccaggttccccctcccacaatatttttgtatcataaaatttagatgacttttttgggttacatttttatccatatattttgaactaacagaacttggcagaatgtgtgttgaatattctttacatttaacaattaaaaacaactaaaactgaatagcaaatagtttattggtaagtacacggtttcaacgggagtaataaattcacatgaaaaggagacaataatcaagtcaaaagaataaatgcttactaatcatcagaaaatctgtggccattagggctggcacgtaaaaatccaaaatcactcagaggccaaatcttaaagaagattcgtcctcttattagtccatatggaataggtccatagcacctggaatctgtagaattctgtagattgtcaccttctaaccaaacatgacccattggcacctagaattagagaagaaatgcagcctcttaaagataaaacctaatttgggtactataattaaaaagcatgtcattcagaggtagggagaaatgtcctaaggctctcttttatagaatagatacaaatcctaatattgcatttttgcttttatttcttgcacaataacttttactaaatatcaaaggtttcaacttttttaaaaacctatcatctttttttgtccgaacgcgtgggcggacgcgtggg

SEQ ID NO: 64372 - DNA, 3675 bp, Homo sapiens
tttctctgcctttctatcttctttactatgaattctgaataaaatggagaacacactctcaatatgtagaaaaataaaattttggcaaaacaataattactgtttttctgtatgtacttagcagtgaaatatttataggcaacagattttaagaagtcagttccatggctattaaaaaatgtttaagttaatgaaatttacagtgcatattaaaagcatgatacaaatggaaatttaaaattttgtattaggaagcccagcttgctaaaagtagcattaatatcattcacatcagattttaatttgttacacatttttgtagttcagcaaaggcccctatgatgaaaaacaattaaaaagtgttatgacaaaaataattatctcgtgtaaaaagggggagacccaaaagatttttcatatggttatttaattcagttaaatagaactgttatgaatttgagaggaatgaagatattcaaacactaacagaaaatcattagccttatattagagcattcaaatgcttatgtaactcttcaatccatccgggcttccataaaaaccaaaattttgaacacaaaaaagtggcagagtttacattaccttttgtatgttcctaagtatgaaattgcatcaatttattatgaattaaatttgaaaagcatcacagatttaaaaacaaagtacaaaagaagcttgattctttttaattccacaaatacctagcatctcaaagtaacatgtaaacaaacttctatgctgctcaatgaatccttccaatttcgataataaactaaatagtattggatttagtatatgactttcatgggtaagttatggttctatccattactttaacaatattactgatgtaacagagaaaaattttccactattgtatttatttaaaacaaactgacaagttcaagcacctgttttcagaaaagcccagcagcatttttttttttttaacatactcaaagtaagatttggcctaagcccttaatacctttctgaacagccatgcaactaaacaccctcaggagatgttacataagggagagaagaacatggagcaatttgcactttttcccctagataatattaacaaggtaaagcaaatccagatctttatgaatgaatggctgtcatgtttaatacacttggagctctataaaactagagccactatcatatatgtttatatagatatatatgtatttttaataaagtctctcacttgcttcaaaatttaaggatgatctttttcctggtcagtcatttcaagggaacaataaataaagtagaaaaggatgaactgttttgcatatttctgtggaagaacggaaaacatactttgagaggttcggaaaattcactgtacagaatgaacagcttatatacactatctgtgcaatttttcttggctggggtatttaaatgcaagagctcctccaaaataagaagccacattcattcttgtccaaatccctctgtctcttctattgcaaaaagaagtttttcctttagttgttcataactcttatatggtggtagatccaagcgattaaaacatgtatggcttcttggtaaccaagtgtctttgccaactttttcaatgcaaaacttttgaggcccattacttcccatgagctcagcaaatcctcctagaggtaaacggcaggttccagtgacgaactgcaatagtcgcattcttacttcattgtctgtctctttcacaaactgccaaaaccaaatgatttgcttgctgtttcttgtataatgtcgataaacagtatttctctgccaatctgccaagtcaacctcctgcatgccacacaacataacctctaattctttttcatcgaagtactgtagccactgaagaggaacaacttcattaaaaccatcaaggaaagctttggtctgttcttgtactcctcgagaaaaacgccattctgtcattaaaccaatatattcatctttgttctcctcagtcaccagaatattggaacctcccaacttcaggtcatgtgaagtaacttttcccaaaatctccatgtcaacagaaaagtacatttctaagccacattcttcaatgttgttatctcttatccagataagggagttataaaattcagtatcaatagattccaaatccttaatagtaagttttttacttaacatacgcttgtagaatggtaaagagaaaccagtatcgataaactttccatgaaatagtgccatggcaataaaacgaccaatgaaacagaagtatgaaagatggtctggattaatggttgatgctggatttatctgcagacaatagttgttcttgcccgcatactcaaataagcaatacattgggttcaaaacttcatgtgaaagcaagaaaaaccattctctcgctaggccaccataatcaagtccttcttctcctctaaatattacatataagcgcctcctcaagtcatagggttttaatgccataatctgttggaaggaatcttcaaacaatgtctgccgggacacattgatctttacatgactaggtagtgcattagactggcacaaataacggaagtgagcaagcttccacctaaagccgcgttcataagcaatttgtggaccacctttagttacagatgacttcccattgcgaggatctttgaatgttgttgttcttgtgttatgatcaacaaagtaccttacaccttcacgagtatatctaatttcccagccttctggcaggggttcttcattctgtaagccttgagttcttggatcttcccactgggttgtttttgtgttatgattcacaaagtaaaccctgtctgttgaatccactcttttttcccagcctggtggcaaaggtccataagggtcattttctgcagctaacattgaagccgaatagaggtatcgttggttaaactgttgcatagctccctgcaattggttccgctgagattgccactgttcaaaatttcggacagattccatggtaggccgctgccacgttgttgttctggtgttatgatccacataataaactcttctacgatcatcaactcttctttcccaacctggaggtaaaggttgtggtctctcccatgtggtagttcgagtattatgatccacataataggttctaccatgaggatcttttctttgttcccaccctgatggcaaggtttctgtgttggcattcccagactgctgccgtacaggatccatacacccatctggctgtcttgatttggctgcttcaaaagcagaactacttctagaattagaggtgtcaggctctaatatacttctagcttcagattccaattctgcactggtagaaggaatacattcattgttttctgaggaagtcagtatttcttgaactggaggatcttcaacagtagtactagtgcaatttggagacaaggcattttcttcagacactactggagtacccgtgacagacgcattatcagttggtgcaaatgaggatgattctccattaacagtgtcatcggcaggctcagatgcgagtggttttggagctggtgtatttttgggtctggcagcaacctgagacggagatgaaggtgtgttgtctccattaactacatacgagcagcatgagttttggactagagtgcttgtaggtacatgattagt

SEQ ID NO: 64373 - DNA, 2633 bp, Homo sapiens
ttttttttttttaaaattatgtaatcatttatttataaaataacaaaaatttatgaatagatctgtttattgtactgtgaaaagggtcttggtacatgaaacattatatactttgaggacagcattcagaactgttaagacaaaagacaaactataattttaaactcaatcttgatttaagggaaaggctataaattattggctgaaaagtattcagcatgaactcagattctatataagcatgaaagagtacaaaagatgttggagtccagtaagcccatacctaaattaactgtaaagcttcaaggactttttgtttatttttatatactagttttcttctgtgacaagttgattttatctccaagacttaaggccattccctggctctttgcacgaattcttatatggccggtaacagcagcatctggtccctggtgaattggcttctcaatgctgacatttgcaagtgcatcttcaccaaatatggaacgagcataaaggttggctgccataaagccacagtaaccagaaagggccttttctggagtcaggcatttcatattggttgactttaatatgtgctgtaagtagtcatttaaatcaaccatgttggtgttaactgtcactttgttttcccattcaaattcggcccacatctgacggaattctgcatcagtgcaagttgcaggctggatatagtccatgatgtcgatgtgaatatcactgagaaccacacaatttctgtcacttgctgctccagagacatcataaactatattaccaaaaattattccattttctgttgatgctactttgacgttagctttaatatttgcgaagtcatgaggagcaagagtcaaaggagacggcttttccacaagtttcagatcccctagtgtagctagttctaatgtgcaattctgcaaagtatcactggtttggttcacaacaagtacatccaggacaatatcatattggttgacatgaacgtaagcttctgcatatacaggatctgagaaacctgtcaattgggtgaccttgttaagtttagatgctaggggatctgctgcctctttcctctgtgtgttacccattgctgccagtaaactcagctgaaactgatcttccttgcagttcatttcattcttagcagttagttgcatgaaggaaatggggtcatcaggctgtactgtcacattcctcttttcagattctttcttttgggataatttctcttcttctagtttagcagataacatgtgagaaagggactgtctgcattccttattgaaaatgtcattcattaaaggtgaacattcagacaagaccttgaggcacagggaaattcgatccacatcatcatcagtaattggcttcttaggaagagaggattttcccaaatgcaggatagtagccatgagcaacatagcctcagcaacaaaagaattttgctttttcttctcctgaaccaaagctacatagcgcaatgcaatcttggtcagagttgtggcaagggaggcagcaacaaagaaatctccatccagaaggaatcctctcaagggaggtctgtcttcctctttcttggtgggtctagaactgctaagggcactctgagttgcataggtacccatttcagtaaccaatttctgaactggccctacagttatttcttcttcaggttttaattcaccagcttctttctttatttctgactctacaattgggatctctccaagggacctgcggatctcagtcatcacactctgaatgtcttccttggtactacagtattctcccaggatccataatgctcctcggtaaatcttgacagatttaatagcatgaaagacttcaagcatcttctcaacaataagcattctcaggttatcaaagcgctgaatggcttcacgaacaaactccaagacatcagcagctgctgcttcgttgttgtcactgagaaattccattaacacaggaataacatttgcagccatatctggaaatcggacagaacaggaatgcaatgttcgcactaggagttgtctgtatttgtcagtatcttcatgctcagacacattatttgtttttatcacttccttcttcaggacaataaccagctcttcaacatttctagaagagacaagatccagtgctaactgcagagttttctttcgtacttctaagtctggtgtgctcaatactcttaggatatccataaccagatcctgtagtactcgttcatgagcaggatgctcttttaattctatcaagcgatccaaaactatgagttttacattgttgtcgctctccttaataattaaatcaatgtaacactgagcagcagccttgattgcagttggtgcactagagagtgtcactaatgtcccagcagcttcatattttacagcagggctggatgactgtaataagttatagatgcagcgaataaaacgagctctttctgatggattagcatgacagcccttataaatcagttcaacaataaccagctgcagaatgtctccaaatgtttgaacttgatcaatgcaagtacttaagtaatccaaagctcgatcctgatctgcatgaattagcatcataaatgcattccttttgcaacttgcatcctt

SEQ ID NO: 64374 - DNA, 2756 bp, Homo sapiens
ttttttttttttcatgttcccgtatgctttattggaatgctgtcaggtccgcgccttccacctgggccctcacacacagcaaggagaggccccagcaccggtcccaggcccacctgcccgcacctgcagaagggaaaggccatcaccctccgtggacggggtctcggccaccacatccaccttctgaaggtggcccagacacctccacgctgctgactgcacttcccatcaaaagggactccctggggcagagtgggccgtccccctacccccgaggaaggcaccctcctgggcggggacagaccttggctccatgctgccaagtcaaggtgctggcgtggaaacaggcacatgtggaacaccacatcccactgtccaaggtggagtccacccctcctcggagcactcagcccaccagggtccaagcagccctcgggagataccacgcggccgcccacgtctcagcttggagaaagacactcaaagacccccacgctcagctctcgggggctggcttcctgggccctttgtgctggctgctttcccggtggcttctcagcaccttgagcctctgatgccccgcctctgacctcaggtccaactacagcaggtggctgcttcggtgatcaaatccctccgtggcagccaaggacaccggccctccacaccagctaccaagagggctggtgcccacagggaggaccgggcgccaggagggctcgctgaaatctcggtcccatcctgttctgcaagtggctgagtccctagggtgggacgagcacaggggctgaagggcccaggctgctccaggagtgctgcagacggcgaccgggaagtggggtgaccagggagcatggccaaggccagagtgatgagcatggtggcagggaggagagcacctcacgtacaaactgcacgagcttcgggcgcatgcatggctggccaagactgagggtcacacagggcagacaagggagacgagtcacacgtggcagcacatcatccagtcctcggggaggtgagggttggcatgtggcgggcaccggtgtgcagggcagccccatcctggggctggagcttccctagacccaggcaccacgcacaggcatcccctgctcagctcctgaacccggcccctcctgcctggccacgtccgctatcgcaccctcctgcatcagggccgagggcccaccctgcgctcctttttcttccagggtgttccaggatggtcaagttccagcactgagaacagctcaggtgtgggtgtggctattgtggaggccgtgtctggtgaacctggtgaacttggtggtgggacggtgctgatgcaggggagccacagagggttacgaccgacgcgggtctgacagcacaggcccaggcaggcgtggactcgggagccgagggtggtcggatggcagcgtgagcgccagtatcatttccagcatttccatctttaccactccagtcactctcttcaaaaagaaagaactagagcaaaaccaaagttaaatatctcaacgagaagggacacctcacgtcgctgacagctcggcacgtggctggtcccaggccccagagatactgcgtagtgaactggccgctggaacgcagtcacaggcctctgtgctgcagcccacctcccagcaagccacgcagagccccggccttgagtccaagaatgcccaggggagtgtgggacgggacggcccccacacaggctggacagcaagccgcccccacgcaccgaagactccccacgcgcaggcggcgcacacccgggtctccctagggtcctgcctcccgagacgctgtcctcacactgcagttgctgattcttgggtcaaatggaaggaggaggaacgacgagggcagagtgcaaacacgaagtcgcccgggggcgctggggacgggggcgcagtgggccctaccagttctggttgtcccagccatcatcagtgggcacggccggcggcactgccttcttggtgccctccccgccctccccgccgtcgctgttgctgttcctgttggtggaggccgagccccacacctcccagctgtccgagctcctcctctcggtggaggtgtccgcgcacgtccagctgtcgctgctcggggacttgcgggtcttggtgggctcagcacttccaaaggtctcccagaagctctggtctatgttgctgttttggaagtggtccagaccgctgttctgataactgtggccctccgaggggctgtccaaggggccctctgctttccccgaaaaaaaggtggtgacgtcccgccatcccttactaccgactccctggaccttggacgccaactgagagaccccactggagacatcatcaaaaatctttccctccttcaccttctcctgcgcaggcttgaggacgttctcgttcaggctgtggcccagctcggacgccttctgactcgcttgggatccaaactttgtagcgccctccttggctgccgaggcaaaccggctggctccagtggtgaagctgctccagcccgagtacagggaggacatggcgttgttgaggaagtcatcttctttcttctgaggcggtggcgtgttcccaaaccccacgtagcgattcccctgggccccttgataggagccgaggtcatcattcagccagtcttcaaaagccttgtccgaggaggcggtcacactctgcggctggccagagactcggtgcaccatgaaaggcagcgtcctgcccacgcgtccgcccacgcgtccg

SEQ ID NO: 64375 - DNA, 1380 bp, Homo sapiens
acaagatgcgagccatcctgcgcatagaagtggaggccgtgcggtttctaaagagggagccacacaagctggacagtctcttgaagcgtgtgcgcagcatgacagacgtcctgaccatgctgcggagacatgtcactgatgggctcctgaaaggcacggacgcagcccaagccgcacagtacatggctatggaaaaggccacagccgcagaagtcctgaagagtcaggaggaggcagcccacacctccggccagcccttccacagcacaggtgcccctggcgatgcgaagtcggaagtggtgcctttgtccggcatgatggttcgccacgcgcagagctcccctgtggtcatccagccctcccagcactccgtggccctgctgaaccctgctcagaacttgcctcacgtggccagctccccagccgtcccccaggaagcaacctccactctgcagatgtcgcaggctccgcagtccccacagatacccatgaatgggtctgccatgcagagcttgttcattgaagaaatccacagtgtgagtgccaagaacagggcagtgtctatcgagaaagcagaaaagaaatgggaggaaaaaaggcaaaatctggatcactataatgggaaagagtttgagaagctcctagaagaagctcaggccaatatcatgaagtcaataccaaatctggagatgccgccagccacaggcccactgccaaggggagatgccccagtggacaaggtggaactttcagaagattctccaaattcggaacaggacttggaaaagctggggggaaagtcgccccctcctcctccgccacctcctcgtcgaagctacctgccaggatcgggactcaccaccacgaggtcaggcgatgtggtctacaccggcagaaaggagaacatcaccgctaaggcaagcagtgaagatgctggaccaagcccacagaccagagctacaaaatatccagcagaggagcctgcttcagcctggaccccatccccaccgcctgtcaccacctcctcctcaaaggatgaggaggaagaagaagaagaaggagacaaaataatggcagaactccaggtatgtggatgaggtgactgacattggctccttgcctcccgcctgggtctctccagccatggcactcacagatttgttagcgagaaggccagggaagcgcatggaccgggaccatagaagctgtgtcttctggccttagcctttgctttcccaagatggcgctgaacaaggctctcaggatgcctataagatgtgcaaggaatgaccatttcacaaaacaactcacgctttcctacctctggctgtaaaattgactttcctttctttccatcttaagagattctgcttcatttca

SEQ ID NO: 64376 - DNA, 1555 bp, Homo sapiens
ggcacgagcagggcccgtggcggttcaggcgccagagctggccgatcggcgttggccgccgacatgacgcccgaggacccagaggaaacccagccgcttctggggcctcctggcggcaggtctacatctccgaaatcgcctacccagcagtccgggggttgctcggctcctgtgtgcagctaatggtcgtcgtcggcatcctcctggcctacctggcaggctgggtgctggagtggcgctggctggctgtgctgggctgcgtgcccccctccctcatgctgcttctcatgtgcttcatgcccgagaccccgcgcttcctgctgactcagcacaggcgccaggaggccatggccgccctgcggttcctgtggggctccgagcagggctgggaagacccccccatcggggctgagcagagctttcacctggccctgctgcggcagcccggcatctacaagcccttcatcatcggcgtctccctgatggccttccagcagctgtcgggggtcaacgccgtcatgttctatgcagagaccatctttgaagaggccaagttcaaggacagcagcctggcctcggtcgtcgtgggtgtcatccaggtgctgttcacagctgtggcggctctcatcatggacagagcagggcggaggctgctcctggtcttgtcaggtgtggtcatggtgttcagcacgagtgccttcggcgcctacttcaagctgacccagggtggccctggcaactcctcgcacgtggccatctcggcgcctgtctctgcacagcctgttgatgccagcgtggggctggcctggctggccgtgggcagcatgtgcctcttcatcgccggctttgcggtgggctgggggcccatcccctggctcctcatgtcagagatcttccctctgcatgtcaagggcgtggcgacaggcatctgcgtcctcaccaactggctcatggcctttctcgtgaccaaggagttcagcagcctcatggaggtcctcaggccctatggagccttctggcttgcctccgctttctgcatcttcagtgtccttttcactttgttctgtgtccctgaaactaaaggaaagactctggaacaaatcacagcccattttgaggggcgatgacagccactcactaggggatggagcaagcctgtgactccaagctgggcccaagcccagagcccctgcctgccccaggggagccagaatccagccccttggagccttggtctgcagggtccctccttcctgtcatgctccctccagcccatgacccggggctaggaggctcactgcctcctgttccagctcctgctgctgctctgaggactcaggaacaccttcgagctttgcagacctgcggtcagccctccatgcgcaagactaaagcagcggaagaggaggtgggcctctaggatctttgtcttctggctggaggtgcttttggaggttgggtgctgggcattcagtcgctcctctcacgcggctgccttatcgggaaggaaatttgtttgccaaataaagactgacacagaaaatcaaaaaaaaaa

SEQ ID NO: 64377 - DNA, 2938 bp, Homo sapiens
acgcgtccgccggagcgggccatggacgcgctcaagtcggcggggcgggcgctgatccggagccccagcttggccaagcagagctgggggggcggtggccggcaccgcaagctgcctgagaactggacagacacgcgggagacgctgctggaggggatgctgttcagcctcaagtacctgggcatgacgctagtggagcagcccaagggtgaggagctgtcggccgccgccatcaagaggatcgtggctacagctaaggccagtgggaagaagctgcagaaggtgactctgaaggtgtcgccacggggaattatcctgacagacaacctcaccaaccagctcattgagaacgtgtccatatacaggatctcctattgcacagcagacaagatgcacgacaaggtgtttgcatacatcgcccagagccagcacaaccagagcctcgagtgccacgccttcctctgcaccaagcggaagatggcacaggctgttaccctcaccgtagcccaggccttcaaagtcgcctttgagttttggcaggtgtccaaggaagagaaagagaagagggacaaagccagccaagagggaggggacgtcctgggggcccgccaagactgcaccccccccttgaagagcttggtcgccactgggaacctgctggacttagaggagacggctaaggccccgctgtccacggtcagcgccaacaccaccaacatggacgaggtgccgcggccacaagccttgagtggcagcagtgttgtctgggagctggatgatggcctggatgaagcgttttcgaggcttgcccagtctcggacaaaccctcaggtcctggacactggcctgacagcccaggacatgcattacgcccagtgcctctcgcctgtcgactgggacaagcctgacagcagcggcacagagcaggatgacctcttcagcttctgagggcccggggccagccggacacaagcggccctgacacgtgatggaccaaagccacctgctgcgggggagccagttctggggcccgcctgccacctctcccagccctcagcattgtcagcctgaagatcagagctgcagccagtcaggcaggggagagatttttcttttaagccctgctctttctctgagaaccaaaagatgccttgaatatttattcagtgacttctggcttatgctcagaagccagtctgcgtcaggcacgtctcctgctgcgtgacatgtgcagtgctgtaatcggctcccgcttgctctcctggagcaagctctgccctggctgtgggtatcaggactgtgaccaaagcatttctagtcccttctctctttctaaggacccaaatttccctgggggcatcctgcttcctgaaagctgttggatttcagtgatttttccccccaccccccagcacaggagagcacccacagccgcagaaggggaatgtgtcctcctgctctgcttcctcagggccccagcaggcggggggtttgagccctgggaccccaggcttctctagagacttaagggggcagctcctgaaccaaagacgatacagcttggcactttaaagcattaacagcaggtgtgaccctgagggctcctccatggtgctgcattgagtccagctttccttctgcccttcctccaggagaaggggcccaaggtccccgtggatggtctccacctgtgcttggaaccagtgtaactggctgctccctgctcccagggactgacacggggatcatctctgtgaccgccctccgtcgggcccctgcctgccttctcccctccacgcaaggctgtgctcttcctctggtttctgtgtgtccgtttgagtgtctgcgccccgcctccccatacttcctgggatgatgtgtgaaacctgacacctagatttatttggaaatattctatgaccactttacagatgaggaaactgaggcctcaagcgtggaggggtagagtgaagagtagaacccaggtctgatgccaaagctgctttcttctctgcctcctcctcacgcaactcacacctccttttcttctagctttgttgtcctcccaggaaccaaaaaaccccagctattttctgaccaaaatgtgtttcataacaaaccatctggtgcctttccacacagaactggcaggagcctcgtgtcctgctagctgtctctcttgttgatttccgtgaaaatgcaagtgtttgaagtctgctcattccgagggtgaaacaaaatccaaccctgtcagaatcatgctgttctctttgctgacactgtgaccctgggtcgggacagaccagcagcaatctgtctttagaatctctttccttcctccccttttgcccccgtggggctcccggcatcctgaaagccagcaaagcctccagcatcttttccatcctgaggtgcctcccagtggcctggcttgtcggagcaagtttcatcagccctagggaaaacacggcccctcctgggaacctccttacctggagtaaccggacaccttagacggaggtgcctgagggtggggtgggatttgcagggtcattatcagaacatgaggataacttccttgcccctgctctgtagccacctccttggcaccggcctctatttgtcataaggcggcgtgggcgaggcctgacacaggccagccttggcacgaggggggccaggggttctgagaagcgctgccctgtgagagccacgtgagagccatgctggccttcgtctccatctctggttgacgggctgtccgtgtgcctcctgtgtgtctgcagacacacaggagccacgctggccttcgtctccatctctggttgacgggctgtccgtgtgcctcctgtgtgtctgcagacaagtcttgctgtgctttatttgtgaaactttaatgaggaaaaaacaaataataaatgttctcgttttgaaactc

SEQ ID NO: 64378 - DNA, 2916 bp, Homo sapiens
tttcgttggaggcccgccaggcgctctacgccgagctccagacgcagctcgataactgccccgagtcagtgcgggaacagttacaggagcagctgagaagggaggcagaggccctggagactgagacaaagctctttgaggacttggagttccagcagttggagcgggagagccgcgtggaggaggagcgcgagctggccggccaggggctgctccggagcaaggctgagctgctccgcagcatcgccaagaggaaggagcgcctggccatcctggacagtcaggctgggcagatccgggctcaggccgtgcaggaatcagaacgcctggcccgggacaagaatgcctccttacagctgctgcaaaaggagaaggagaagctgactgtgctggaaaggagataccactcactcacagggggcaggcctttcccgaagaccacatcgaccctcaaagaggtttaccgctccaagatggatggcgaggccaccagcccccttccccggacccgcagcggccccctcccctcctcctctggctcttcctcctcctcctcccagctcagcgtggctaccctggggcgtagcccctccccaaagagcgctctactcacccagaatggcacgggcagccttcctcgcaacctggcagccacactgcaggacatcgagaccaagcgccaactagctctgcagcagaagggacaacaagtgattgaagagcagcggcggcgactggctgagctgaagcagaaagcggcagctgaggcacagtgccagtgggatgcccttcacggggcagcacccttcccagcgggcccctcgggcttcccccctctcatgcaccactctatcctacaccacctgcctgcggggcgggagcgtggggaggagggtgagcacgcctatgatacgctgagtctggagagctctgacagcatggagaccagcatctccaccgggggcaactcggcctgctcccctgacaacatgtccagcgcgagtggtctggacatggggaagatcgaggagatggagaagatgctgaaagaggctcatgcagagaagaaccggctcatggagtcgagggagcgggagatggagctgcggcggcaggccctggaggaggagcggcggaggcgtgagcaggtagaacggaggctgcagagtgagagtgcccggaggcagcagctggtcgagaaggaggtcaagatgcgggagaaacaattttcccaggcacgacccctgacccgctacctgccaatccggaaggaggactttgacctgaagacacatattgagtcatcgggccatggtgttgatacctgcctgcacgtggtgctcagcagcaaggtctgccgtggctacttggtcaagatgggcggcaagattaaatcatggaagaagcgctggtttgtcttcgaccggctcaagcgcaccctttcctattatgtggacaagcatgagacgaagctgaagggagtcatctatttccaggccattgaggaagtgtactacgaccacctgcgcagtgcagccaagagcccgaacccagccctcaccttctgcgtaaagacccatgaccggctgtactacatggtggccccatctgcagaggccatgcgtatctggatggatgtcattgtcacaggggctgagggctacactcagttcatgaactaactgccgtgggcctcctggcagagcacaactggggcttttgtataagaagactttaatattctgtaaggagcttggtcctgtgagtttctgggctctggcctcctgaagaaccagccagaagaagaaaagtagaggtggctttgctgcctcctgggagcccagaacttgcagtaaccctttagggtcctgccccaggcccagccagggctgaggagctgtcacagagagggcctcagctctgacctgacacctgctctccccagcctgttttctcttttctaaaagacaaattatggtaccataagctgccaaagatcccctcctgcctcagacccctttgccaggggctttgggggctgagcacagccacatccagagtggggtaatagctcaggcggcccgcttcccatttctcaaaccccgctctgccccattgttctcctttcccttatactttttattaccttgctcaagggccagagatctcaagtgtcaaccttgaggtcccagctccatcccctagttgcagactcatcaccatggttaccatagtgactgcttcattgccatggttacatactaattgctgcagctctgtggcccagcccactgcttcagctgtgggccatctgagggtacgtgccatcatctctccagcccaggcccctgggcatctcatgctggggggaagggactgaatacctttttccttccccctgcctgtgtcttcagccctgatgcacaggctgccagccccccagtccagccctctcccttccactggtgccttgcttagagccagaagggatgaagccgggggatctatggaacagaggaggagcgatgcagttgggagaggaagctagaagggttatggttggagttctgtacagtgttgagtttccgacagggaaagaggattcctccaatgcgcctagagagaaagcctgagcaggagatgatgcagcagaggggaagggccctgtggtgccgccgcccttccttcagcctccgaagggtgatggaaatggagagtggaggaccaggcctccagctgtctggcctcgcccttcacgccttaacactaagcccacctcccctgctctccttcccagcattgagcccttggttgcctgggcccaggctgggggttttcagtatttgtaagcttttcagcagaccaataaagccttggcacgcacgcgtgggtcgacacggtaagtccgcttcggta

SEQ ID NO: 64379 - DNA, 1861 bp, Homo sapiens
tggtgggagaccagcaaggatgtgtgggatcaggttatccctgacccccgatccccctaaacggtggttagcagtgtgtgactcaggatgtgcaggcccagggtggtgccatgactccatgggagagggctatggtgggcttcacctctgctctccctcccgatcttacccacagcactgaaagagccccagtgacccttcacctcgacgggatcgtgcaggtcctaaactgccacctcagtgacacggccattgggatgatgaccaggattgcagttctcaagtggctctaccacctctacatcaaaactcctcggaagatgttccggcacacggacagcctctttcccatcctactgcagacgttatcggatgaatcggatgaggtgatcctgaaggacctggaggtgctggcagaaatcgcttcctcccccgcaggccagacggatgacccaggccccctcgatggccctgacctccaggccagccactcagagctccaggtgcccacccctggcagagccggcctactgaacacctctggtaccaaaggcttagaatgttctccttcaactcccaccatgaattcttacttttataagttcatgatcaaccttctcaagagattcagcagcgaacggaagctcctggaggtcagaggccctttcatcatcaggcagctgtgcctcctgctgaatgcggagaacatcttccactcaatggcagacatcctgctgcgggaggaggacctcaagttcgcctcgaccatggtccacgccctcaacaccatcctgctgacctccacagagctcttccagctaaggaaccagctgaaggacctgaagaccctggagagccagaacctgttctgctgcctgtaccgctcctggtgccacaacccagtcaccacggtgtccctctgcttcctcacccagaactaccggcacgcctatgacctcatccagaagtttggggacctggaggtcaccgtggacttcctcgcagaggtggacaagctggtgcagctgattgagtgccccatcttcacatatctgcgcctgcagctgctggacgtgaagaacaacccctacctgatcaaggccctctacggcctgctcatgctcctgccgcagagcagcgccttccagctgctctcgcaccggctccagtgcgtgcccaaccctgagctgctgcagaccgaagacagtctaaaggcagcccccaagtcccagaaagctgactcccctagcatcgactacgcagagctgctgcagcactttgagaaggtccagaacaagcacctggaagtgcggcaccagcggagcgggcgtggggaccacctggaccggagggttgtcctctgacaggcctggcacggaggagggcccaccgagtggtcccatgaaacactaagggtcgtcacgccctcccgaggagctcaaggacctgcctgtcaggaccagggctgggcctgccaacccagggcagtgttggggccggaggctgctgtgtctgcccaagctcctctcagagtccagtccccaggcctccagcgctgtcagctgcaccctggcattctcacagagctggctgcccacccagtggggggctatagcctcagagaccactcatcctctggaatcaacctctttctaataccctcttggaaaaagagcttgcccctcctccagcacactagagctctggccttgtgtgtatatgtatacatacgtgaacacatgcctgtgtgtgtgtgtgtgtgtgtgtacttgtatgcacgtaggcaccagcacaaagatctgaatgatgcaccccacccccaccccaataaagaaataacagaaaaccctcaaaaaaaaaa

SEQ ID NO: 64380 - DNA, 2910 bp, Homo sapiens
gcagtatctgggagagacgcagttcgcaccgggccagtgggctggcgtggtgctggacgacccggtgggcaagaatgatggcgcggtgggcggcgtgcgctacttcgagtgcccggccctccagggtatcttcacgcggccctccaagctgacccggcagcccacggccgagggctcggggagtgatgcccactccgtggagtcgctgactgcccagaacctgtcattgcattcgggcacggccacgcccccgctgaccagccgcgtcatccccctgcgggagagcgtcctcaacagctccgtgaagactggcaacgagtcgggatccaacctctcagacagcggctctgtgaagcggggcgaaaaggacctgcgcctgggggaccgcgtgctggttggcgggacgaagactggcgtggtgcggtacgtgggggagacagactttgccaagggcgagtggtgtggcgtggagctggacgagccccttgggaaaaatgatggggcggtggcgggcaccaggtacttccagtgcccacccaagtttggtctcttcgcgcccatccacaaagtgatccgtatcggcttcccatctaccagcccagccaaggccaagaagaccaagcgtatggccatgggtgtgtcagcactgacccacagtcccagcagttcctccatcagctccgtcagctctgtggcctcctccgtggggggtcggcccagccgcagtggcctgctcacggagacctcttcacgctacgcccgcaagatctcgggcaccacggccttgcaggaggcactgaaggagaagcagcagcacattgagcagctgctggctgaacgagacctggaacgggctgaggtggccaaggccacaagccacatctgcgaggtggagaaggagattgccctgctcaaggcacagcatgagcagtatgttgcagaagccgaggagaagctgcagcgagcccggctgctcgtggagagcgtgcggaaagagaaggtggacctgtccaaccagctggaggaggagaggaggaaggtggaggatctgcagttccgcgtggaggaggagtccatcaccaagggagacctggagacccagacgcagctggagcacgcgcgcattggggagctggaacagagcctgctactggagaaggcgcaggccgagcggctgctccgagaattagcggacaacaggctgaccacagtggccgagaagtcgcgcgtgctgcagctggaggaggagctcaccctgcgccgaggtgaaatcgaggagctccagcagtgcctgttgcactcgggtcccccacctccggaccacccagacgccgccgagatcctgcggctacgggagcggctgctctcggccagcaaggaacaccagagggagagtggggtgctgcgggataaatacgagaaggccctgaaggcctaccaggcggaggtggacaagctccgcgcggccaacgagaagtacgcacaggaggtggcgggcctgaaggacaaggttcagcaggccaccagcgagaacatggggctaatggacaactggaaatccaagctggactcgctggcctcggaccaccagaagtccctggaggacctcaaagccaccctgaactcgggcccaggcgcccagcagaaggagatcggcgagctgaaggcagtgatggagggcatcaagatggagcaccagctggagctgggtaacttgcaggccaagcatgacctggagaccgccatgcacgtgaaggagaaggaggccctgcgagagaagctgcaggaggcccaggaggagctggctgggctgcagcggcactggcgggcccagctggaggtgcaagccagccagcaccggctggagctgcaggaggcccaggaccagcgccgggatgccgagctgcgtgtgcacgagctggaaaaactggacgtggagtaccggggccaggcgcaggctatcgagttcctcaaggagcagatctcgctggccgagaagaagatgttggactacgagcggctgcagcgggcagaagcccagggcaaacaggaggtcgagagtttgcgggagaagctcctggtggctgagaacagactccaggcggtcgaggccctgtgctcctcccagcacacccacatgattgagtcgaatgacatttcagaggagacgatcaggacgaaggaaactgtggagggcctgcaggacaagctgaacaagagggacaaagaggtgacagccttgacctcccagaccgagatgctcagggcccaagtaagtgcgctggagagcaagtgtaagtcaggcgagaagaaggtggacgccctcctgaaggagaagcggcgcctggaggcagagctggagaccgtgtcccggaagacccatgacgcctcgggccagctagtcctcatcagccaggagctgctgcggaaggagcggagcctgaacgaactgcgggtgttgctgctggaggccaatcgtcactccccagggccggagagggacctgagccgtgaggtacacaaggctgagtggcggatcaaggagcagaaactcaaggatgacatccggggcctgcgtgaaaagctgaccgggctggacaaagagaaatccctgtcggatcagaggcgctactccctcatcgacccgtcctcggcgcccgagcttctgcggctgcagcaccagctgatgagcacggaggacgccctgcgggatgcgctggaccaggctcagcaggtggagaagctgatggaggccatgaggagctgccctgacaaggcccagaccatcggcaattccggttctgcaaacggcatccaccagcaggacaaagctcagaaacaagaggacaagcactgatcctgaggggatactgtggagcagcccagtccacaccagagccccactgtatt

SEQ ID NO: 64381 - DNA, 1448 bp, Homo sapiens
tttcgtctgctggcggccgggagcgccggtacggggcgctaagccggaggctccgggacgtggatacagatgaaaagaagcaaagaattgataactaaaaatcatagtcaagaggaaacaagtattcttcgttgttggaaatgtagaaaatgtatagcaagctctggttgttttatggagtatcttgagaatcaagtgattaaggataaagatgattcagttgatgctcaaaatatttgtcatgtgtggcacatgaatgtagaagcccttccagaatggataagctgcctaatccaaaaagcccagtggacagttggaaaactgaattgtcctttctgtggggcccgtttagggggctttaattttgtcagcactccaaaatgttcctgtggccagcttgcagctgtacatctctccaagagccggactgattatcagccaacacaggcaggcagactaatgagaccatcagtgaaatacttgtcacatcctatagttcagtcaggttgtgacaaggaagctctgctgacaggtggtggctctgaaaacagaaatcacaggcttttaaacatggcccgaaataataatgaccctggaagattaacagaagcactctgcctggaggtgcgaccaacatattttgagatgaagaacgaaaaactgctgtccaaagcatcagaaccaaaataccagctttttgttccccagcttgtgactggcagatgcgctacaagagcttttcatagaaaatcacatagtttggatctgaacatcagtgagaaactgactttattacccactttatatgaaatacatagtaagactactgcctattccagactaaatgaaacacagcctattgacctttcaggcttgcctttacaatctagtaaaaatagctattcctttcagaatccatccagttttgatcctagtatgctgctgcaaagattttcagtggccccccatgagacccagacacaaagaggaggagaatttcagtgtggtctagaagctgcttcagtgtattctgaccatactaatactaacaatctgactttcctgatggacctgccctcagctggcaggagcatgccggaggcctcagaccaggaagagcacctctcccctctggacttcctgcactcagccaatttttcattgggcagcattaatcagaggcttaataagagagaaaggagcaagttgaagaatctaagaaggaaacaacgaaggcgtgaaagatggctacagaagcagggtaaatactcaggagtgggattgctggatcatatgactttgaataatgagatgagtacagatgaagacaatgaatatgcagaagaaaaggatagctacatctgtgcagtgtgtctggacgtttatttcaacccttatatgtgttacccttgccatcacatcttctgtgagccctgcttacggactct

SEQ ID NO: 64382 - DNA, 1238 bp, Homo sapiens
cggccagaaaattgaaagcgttggacgccctaccggaccgcaattcccgatgacgatttcgtctgtaacgcagaagcgaaatgtagcgagccggttgtcgcggctggacgctcgccttggctgggggtgtgggggggcacgccgggggccaaggaggactgtcgaggaggagtgatgtgaattctcgctcagcccgggtcctcttcctcctcgtggtcccaggacacctggtgttcctctacaccatcagctgtatgcagggcgggcacaccaccctcacactcatcttcatcatcttctatatgacagctgcactgctccaggtgctgattctcctgtacatcgcagactggatggtgcactggatgtggggccggggcctggacccggacaacttctccatcccatacttgactgctctgggggacctgcttggcactgggctcctagcactcagcttccatgttctctggctcataggggaccgagacacggatgtcggggactagcttggtcactcaacattttccccatccctctgcactttctatttgaaatttttcttttgttcccctgtccctcctccaccccacactcccacctctttctaggacttcactttgataccaaattctcattattttcaatgggaatttttatacattgagccaagtttgtatagcaagaatttgggaaacacagatggcctgagataagcagtacaagtaggtttttgagacaatcaccaagtgcagtttcatggtgggtgcctccaggtgatgtggactggagcaggggagttttgtctggaatctggggacatggggtttggctttagcaacctgtcttggccctaatgagaaaccctttgtaagtgggctctggatttttggttttgttttctttttatctgttttgttttatttttggttttggttgaacagagggacagaagaataagtaacactcccaaacacagacatacttttgtagaagtggaccaacttcaaagctctggacaggagacacctgctccaggcccctgtgatcccagttctgttctcttgccctctggacctaagcgttcccactcgcagaaagagtaaggtggactgacttttcaatttgtgcacatgcctcttgttcaatggcctggtcaacatcaacaacccctccctctgatcatttccagttgattgtcatatccagaaaaaaatggaacagtgcactcttctccg

SEQ ID NO: 64383 - DNA, 2610 bp, Homo sapiens
gtggaatgggacaaagaccatggggtcctggagtcccacctggcggagaaggggagaggcatggagctatccgacctgattgttttcaatgggaaactctactccgtggatgaccggacgggggtcgtctaccagatcgaaggcagcaaagccgtgccctgggtgattctgtccgacggcgacggcaccgtggagaaaggcttcaaggccgaatggctggcagtgaaggacgagcgtctgtacgtgggcggcctgggcaaggagtggacgaccactacgggtgatgtggtgaacgagaacccggagtgggtgaaggtggtgggctacaagggcagcgtggaccacgagaactgggtgtccaactacaacgccctgcgggctgctgccggcatccagccgccaggctacctcatccatgagtctgcctgctggagtgacacgctgcagcgctggttcttcctgccgcgccgcgccagccaggagcgctacagcgagaaggacgacgagcgcaagggcgccaacctgctgctgagcgcctcccctgacttcggcgacatcgctgtgagccacgtcggggcggtggtccccactcacggcttctcgtccttcaagttcatccccaacaccgacgaccagatcattgtggccctcaaatccgaggaggacagcggcagagtcgcctcctacatcatggccttcacgctggacgggcgcttcctgttgccggagaccaagatcggaagcgtgaaatacgaaggcatcgagttcatttaactcaaaacggaaacactgagcaaggccatcaggactcagcttttataaaaacaagaggagtgcacttttgttttgttttgttctttttggaactgtgcctgggttggaggtctggacagggagcccagtcccgggccccatagtggtgcgggcactggacccccgggccccacggaggccgcggtctgaactgctttccatgctgccatctggtggtgatttcggtcacttcaggcattgactcaaggcctgcctaactggctgggtcgtttcttccatccgacctcgtttcttttctttcctatgttcttttgttcagtgaatatccctagagctcctaccatatgtcaggccctatgcctcaccctgagaacgcagtgagcatgaggtggacctgtttgctgggaaccccaggtcacccccttttcttcctactctgtgcctggagcatcatgtccacccctgcagatccttggaaaagaaaatgtttatgttgcagggtattgcatggtcacgagtgagggcaggcccctggggacacatctgcccacagctgcacaggccagggcgcaggcacatctgttggttctcaggcctcagataaaaccatctccgcatcatatggccagtgaccgctttctcccttcaagaaaattctgtggctgtgcagtactttgaagttttaattattaacctgctttaattaaagcagtttcctttcttataaagtggaatcaccaaatcttatcacacagagcacagtcctgtagttacccagcccgctccagcagtgcgggagattgtaaggaagcggtggcggctggtgaagcaagtctcacatgtcggcgttcttggccaatggatacaaagataaagaaaatgttgcctttttctaggaactgtcagaaatcctcatgcctttcaagacttctgtgaatgacttgaattttttattccctgcctagggtctgtgaacgaggcctgtctcttccctggggtttctttccatggcctttatttctcctcttccagtgggagttttgcaggctcttctctgtggaaacttcacgagcgttggctgggcctcggcttcgctggagtgtactccagggtgaaggcagagtgggatttgagacccaggttaggcacgacccaggctgagaagggacgtttccatcattcacagtgccctccccacagcactacctcaccccgacccccaccctcactcctaccccaccccgcgatcgtcaggggtgccacggtgggccggagggtgccggctctggctgtccctgtgccggtccctcacaaacctctccccctttgaaactcaagcacagctgcgaggagggcagcgaggagggacccctctctcatggttgtctctttcccccgctatgtcataggtagtggaggaagcgaaggaagtgaacgctgaatgtgacgcatttctgaagagctcagctgtcaccgggcatagcctggaagccccaagtctgttctgactttgcctggctgtctccttgacccgcctcctagatcattgtccttgatgtccaggctgggtcatttaaaatagagatgcaatcaggaaggttgggggacttgggactgtggctgaattgagaccttgctgatgtattcatgtcagcacctgagtcacagcccaggtgcccggaagcagcctcttcgcataaggcagtgattttgcgaattactttaaagctcaccttttttcttcccctctctgttcgctgctgtcagcataatgattgtgttccttccctatgggatccatctgttttgtaaacaataaagcgtctgagggagtgt

SEQ ID NO: 64384 - DNA, 1415 bp, Homo sapiens
ttttttttttttcacactgtcacaatttattgaaattttataaaaactcaggccaagtggaagaataaggtacaactcaagagtacaaagacaactccgtttccgttcagtacttttctcctcagcactggtggtaagaaagccccttgctctctagtagccaggcagcatggacttacagtcttaaaatgaggctttatgtatttcaggctggaggcaggttgccttttctcctgaggaatctcaggcagggtaaaagttacttaccactcagtacctctgtgccagaagaaaagctcaatttattcaatccttagaaaagttactatcgtcccctggtcagacactaaggtgtcttgataaggtccagagacaaccacatagtccttattctaattcgtagtgaaaaggctgcaggcatatggtgctcctacgatgggcctgaccctttcctaagcacatctcatttccacatcctttgccttctctttcccccaacatttccagccagcatagaacccaatttctgggaaattgagaggagaaacagtattatgaacacagactcctttcaaattggaacaggagccaaaccaaataaataagagaattgtgtagggaagtggggtagaagggaggtcagggagcaatcccttgcctcaagtctggtgcacctcatggaacatcagttcacgggggatggctgtttctggaccaaacttggtggctgcccgacgctcaaaggcagcaacattctgtttgacaacctcatcaaaaaacatggtggccagctgggagtgcagcagagaacgaaattcaaaggaaatcgaaaagtccacagtgcaggttcgaggataggcaggaataccagggctgaatcgccaaatagtctctaagtggttgaagagcttgccatcagtacaaacagccttgaccatgtgaggtttgaccatggaaactgcagaggtgtaacgttccatgacaggtggaaagccaacctccagctgggctttcaaatgacccttacggctggataccaccagagacttcttaccccagggcacaaactcacgatactcctggacgttggacaccacctcatacatctcctgcattgagtaccccatgattctacgctccgagtaagcctttcgcttgttggtgaagggagcagcaaatcccatgaaggaacggctcgaaggtaagccagcctcagccgccaagatctgggcagcccgaggcaagaggaggctgcaggaggtcagaaaccccgagaacttcccttctcgtacaacttgcaaaagcattatccaaagctctacgttagctcccagggcatgattgctgccagtccccgccgcgcctgcatcccagtatagcacccctccaccgcggaaccccggggttcgcagcga

SEQ ID NO: 64385 - DNA, 2545 bp, Homo sapiens
  misc_feature (1)...(2545): n = a,t,c or g
ccttgttctcgtgttggacatatctaccgtcttgagggctggcaaggaaatcctccgcccatttatgttgggtcttctccaactctgaagaattatgttagagttgtggaggtttggtgggatgaatataaagactacttctatgctagtcgtcctgaatcgcaggcattaccatatggggatatatcggagctgaaaaaatttcgagaagatcacaactgcaaaagttttaagtggttcatggaagaaatagcttatgatatcacctcacactaccctttgccacccaaaaatgttgactggggagaaatcagaggcttcgaaactgcttactgcattgatagcatgggaaaaacaaatggaggctttgttgaactaggaccctgccacaggatgggagggaatcagcttttcagaatcaatgaagcaaatcaactcatgcagtatgaccagtgtttgacaaagggagctgatggatcaaaagttatgattacacactgtaatctaaatgaatttaaggaatggcagtacttcaagaacctgcacagatttactcatattccttcaggaaagtgtttagatcgctcagaggtcctgcatcaagtattcatctccaattgtgactccagtaaaacgactcaaaaatgggaaatgaataacatccatagtgtttagagagaaaaaaataaaccaataacctacctactgacaagtaaatttatacaggactgaaaaccgcctgaaacctgctgcaactattgttattaactctgtatagctccaaacctggaacctcctgatcagtttgaaggacattgataaactgtgattttacaataacattatcatctgcagttactgtttacaagactgcttttaccttaaactttgtagatgtttacatctttttgttgtgttttaagatgatgttggtaatttgtgcctttagctctgttttattagacagagttaaagcatgttgtcttctttgggattacactcaggggtctgaaaggcagtttgatttttatttttaacacacttgaaaaaaggttggagtagccagactttcatatataacttggtgattatcaacctgttgtgtctttatttaattttacatctttttgaagcactgccacaggttattagccaaggtggccttccttcacagtcatgctgcttttttgaaaggtgaatttcaacacatttagtgcctctttcatttctcagtatatatttcaagagcttgtgatgaaatctataggatggtaatgatggacttgtcacctgtatggggaatacttttactactcagaaatgaatttatgtgctgccatttgctataaagttgaactttgtatggcttgaaaaagaaatgacaatatggaacatcccaaggctgtcccatagggttggaagttgtgtagcattcactcccttacctactggcattcccagtgccctctgtccatacctacttctaggattgcaaaggagtcttccaactagagaaaaattgtccactgacatttgggatttacttttctccaatacctgccaatacagaaaactattatcagttgttattgttatcccttgaaagcgagggtgacaaaaacaacaaaacaccgttataaacacatcaaaggttcattctgactgaggtaagactttccaagcccttgttagattaggccttataaaacttgtgtgcattataacctaagctgtgcaacctgtgaagccaagagtgaactgatgtttcatttatattttcatccaaatgacattatctgcacgtttttaaaatttaaaaacaaaggactatttaaaaatacagtttattaacaaacgtgaactactttctgttacattaggtgttccctagtgtttcttaatttctttttagaaagtgtatttttattagtatttttccggtgaacagaagatttgtttggatttaaacatttactaagacagtacctattaggaaaaccaaatattgcaaatggtcaattcgattttaatttctcaaaagatactctgttatccagaagattaaaatgcctacattgagtgcttaaaaaaaaaaaaaacaactgtgatgatgtgaccaaaacggcaaggaagttaagcatttttgatcctgtaatcatggnatcattacaatgaaaggnattcacaaactactgccagaggaagtttgttttttaatttaagagggaaatataacctataaatttgtttcttccaagcttagctcttaaatttggagactcaaagttaaacatcctcaacagagttttatttataattttgaattgncaatttgtattttgctactgatctgtgatcaaccattttaactttcatctntagggatgtttaacatttattattgccaaataaacccacttttaaaaaagaaacttagagagaaattgggacctttaattaccttgnggggtttgccaaaaaaggctccatttttccatnttggaggaggaattttaanccttttttnacctttgccctttnggcc

SEQ ID NO: 64386 - DNA, 782 bp, Homo sapiens
cccacgcgtccggaccttggtgatttaaggcggcaggttaaactcttagaagagaagaataccatgtatatgcagaatactgtcagtctagaggaagagttaagaaaggccaacgcagcgcgaagtcaacttgaaacctacaagagacaggtagtagaactacaaaacagattatccgaagaatcaaagaaagcagataaactagattttgaatataagcggctaaaagaaaaagttgacagtcttcaaaaagaaaaggacaggctgagaacagaaagggattctctgaaggaaaccattgaagagcttcgttgtgtacaagctcaagaagggcagctcacaacacaagggttaatgcctcttggaagtcaggagtcttcagacagtctagctgcagagattgttacacctgaaatcaggtaaggagattgtggtgttcacacttacactgcacagtattcttggagaaaacgtacttctctacaatatgaagaagataatttccttattctttctcaccgacactttcaacatgaactcagtgttaaatttttatgttttcaacatgttaaaagctttcttccactggcctacggaaaattgatttgctcacttcaataagacaatctttcacacatataaagccaattgttatgtccaaagcttgagtatcctcagcagacattaagcaatgaatacatttggcctgtagacaatagttatgcttagctataagcatgcaaaattattagttattaagatttatctgctaaccagctggg

SEQ ID NO: 64387 - DNA, 574 bp, Homo sapiens
caagaaagcggcttcagctgtaaaggacctggccagaatgtggctgtgaccagggcacaccctgactcccaagggaggcggcggcggcctgagcggggggcccgaggaggccaggtgttttacaacagcgagtatggggagctgtcggagccaagcgaggaggaccactgctccccgtctgcccgcgtgactttcttcacagacaacagctactaagcagcatcggacaagacccccagcacttgggggttcaggcccggcagggcgggcagagggctggaggcccaggctgggaactcatctggttgaactctggtggcacaggagtgtcctcttccctctctgcagacttcccagctaggaagagcaggactccaggcccaaggctcccggaattccgtcaccacgactggccagggccacgctccagctgccccggcccctccccctgagattcagatagaatgtgacctctaggcatgatttgctaggggtgggagcagcatctttctgtcaccattgtgtgaacagcagggtcagatgttcctagtgatatcacgggaagccttgtttc

SEQ ID NO: 64388 - DNA, 1179 bp, Homo sapiens
  misc_feature (1)...(1179): n = a,t,c or g
acgtaattgtgcatgcgcggcccatccgcacgcgggctagcaagtactacatccccgaggccgtgtacggcctgcccgcctatccggcctacgcgggcggcggtggctttgtgctttccggggccacgctgcaccgcctggctggcgcctgtgcgcaggtcgagctcttccccatcgacgacgtctttctgggcatgtgtctgcagcgcctgcggctcacgcccgagcctcaccctgccttccgcacctttggcatcccccagccttcagccgcgccgcatttgagcaccttcgacccctgcttttaccgtgagctggttgtagtgcacgggctctcggccgctgacatctggcttatgtggcgcctgctgcacgggccgcatgggccagcctgtgcgcatccacagcctgtcgctgcaggccccttccaatgggactcctagctccccactacagccccaagctcctaactcagacccagaatggagccggtttcccagattattgccgtgtatgtggttcttccctgatcaccaggtgcctgtctccacaggatcccaggggatgggggttaagcttggctcctggcggtccaccctgctggaaccagttgaaacccgtgtaatggtgaccctttgagcgagccaaggctgggtggtagatgaccatctcttgtccaacaggtcccagagcagtggatatgtctggtcctcctagtagcacagaggtgtgttctggtgtggtggcagggacttagggaatcctaccactctgctggatttggaaccccctaggctgacgcggacgtatgcagaggctctcaaggccaggccccacagggaggtggaggggctccggccgccacagcctgaattcatgaacctggcaggcactttgccatagctcatctgaaaacagatattatgcttcccacaacctctcctgggcccaggtgtggctgagcaccagggatggagccacacataagggacaaatgagtgcacggtcctacctagtcttttcctcaccttcctgaacttcagacaacnattggccantctcccactggaaggctgtatcccctcaaganggagccaaggaatgtttttcccctggagatgccacactaattaattttccccatatggtttaancaaccccttgggtgaaaaaanccaa

SEQ ID NO: 64389 - DNA, 2872 bp, Homo sapiens
  misc_feature (1)...(2872): n = a,t,c or g
tttcgtgcctcgggtgacacccagatctctctctctccagggccccaaaggtgagagcgtgggctccatcacacagcccctgcccagcagctacctgatcttcagggccgcctccgagtcagatggtcgctgctggctggacgccctggagctggccctgcgctgctctagcctactgagactgggcacctgcaagccgggccgagacggggagccagggacctcgccagacgcatcaccctcatcgctctgtgggctgccagcctcagccaccgtccacccagaccaagacctgttcccactgaacgggtcttccctggagaacgatgcattctcagacaagtcggagagagagaaccctgaggagtcagataccgagacccaggaccatagccggaagacggagagtggcagcgaccagtcagagacccctggggccccggtgcggagagggaccacctatgtggagcaggtccaggaggagctgggggagctgggcgaggcgtcccaggtggagacagtgtcagaggagaacaagagtctgatgtggaccctgctgaagcagctacggccaggcatggacctgtcccgcgtggtgctacccacgttcgtactggagccgcgctccttcctgaacaagctctccgactactactaccacgcagacctgctctccagggctgcggtggaggaggatgcctacagccgcatgaagctggtgctgcggtggtacctgtctggcttctacaagaagcccaagggaatcaagaagccgtacaaccccatcctgggggagaccttccgctgctgctggttccacccgcagactgacagccgcacattctacatagcagagcaggtgtcccaccacccgcccgtgtctgccttccacgtcagcaaccggaaggacggcttctgcatcagtggcagcatcacagccaagtccaggttttatgggaactcgctgtcggcgctgctggacggcaaagccacgctcaccttcctgaaccgagccgaggattacacccttaccatgccctacgcccactgcaaaggaatcctgtatggcacgatgaccctggagctgggtgggaaggtcaccatcgagtgtgcgaagaacaacttccaggcccagctggaattcaaactcaagcccttcttcgggggtagcaccagcatcaaccagatctcgggaaagatcacgtcgggagaggaagtcctggcgagcctcagtggccactgggacagggacgtgtttatcaaggaggaagggagcggaagcagtgcgcttttctggaccccgagcggggaggtccgcagacagaggctgaggcagcacacggtgccgctggaggagcagacggagctggagtccgagaggctctggcagcacgtcaccagggccatcagcaagggcgaccagcacagggccacacaggagaagtttgcactggaggaggcacagcggcagcgggcccgtgagcggcaggagagcctcatgccctggaagccgcagctgttccacctggaccccatcacccaggagtggcactaccgatacgaggaccacagcccctgggaccccctgaaggacatcgcccagtttgagcaagacgggatcctgcggaccttgcagcaggaggccgtggcccgccagaccaccttcctgggcagcccagggcccaggcacgagaggtctggcccagaccagcggcttcgcaaggccagcgaccagccctccggccacagccaggccacggagagcagcggatccacgcctgagtcctgcccagagctctcagacgaggagcaggatggtgactttgtccctggcggtgagagcccatgccctcggtgcaggaaggaggcgcggcggctgcaggccctgcacgaggccatcctctccatccgagaggcccagcaggagctgcacaggcacctctcggccatgctgagctccacggcacgggcagcacaggcaccgaccccaggcctcctgcagagcccccgatcctggttcctgctctgcgtgttcctggcgtgtcagctgttcattaaccacatcctcaaataggagccctgggggnagagctcctggcctgtgggggccctggacagtcacaccccagcagcagtgagtgggcaggtttggaggagcagccagggagccccgagtggcccaggagtccccccacacacagatgcataggcctgccttccggagaccctgtccacattgccgggaccaccctggtggggccactggtgggtgccagggacaggttagggccactctggggaaggcattttggttttttattccacgctgtgctgtttggatgggagccccacagaggcaggtcctggaaccaccccacccccacacctggacgctcgctctggtgggggcacacgcaggtggaggtggttgtgggtgcaggtgtgtgcaggggtgtggggggcgcaggggtgtggcttagctggccccgcacccaggccggggaggctcaagttcgccactttactcagaccgatgcacagtcttcccattttacacttttttaataaacataattgcaatattttaggtgggctgcgagctgcagtcagccttcacgtctggcctcagtccccgtgtcagtgccgctctgcgtgtgcgtgtgcacgtgtgtgagcctctacacatatatatacgtacagagccttaaaccacatcgtggcggtgccgtctgagctgtagcgggtggctttgtttccagtttttgtacccgtgtccttgtctcccctcctcccccatctggggatgtgtctgtgttccacaccttgaaataaacagacacatacgtgttctcttcttgcgggaaaaaaaaaa

SEQ ID NO: 64390 - DNA, 1731 bp, Homo sapiens
ggatttcgtgccaagcttcaggaggccaagcggcaacaccagtcagactgtgtggcttttgagggctgctaccctggaaaaggaagtggccgggttgcgggagaagatccaccacttggatgacatgctcaagagccagcagcggaaagtccggcaaatgatagagcagctccagaattcaaaagctgtgatccagtcaaaggacgccaccatccaggagctcaaggagaaaatcgcctatctggaggcagagaatttagagatgcatgaccggatggaacacctgatagaaaaacaaatcagtcatggcaacttcagcacccaggcccgggccaagacagagaacccgggcagtattaggatatccaagccgcctagcccgaagcccatgcctgtcatccgagtggtggaaacctgagctgcctggagatggttgctgccattgctgctgcctctgcctcggagaagcccactgcccctgttggctgttaacactgcctttgacttcctgactgtcccctggctgcacccaggacttcgggctcctgtgtctcaccattcccaagcccctggccactctaagctgggcagacggagcacgagcacctattcaaggcactgcagccctttggaagacattgtcctgcaagcaggagccagggcaatatctatattcctacagtgactattttttttttgtagagagcctcccttctgttgtagactggactctggctgcgccataagccaggccttcatcagattgggagaggtgacaagatttgcctcagccataaaagctggagacacagatgtccagagtgattggagaatgtcctgggggaatgaagttccttccacaaacacagctcagttcttagcaacaaactgtttgtttttctacttgctccatctgcagcctacgctgccctggcctcctgcagacagatagtggggttacctggcaaggcctggtgagagccagtgaacctaagctttgactgggtggcctcgtctttctggggaggagggaatgtacattcagggagtagccttttgcggaaaaattctctagggctacagacagtcatgtgtgacttctctctgctgtgaaaactcccagagtctctttagggattttccctaaggtgtaccaccaggcacacctcagtcttcttgacccagagcctgaaaactgttttcactgggttccaccagtcccagcaaaatcctctttgtatttattttgctaagttattggtggttttgcttacatctcatgattgatataataccaaagttctatagccttctcttgcagtatttggatttgcttgaaaccgggaaaactgttcccattaggcttgttaatgtcagagtgacactattatgaatctttctctccctttcctctgcctgtttcttctctctttctccttcaaacttgctctgcagctaaggaaggtgagtctactttccctgaggctttggggtcagagtatatgttgtttggagaaagagggcaatcaggactcttctgggacccagatgagttcttcactagcccttctgaaccccttgctccataattggtcttttatcctggctctgaatgaccctgcaggtcatcatggttttctttttttattggttttttttttttctgaaacaaagtctcattctgccccccaggctggagggcaggggcgcgatctcagctcactgcaacct

SEQ ID NO: 64391 - DNA, 1128 bp, Homo sapiens
aggtggggcctagtgggaggtgactggatcatgggggtgcatttctcatgaatggtttaacagcattccacttggtactgtcctcttgagtgttcttgtgagatctgggtgtttaaaacatgtgtggcacctcctcctgcgcccccttgctcctactctggccacataagatgtgtctgcttcccctttgcctttccactatgattgtaagtttcctgaggcctccccagaagcagaagctactatgcttcctgtatagcctgcagaactgtgagccaattaaacctcttttctttataaattaaattacccagtctcaggtatttctttacagcaattcgagaatggattaatacaattgccaattttccttttctttttttaaaaaataaaagccaaaataacacttttaagatcccaggttttagacaaggcagctgtagtctctccatcatcctcactgtccatttgcttcttcctgggacagacactgtggcccagtgaagctgaggggaccctgggattcaaagctggtggaatggaccctccctccccccacaagctgtaataacctgctggaatcccacacaacctgagggcttcacttgtcaacagctcccttccctcagaggctattttgaggcaggcattcggtgttttatgactgagctacccaggagaatggtttgaggccacactcaactgttccaaggagcagcactggaccaaaggctgcttggttccctgcggttcctgatgccaccccttctcttcagggtggttacctggcagaaggcgtccaatgcatcctccagtgtcccacgagggtttccgctgaaggagccggcggggatgtagtacatgggcaccagcagcagggagaggatcacaaagccaaagaggccctcagtgccaactgcccgcagtgggtgcacattgtgtttgtagacgaacttctcctctagcaccatctggatggcaacgatgatctgggccatgatgatcaacaggtcccctgtgatcacttcgctgagcttgtgctgactgtcgtgcttgctcaggaggtcagccaggcccacgaccaccagctccgcaaggccttcgatgaattcctcacgcggtcaatcc

SEQ ID NO: 64392 - DNA, 2377 bp, Homo sapiens
ttttttttttttcccccggagaggactgtattataccattcaaggggccaaaaaaaaaaagaaaagaaaactttgcccttcaattcaaactctgttatgccacatttggcataaaatgcttaccattacctaaaaatgattttttaaaaaatgcttatcattacctaaaagaaaaatgtagcaaaattcaactttggaggaaaatgaaaactgtacatatccttgagaaccacggaaagctaagagatatagaaaattgtacattcccacaaagttatttcaacaaagaggcattatctgcattccaccaaggtcagtcgagttgaggagaaagagaagcaaatgccaagaaattggctgcatattttttttttaatctgttttgccttaaatcacaaagagcaatgggaagaacaagctccctttctccttttctcagacacctttggtctaaagttgttctttttctagttcttccctcccctgtaatttttaattatcagaaataaataccagtgcatttcaggtggtcgtctgtgttagagtgcataactgaagttattagtggcttgggagtttgcacatataactggaggtaaacagcagattactacacctaatctcaccctgagcatttctcctctgtcaagtctaaattctgccatcttcttttgcaaaaacaagcagacatccccaccaaaggccaaaatataatgataactgacagtgaacagaaacccattgtaaagacaaactattccagctttcaaattcactgtgactggatactattagttttttgagtttataactccccagaattgtcaaaagtaaccttgtagccaatccgcttgcagacactaaaaaccacctgaaataggccacccagggtaccaaaagcagtgtcaaagagcagtgagacagtgccaccaaggcccagtgcaatgtccttgcaaacaattggaatagcgcccatggtgtacacagggaaagtggccacatccacaaggacacggacagggatgctcagaactcggcaaatggccttcagcagacaacaaaggatccggaggagagccctgatgactttggccacgaccttgagcaccttccagggaatgctcaccaactcttccccaatggccatgaagtatgagatggtggctgagcccaggcggtaaaggcaactttctatgccattaatcacctgcttggtaacacaccacaggaaatagacaatgttcttcaggattgctaccacaaggtaataaattaattgaaaaagcttgatgaatggggtagcaatgaagcccatgagttttcccaaaaagctactacttccctcagatgcctctggaggcaacagagtagacctcttgctcctggtgctagaaaggggactagaactcttttgagattgtaccattcgttcttcatcctggatttggttaaccacttccaggatttttttcattttctctgtgtcttgctcagtttcaccacagttgttctgaaacagctgagggttaaatggaagcagtttctgaagatcttttaccatcacatcttctatgatgtcactgtcccgggtgtgcttgacaaagcccatggcccagcctcctccagggacagcacaacaggctgccagccaaacaaactcagggactgccactttgtctttaactctgtagtctgagggcactgtgcctgtgaggatatataggtcttccccactgccacactgtggggtcaaagcccggtccattaggctgtggagattcacataccaccgttcctggaaggactgagtcattggggctgaatttgtgagagtaaatgtggccacctggacatcactgctaagggagaatgggtaaagctgtcctctttggtaatcagaatcaaggtaatctgtattcaaggcttgcttgcttcccaggctgttcacagaggtgatggcctctgcctcattaatcgcctcctcaaggttgctgttggggtcatcgatctgcggctccaccagccatcgctgctcggcgccgccgggcgcagggcgcggggcgcggaacgcggagtacacggggatgcggtcccgggtgctgtagagggtggcgaagcgctcagcaccctccgcgcgctgacagatcttcacgtgggaatcggccgccagccccgcaggcggggtcccggcgtagaagaacttgtcacattcgccaaagccggcttcctcctcgcccacgagccggccttccagcagcccagccagggcgaagaggctgcccagcgcgagccagcgcgcggtgcccatggcggcctctgcgagcgcggcggggccgagcggctgggctgccgcggcgcgagctctgcaggctgggcg

SEQ ID NO: 64393 - DNA, 5122 bp, Homo sapiens
ccaggagtttcggcagagatatgagatcctgactccaaactccattcccaagggtttcatggacgggaagcaggcgtgcgtgctcatgataaaagccctggagctcgacagcaatctgtaccgcattggccagagcaaagtcttcttccgtgccggtgtgctggcccacctggaggaggagcgagacctgaagatcaccgacgtcatcatagggttccaggcctgctgcaggggctacctggccaggaaagcatttgccaagcggcagcagcagcttaccgccatgaaggtcctccagcggaactgcgctgcctacctgaagctgcggaactggcagtggtggcggctcttcaccaaggtcaagccgctgctgcaggtgagccggcaggaggaggagatgatggccaaggaggaggagctggtgaaggtcagagagaagcagctggctgcggagaacaggctcatggagatggagacgctgcagtctcagctcatggcagagaaattgcagctgcaggagcagctccaggcagaaaccgagctgtgtgccgaggctgaggagctccgggcccgcctgaccgccaagaagcaggaattagaagagatctgccatgacctagaggccagggtggaggaggaggaggagcgctaccagcacctgcaggcggagaagaagaagatgcagcagaacatccaggagcttgaggagcagctggaggaggaggagagcgcccggcagaagctgcagctggagaaggtgaccaccgaggcgaagctgaaaaagctggaggaggagcagatcatcctggaggaccagaactgcaagctggccaaggaaaagaaactgctggaagacagaatagctgagttcaccaccaacctcacagaagaggaggagaaatctaagagcctcgccaagctcaagaacaagcatgaggcaatgatcactgacttggaagagcgcctccgcagggaggagaagcagcgacaggagctggagaagacccgccggaagctggagggagactccacagacctcagcgaccagatcgccgagctccaggcccagatcgcggagctcaagatgcagctggccaagaaagaggaggagctccaggccgccctggccagagtggaagaggaagctgcccagaagaacatggccctcaagaagatccgggagctggaatctcagatctctgaactccaggaagacctggagtctgagcgtgcttccaggaataaagctgagaagcagaaacgggaccttggggaagagctagaggcgctgaaaacagagttggaggacacgctggattccacagctgcccagcaggagctcaggtcaaaacgtgagcaggaggtgaacatcctgaagaagaccctggaggaggaggccaagacccacgaggcccagatccaggagatgaggcagaagcactcacaggccgtggaggagctggcggagcagctggagcagacgaagcgggtgaaagcaaacctcgagaaggcaaagcagactctggagaacgagcggggggagctggccaacgaggtgaaggtgctgctgcagggcggaagggactcggagcacaagcgcaagaaagtggaggcgcagctgcaggagctgcaggtcaagttcaacgagggagagcgggtgcgcacagagctggccgacaaggtcaccaagctgcaggtggagctggacaacgtgaccgggcttctcagccagtccgacagcaagtccagcaagctcaccaaggacttctccgcgctggagtcccagctgcaggacactcaggagctgctgcaggaggagaaccggcagaagctgagcctgagcaccaagctcaagcaggtggaggacgagaagaattccttccgggagcagctggaggaggaggaggaggaggccaagcacaacctggagaagcagatcgccaccctccatgcccaggtggccgacatgaaaaagaagatggaggacagtgtggggtgcctggaaactgctgaggaggtgaagaggaagctccagaaggacctggagggcctgagccagcggcacgaggagaaggtggccgcctacgacaagctggagaagaccaagacgcggctgcagcaggagctggacgacctgctggtggacctggaccaccagcgccagagcgcgtgcaacctggagaagaagcagaagaagtttgaccagctcctggcggaggagaagaccatctctgccaagtatgcagaggagcgcgaccgggctgaggcggaggcccgagagaaggagaccaaggctctgtcgctggcccgggccctggaggaagccatggagcagaaggcggagctggagcggctcaacaagcagttccgcacggagatggaggaccttatgagctccaaggatgatgtgggcaagagtgtccacgagctggagaagtccaagcgggccctagagcagcaggtggaggagatgaagacgcagctggaagagctggaggacgagctgcaggccaccgaagatgccaagctgcggttggaggtcaacctgcaggccatgaaggcccagttcgagcgggacctgcagggccgggacgagcagagcgaggagaagaagaagcagctggtcagacaggtgcgggagatggaggcagagctggaggacgagaggaagcagcgctcgatggcagtggccgcccggaagaagctggagatggacctgaaggacctggaggcgcacatcgactcggccaacaagaaccgggacgaagccatcaaacagctgcggaagctgcaggcccagatgaaggactgcatgcgcgagctggatgacacccgcgcctctcgtgaggagatcctggcccaggccaaagagaacgagaagaagctgaagagcatggaggccgagatgatccagttgcaggaggaactggcagccgcggagcgtgccaagcgccaggcccagcaggagcgggatgagctggctgacgagatcgccaacagcagcggcaaaggagccctggcgttagaggagaagcggcgtctggaggcccgcatcgcccagctggaggaggagctggaggaggagcagggcaacacggagctgatcaacgaccggctgaagaaggccaacctgcagatcgaccagatcaacaccgacctgaacctggagcgcagccacgcccagaagaacgagaatgctcggcagcagctggaacgccagaacaaggagcttaaggtcaagctgcaggagatggagggcactgtcaagtccaagtacaaggcctccatcaccgccctcgaggccaagattgcacagctggaggagcagctggacaacgagaccaaggagcgccaggcagcctgcaaacaggtgcgtcggaccgagaagaagctgaaggatgtgctgctgcaggtggatgacgagcggaggaacgccgagcagtacaaggaccaggccgacaaggcatctacccgcctgaagcagctcaagcggcagctggaggaggccgaagaggaggcccagcgggccaacgcctcccgccggaaactgcagcgcgagctggaggacgccactgagacggccgatgccatgaaccgcgaagtcagctccctaaagaacaagctcaggcgcggggacctgccgtttgtcgtgccccgccgaatggcccggaaaggcgccggggatggctccgacgaagaggtagatggcaaagcggatggggctgaggccaaacctgccgaataagcctcttctcctgcagcctgagatggatggacagacagacaccacagcctccccttcccagaccccgcagcacgcctctccccaccttcttgggactgctgtgaacatgcctcctcctgccctccgccccgtccccccatcccgtttccctccaggtgttgttgagggcatttggcttcctctgctgcatccccttccagctccctcccctgctcagaatctgataccaaagagacagggcccgggccaggcagagagcgaccagcaggctcctcagccctctcttgccaaaaagcacaagatgttgaggcgagcagggcaggcccccggggagggcagagttttctatgaatctatttttcttcagactgaggccttttggtagtcggagctcccccagtcgtcagcctccctgacgtctgccaccagcgccccccactcctcctcctttctttgctgtttgcaatcacacgtggtgacctcacacacctctgccccttgggcctcccactccatggctctgggcggtcagaaggagcaggcctgggctccacctctgtgcagggcacagaaggctggggtggggggaggagtggattcctcctacctgtcccagcagcgccactgtcgctgtctcctctgattctaaaatgtctcaagtgcaatgccccctcccctcctttaccgaggacagcctgcctctgccacagcaaggctgtcggggtcaagctggaaaggccagcagccttccagtggcttctcccgaacactcttggggaccaaatatacttaatggttaagggacttgtcccaagtctgacagccagagcgttagaggggccagcggctccccaggcgatcttgtgtctactctaggactgggcccgagggtggtttacctgcaccgttgactcagtatagtttaaaaatctgccacctgcacaggtatttttgaaagcaaaataaggttttcttttttcccctttcttgtaataaatgataaaattccgagtctttctcactgcctttgtttagaagagagtactcgtcctcactggtctacactggttgccgaatttacttgtattcctaactgttttgtatatgctgcattgagacttacgggcaagaagggcattttttttttttaaaggaaacaaactctcaaatcatgaagtgatataaaagctgcatatgcctacaaagctctgaattcaggtcccagttgctgtcacaaaggagtgagtgaaaacacccaccctacccccttttttatataataaaagtgccttagcatgtgttgcagctgtcaccactacagtaagctggtttacagatgttttccactgagcatcacaataaagagaaccatgtgct

SEQ ID NO: 64394 - DNA, 866 bp, Homo sapiens
ccgatggagatagccattttaaaagttttcgatccccttctttaaaggcgaaatgtttttcagcccagataaagccattttaaaagttttcggtccccttctttaaagatgaaaagtatatcctactttttgttaaatggatatttcctttcaatgataacgttcaaaatttccctgggttttttcccctttctgagagttaagccatttgaattacctttattctaaccacaaaattttttttgtagggtttttttttttggtttttttttgtctttttttttgcgtttaaaacatttgggctattccctgacgatctatacatgtaaatttgattgctaaacattgtcactttgaatgtcaaactatttttaatctattgattttgattaaaaatcataatacaaacagagctaaaatcacgctaacaaaataaactaaatatgaaaagttgcattgaaagggcatcacattattcttaataggatcgtgtagaaacattccaatggcagtgttctcaaaataaaacaaaattacattagaagacctccagcctggccacttttgggaccttacctgtaactctggctggtgggtgtctttactcttgtactacatggctcacttacatcagacatcatatttgtataccctgagaaatctgacactgaagtccttactctatggtccacttctccattagagttagtgataaaggtcattggcaccctgctgcccgacttaaactgagaaccaaacgcttgtgcaaagttctcaatctgatacgttgttctaggctctatgtctttctgaggatctatctggctagctaactcctgagatggaatctgaaagcctgttgaaga

SEQ ID NO: 64395 - DNA, 1857 bp, Homo sapiens
agtgtggtggaattcgcaagtattatgctaaccagtattttcttaattttagttttctcataagattcaccttgaaactatgtgtgaagtaaagaaaatctaccttcaggatgagtttagaattttgaagaaaaagtccttcacttttccaagagaccataagtcagttacagctgatacagagatgtggcctgtctatgtggaattgaccaatgaaaagatatatggctgcgatttcattgtcagtgctacaggagttacaccaaatgtagaaccttttctccatggtaacagttttgatctaggagaagatggtggcctgaaagtggatgatcatatgcacacatcccttcctgatatctatgctgccggtgacatctgtactacatcctggcagctgagcccagtctggcagcagatgaggctgtggacccaggctagacagatgggatggtatgcagcaaagtgcatggctgcagcgagttcaggagactctattgacatggatttcagctttgaactgtttgctcatgtgacaaaattttttaactataaggttgtactgctgggaaaatacaatgcacagggcttaggttcagatcatgaattaatgctgagatgtaccaaaggacgagaatacatcaaagtcgtcatgcaaaatggacgaatgatgggagctgtcttaattggtgaaaccgatttagaagaaacatttgaaaacctaatcttaaaccaaatgaatctttcatcatatggagaagatctgctagatccaaatattgatatagaagattattttgactaaaaatggaatttcttcaggaatcatataaagttccaaatgacaccagaaaaatcacaagtcaataaaatgaatgactgtattgagttaatgatgaccacactgaaaattacagaagtgataatgatatttgtggaaaaatataaaaacataaattctaagtttgaaatcagttcaaagtttatttatagatatatctttccaatacaacactgaccgcttagataaaaatcttaagttatttattcctgtgttttaaacataaatatgtttacttgtgatttagctttggagcaaatttaggtaagttatctacttaagccaaatgtactctagtagactagaaccattctttgtgaaatgtcaaaatatggctattggtttcaggacctttaaaatcggttgtattttactttaaatagagatgtagcaatatctcgtttgctaatatttatattgatgacttactcctttcttgttgaattgtacttctgggttttataacctggaaatcatctacaagcttggtccaactctagcccacgggtctaatgcagcccagaacagctttgaatgcagcccaacacaaatctgtaaactttcttaaaacatgagatttttcttgcaatttttttttttttaagctcatcagctatcgtcagggttagcatattttatgggcggcccaagacaattcttcttccaatggggctcagggaagccaaaagattggacatccctgatctacatatttaacttaaagtatcactcagggaacctctgtcagtataatattgctttcaaaaagatggttatgtcaaaagaaaaaatatagctaagtatataaaggcataaaaaacttaagacaattacatgaacttattctcaaatattttacattttttgtaaactttcttaaaacatgagatttttcttgcaattttttttttaagctcatcagctatcatcagtgttagcatattttatgtgcggcccaagacaattcttcttccagtgtggctcagggaagccaaaagattggacctcgtgccgaa

SEQ ID NO: 64396 - DNA, 918 bp, Homo sapiens
  misc_feature (1)...(918): n = a,t,c or g
ctgggccagtggtatgagcacggtgccaggtggctcccgccactccctggggatccaagtgcggggtggctggggtgtaactgggggagaggaggagagcctcactgtccctgtcgctgacacctggcaggcggggagctttaaggtggccacccaggagaggaacccccagagagcccagatgaggctgcggaggcagaagaagggtgtggtccccttcctgggggattttctgactgagttacagaggctggattcggccatcccggacgacctggatggcaacaccaacaagaggagcaaggaggtccgagttctgcaggaaatgcagctgctccaagtggctgccatgaattacaggcttcggcctcttgagaaatttgtcacctatttcacaagaatggagcagctcagtgacaaagagagctacaagctgtcctgccagctggagcccgaaaacccgtaggctggcaacatcctgcagtggctgggaacccaccgggatgctggccagaacaccggctctgcaccatccctcacccagaccgtagacaccagggaaccacatctaggaggctggcagctcagctgcatcttgccctggatcctcatcaccaactgctcctgctggccaggatcaggccatgggacttttgtgagtcaggcgggagaccattttatgtttattttctttagtgtataagtaagggttttttcttaactttcgttaaaataaaattttaaaaaactattcaaaatgttctgtagttgttggaatgagaaaagtaactccagtgcggtaaccatataccagtctttaggattcatagcctagcatgtcaaattgaggctatggctgaccaagttatggaatagctgtcncgtcttacggtctctatcanggtctcattggagtgc

SEQ ID NO: 64397 - DNA, 1625 bp, Homo sapiens
ggattatccgggtcgacccacgcgtccgcccaaaagaggttaaccttgattttcacacaaatgaagtcattacaaacagcatcactcaacctaccctccacagttttgatgctgcacaaagcagagtgtatcagctcatggaacaagacagttatacacgttttctgaaatctgacatctatttagacttgatggaaggaagacctcagagaccaacaaatcttaggagacgatcacgctcatttacctgcaatgaattccaagatgtacaatcagatgttgccatttggttataaagaaaattgattttgctcatttttatgacaaacttatacatctgcttctaacatatcgcatgtttatgttaagatttggtcccatcctttaaactgaaatatgtcatgtgaaattattttaaaaatgtaaaaacaaaactttctgctaacaaaatacatacagtatctgccagtatattctgtaaaaccttctatttgatgtcattccatttataatcagaaaaaaaacttatttcttaatcaaaaggcagtacaaaaaaagtaataatgttttataagattgtagagttaagtaaaagttaagcttttgcaaagttgtcaaaagttcaaacaaaagtctagttgggattttttaccaaagcagcataatatgtgttatataaacataataatactcagatatccaaatgttcagatagcatttttcataatgaatgttctcttttttttggtaatagtgtagaagtgatctggttcttacaatgggagatgaagaacatttattattgggttactactaaccctgtcccaagaatagtaatatcacctctagttataagccagcaacaggaacttttgtgaagacacattcatctctacagaacttcagattaaatataatctagattaatgactgagaataagatccacatttgaactcattcctaagtgaacatggacgtacccagttatacaaagtacttctgttggtcacagaaacatgaccagattttgcatatctccaggtagggaactaagtagactaccttatcaccggctaagaaaacttgctactaaactattaggccatcaatggcttgaataaaaaccagagaaggtttttcccaggacgtctcatgtttggccctttagaattggggtagaaatcagaaatgagatgaggggaagaagcaaggagtctaaggccctagcgatttgggcatctgccacattggttcatattcagaaagtgttatctcattgattatattcttgttaagcaaatctccttaagtaattattattcaaataagattatactcatacatctatatgtcactgttttaaagagatatttaatttttaatgtgtgttacatggtctgtaaatatttgtatttaaaaatgccatgcattaggctttggaaatttaatgttagttgaaatgtaaaatgggaaaactttagatcatttgtagtaataaatatttttaacttcattcatacagttaagtttatctgacaataaaagctctgactgaatggtgattatccttcctattatgtaataaggaataaacattttcttcttttagagtggaaaaaaaaaa

SEQ ID NO: 64398 - DNA, 758 bp, Homo sapiens
cggacctgtattgggaacaatgtttttgggaacgcgtgcatctctgtgctgagccctgggactgtgataacggagcactatggacccaccaacatccgcatccgatgccatttaggtctgaaaactccaaatggctgtgagctggtggtggggggagagccccagtgctgggcagaagggcgctgccttctctttgatgactctttcctgcatgctgcgttccatgaaggttcagcagaggatggcccacgggtggttttcatggtggatttgtggcatccaaacgtcgcagcggccgaacggcaggctcttgatttcatctttgctccgggacgatgagagtatttcccatgctggagtcggcgagaagggccgaggcggggcctgggcagactgtggtccggtccagtccctaccggtgttgtttccatgctcagaaacctgcctcagcggaaagctcttatttgggattttatatcatgtcgggtccctctttcccttggttattgtaaatggaaacttttcggcttgtatttccttagattttttttttttttccttccaatcatttgcttcagagactcctttctggcctaacagcgcattcctttgattggtccttgagtgaccagagacttagtgcccttgtaagtctgtcttctgttgctacttgtttttttcagtgctctgaaatagagtaacctaaatggttatttgtctgaatataataatgtaaaacttcttgtgggtcatcttaa

SEQ ID NO: 64399 - DNA, 2409 bp, Homo sapiens
tttggacaatgaaatccttttaattgaaaagtatatataaaatggctttagacataaaagataagtattttacattatttcttctgttatatttttacgctttgtgccagaatttacttcttgcaactattcttgctttatctggaacagtttactccgttattgaatatctattagtgtttaatatagaagagcttaataaaccgctaatccgaaaataatggtattcccttgcttttcagacctttttgctgaatatgcttatttatgtccaatgtggaaatctgatcctgttctcttccactctgccagcagttccttttgtactgcttctggtagttcatagaaaacttgaggatcaatgtcagaagggaaagtaattttctcatcaacagaatctggctctctattttctgtaagtccttcatgagagtctgttgctactgtttgcttatggctatctgtagtgtggtttctggagaaaagttgctcactctgcaagtttggaaatgaatgaaaagcagacacagcagggtttgaatttgtaaagtggaatccttgaggttctttaggtccttgacttattcgttcatcttttaatctattatctaaataatatgaataatccttttggctagacatgtaagaagaactactgctattaaagcctgatgttcccggttcacaaggagatacagaggatacctgtttgctactggataaatgatctctaggatttatgggaatatcttgcatttgttttttagaaaagaaagataatactcctctagaggcatgtaatggacaactcacacttcctttcccttgaaatttttccctagattttccagaaaggatttcttcttgaatatctactggaagctgcttgaagacttcttggtcaacaccttcaggaagtgaacagagtgggaattcattaatgtctttttctttagaaaaatttgtggtatctagtggagactccctagttcttgtactttcaattcttccacttggtaggaaatcccggtttgtttctttgtctttgggaaaatcttccatatgagtgtctttcattttaaaactgtgcttgccagagcgtgaagtagttgataatgatggcattaaataataatcaataagccctttcttagcagtatttagtgctttaaggttgcagaagcacacacttagaagggtaaggtgaaatggcatcttcacattcaccatatttcgaaaaagtttcataagtatatcaaccattggggtcatcacatcataatttcctgtccctaatttctgaattacatgtgaaggaatagggcactgacgactctcacgaccatagtgcttctcagaggaataccgacggattattaatctcactgtatgaggcttcctttcatcttggcataatctgtttaaaagactagcaagtagttcttcaatcttatttttagcttcaacttcagatgaacattttttaaatgaatcttcttcactaaaggactgaggtggtcctgagagtatcacaggggagttatcctctccaaaactgagcttttggatacgctgagcaactgaaattcctaattctttttctaaaattttgggtgaaaaggtttggagatcacgcacactattgatacccagtgcttcaagacatttggcagttttatagccaataccaggtatttcctttatgtgattcaaactatgaataagatgttgacaactttcaggtaataagactgtttgttgatttggtttaaagacaccagaaactaattttgccaacagtttattagaagccactccagcacagccagtgagccccaactgattatacatggcttcccgcatctctgctgcaatctgagatccaacaagtagtctgatgtgcaagacgtcaagcaggtttatagactgattattgtatacatgacccgacacagtcaccgcagaaagttcatcactttgcagctgctgtagtctcctctcaaccatgtctgttagatccacaaaattttcatcaaatccaagtctctcaacaactggactaaattcttccagtaattctgtaaccttataagacatttctctgtagcgggtcaggtcttctccattaactaataccaactgtggacacttttcttttgcatctctgacattcataagtttcttaactccaagtttcctagcttcatagttgcaggtaaccaccaaatatttctgttgaacccctaaaggtttgtcttttagctctggatttgagatcatttctacttgtgcataaaagcaatccagatccacatgtactatgactctggatgaagcatttggtgtgggcaacacttgatcatgaactccctgcgagctggctgccgcccccacgtccgccagttccat

SEQ ID NO: 64400 - DNA, 486 bp, Homo sapiens
ctatcacttaagagaccttatcaaaagcatgcttcatgatgatccagccagaagaattcctgctgaaatggcattgtgcagcccattctttagcattccttttgcccctcatattgaagatctggtcatgcttcccactccagtgctaagactgctgaatgtgctggatgatgattatcttgagaatgaagaggaatatgaagatgttgtagaagatgtaaaagaggagtgtcaaaaatatggaccagtggtatctctacttgttccaaaggaaaatcctggcagaggacaagtctttgttgagtatgcaaatgctggtgattccaaagctgcgcagaaattactgactggaaggatgtttgatgggaagtttgttgtggctacattctacccgctgagtgcctacaagaggggatatctgtatcaaaccttgctttaatcagtaacctaaggactgtttcctttttctcctcttccatttcttgg

SEQ ID NO: 64401 - DNA, 1590 bp, Homo sapiens
atgggtagcaacagtgggcaggctggccgccacatctataaatccctagctgatgatggcccctttgactctgtggagccgcctaaaagacccaccagcagactcatcatgcacagcatggccatgttcggaagagagttctgctacgcggtggaggcagcgtatgtgaccccagtcctgctcagcgtaggtctgcccagcagcctgtacagcattgtgtggttcctcagccccatcctgggattcctgctgcagcccgtggtcggatcggccagcgaccactgccggtccaggtggggccgccggagaccctacatcctcaccctgggagtcatgatgctcgtgggcatggctctgtacctcaatggggctactgttgtagcagctttgattgctaacccaaggaggaagctggtttgggccataagtgtcaccatgataggtgtcgttctctttgattttgctgccgacttcattgatgggcccatcaaagcctacttatttgatgtctgctcccatcaggacaaggagaagggcctccactaccatgccctcttcacaggttttggaggtgccctgggttaccttttgggtgctatagactgggcccatctggagctgggaagactgttgggtacagaattccaggtcatgttcttcttctctgcattggtgctcactttgtgttttactgttcatctgtgcagtatctctgaagccccacttacagaggttgcaaagggcattcccccacagcaaacccctcaggaccctccattgtcatcagatggaatgtacgagtatggttctatcgagaaagttaaaaatggttacgtaaatccagagctggcaatgcagggagcaaaaaacaaaaatcatgctgaacagactcgcagggcaatgacattaaagtcactgctgagagcactggtgaacatgcctcctcactaccgctacctttgcatcagccacctcattggatggacggccttcctgtccaacatgctgttcttcacagatttcatgggccagattgtgtaccgcggggatccctatagtgcacacaactccacagagtttctcatctacgaaagaggagtcgaggttggatgttggggcttctgcatcaactccgtgttttcctcactttattcttactttcagaaagttttggtatcctacattggattaaagggtctttacttcacgggatatttgctgtttggcctggggacgggatttattgggctcttcccgaatgtctactccaccctggtcctgtgcagcctgtttggtgtaatgtccagcaccctgtacactgtgccctttaacctcattactgagtaccaccgcgaggaagaaaaggagaggcagcaggccccaggaggggacccagacaacagcgtgagagggaagggcatggactgcgccaccctcacatgcatggtgcagctggctcagatcctggtcggaggtggcctgggctttctggtcaacacagccgggaccgttgtcgtcgtggtgatcacagcgtctgcggtggcactgataggctgttgctttgtcgctctctttgttagatatgtggat

SEQ ID NO: 64402 - DNA, 851 bp, Homo sapiens
gttacattggtcccagaacagattggaaaactgcacagtgaattggatatggtgaaaatgaatgtgcgagtgatgtccgccatattgatggagaatactcctgggtctgaaaaccatgaagacatagagcttctgcagaaactctataaaacaggtcgggagatgcaggagaggatcatggacctgcttgtggtggtggagaacgaagatgtaactgttgagctaattcaggtgaatgaggatttgaataatgctatccttggatatgagaggtttactagaaaccaacaaaggattttggagcaaaataagaaccagaaggaagccaccaatactaccagtgagccttctgccccatctcaagatctcctcgacctaagtcccagtccccggatgcctagggccactctgggagaactcaacaccatgaataatcaactttcaggcttaagtaaataaacactcaggtcttttcagaccagcagaagagcttgatgttaaacagttctccttaattacgtgattaaataccacctaagaaggactgaagtcaggttgaatgtcagagcgctatgttaggagatgtgattacttcccggcaaatggttgagtcaaacccagtatagcaatgggatgtgtctgggcgaggaggtccttgaaactcatcctactcacttagaatctcatggaattcacctggcctgctttgtagaagttgttcagcccaatggccaatacttaaagtctactgtgaacctacacactattatcattgggtttttctgctatacctcagcatcaggtaagggagtatctctgatgcaagcggagaaattcagggattacaaggg

SEQ ID NO: 64403 - DNA, 1236 bp, Homo sapiens
  misc_feature (1)...(1236): n = a,t,c or g
ctccggtagcactcgggccggcggacagtgagggcgcgacaacaagggaggtgtcacagttttccatttagatcaacaacttcaagttcttaccatggaaaattccgagaagactgaagtggttctccttgcttgtggttcattcaatcccatcaccaacatgcacctcaggttgtttgagctggccaaggactacatgaatggaacaggaaggtacacagttgtcaaaggcatcatctctcctgttggtgatgcctacaagaagaaaggactcattcctgcctatcaccgggtcatcatggcagaacttgctaccaagaattctaaatgggtggaagttgatacatgggaaagtcttcagaaggagtggaaagagactctgaaggtgctaagacaccatcaagagaaattggaggctagtgactgtgatcaccagcagaactcacctactctagaaaggcctggaaggaagaggaagtggactgaaacacaagattctagtcaaaagaaatccctagagccaaaaacaaaagctgtgccaaaggtcaagctgctgtgtggggcagatttattggagtcctttgctgttcccaatttgtggaagagtgaagacatcacccaaatcgtggccaactatgggctcatatgtgttactcgggctggaaatgatgctcagaagtttatctatgaatcggatgtgctgtggaaacaccggagcaacattcacgtggtgaatgaatggatcgctaatgacatctcatccacaaaaatccggagagccctcagaaggggccagagcattcgctacttggtaccagatcttgtccaagaatacattgaaaagcataatttgtacagctctgagagtgaagacaggaatgctggggtcatcctggcccctttgcagagaaacactgcagaagctaagacataggaattctacagcatgatatttcagacttcccatttggggatctgaaacaatctgggagttaataactggggaaagaagttgtgatctgttgcctaaactaaagcttaaaagtttagtaaaaatcgtctgggcacagtggctcacgcctgtagtcccagcactttgggaggctgaggcgggtggatcgcggggtcaggagatcgagaccatcctggccaatatggtgaagccccatctctactgaaaatacanaaattggctgtgtgtggggcacgtgcctgtggtcccagctgcttggnggg

SEQ ID NO: 64404 - DNA, 2902 bp, Homo sapiens
gatggcggcggcagcagtcgacagcgcgatggaggtggtgccggcgctggcggaggaggccgcgccggaggtagcgggcctcagctgcctcgtcaacctgccgggtgaggtgctggagtacatcctgtgctgcggctcgctgacggccgccgacatcggccgtgtctccagcacctgccggcggctgcgcgagctgtgccagagcagcgggaaggtgtggaaggagcagttccgggtgaggtggccttcccttatgaaacactacagccccaccgactacgtcaattggttggaagagtataaagttcggcaaaaagctgggttagaagcgcggaagattgtagcctcgttctcaaagaggttcttttcagagcacgttccttgtaatggcttcagtgacattgagaaccttgaaggaccagagattttttttgaggatgaactggtgtgtatcctaaatatggaaggaagaaaagctttgacctggaaatactacgcaaaaaaaattctttactacctgcggcaacagaagatcttaaataatcttaaggcctttcttcagcagccagatgactatgagtcgtatcttgaaggtgctgtatatattgaccagtactgcaatcctctctccgacatcagcctcaaagacatccaggcccaaattgacagcatcgtggagcttgtttgcaaaacccttcggggcataaacagtcgccaccccagcttggccttcaaggcaggtgaatcatccatgataatggaaatagaactccagagccaggtgctggatgccatgaactatgtcctttacgaccaactgaagttcaaggggaatcgaatggattactataatgccctcaacttatatatgcatcaggttttgattcgcagaacaggaatcccaatcagcatgtctctgctctatttgacaattgctcggcagttgggagtcccactggagcctgtcaacttcccaagtcacttcttattaaggtggtgccaaggcgcagaaggggcgaccctggacatctttgactacatctacatagatgcttttgggaaaggcaagcagctgacagtgaaagaatgcgagtacttgatcggccagcacgtgactgcagcactgtatggggtggtcaatgtcaagaaggtgttacagagaatggtgggaaacctgttaagcctggggaagcgggaaggcatcgaccagtcataccagctcctgagagactcgctggatctctatctggcaatgtacccggaccaggtgcagcttctcctcctccaagccaggctttacttccacctgggaatctggccagagaagtctttctgtcttgttttgaaggtgcttgacatcctccagcacatccaaaccctagacccggggcagcacggggcggtgggctacctggtgcagcacactctagagcacattgagcgcaaaaaggaggaggtgggcgtagaggtgaagctgcgctccgatgagaagcacagagatgtctgctactccatcgggctcattatgaagcataagaggtatggctataactgtgtgatctacggctgggaccccacctgcatgatgggacacgagtggatccggaacatgaacgtccacagcctgccgcacggccaccaccagcctttctataacgtgctggtggaggacggctcctgtcgatacgcagcccaagaaaacttggaatataacgtggagcctcaagaaatctcacaccctgacgtgggacgctatttctcagagtttactggcactcactacatcccaaacgcagagctggagatccggtatccagaagatctggagtttgtctatgaaacggtgcagaatatttacagtgcaaagaaagagaacatagatgagtaaagtctagagaggacattgcacctttgctgctgctgctatcttccaagagaacgggactccggaagaagacgtctccacggagccctcgggacctgctgcaccaggaaagccactccaccagtagtgctggttgcctcctactaagtttaaataccgtgtgctcttccccagctgcaaagacaatgttgctctccgcctacactagtgaattaatctgaaaggcactgtgtcagtggcatggcttgtatgcttgtcctgtggtgacagtttgtgacattctgtcttcatgaggtctcacagtcgacgctcctgtaatcattctttgtattcactccattcccctgtctgtctgcatttgtctcagaacatttccttggctggacagatggggttatgcatttgcaataatttccttctgatttctctgtggaacgtgttcggtcccgagtgaggactgtgtgtctttttaccctgaagttagttgcatattcagaggtaaagttgtgtgctatcttggcagcatcttagagatggagacattaacaagctaatggtaattagaatcatttgaatttatttttttctaatatgtgaaacacagatttcaagtgttttatcttttttttttaaatttaaatgggaatataacacagttttcccttccatattcctctcttgagtttatgcacatctctataaatcattagttttctattttattacataaaattcttttagaaaatgcaaatagtgaactttgtgaatggatttttccatactcatctacaattcctccattttaaatgactacttttattttttaatttaaaaaatctacttcagtatcatgagtaggtcttacatcagtgatgggttctttttgtagtgagacatacaaatctgatgttaatgtttgctcttagaagtcatactccatggtcttcaaagaccaaaaaatgaggttttgcttttgtaatcaggaaaaaaaaaaattaatgaaccttaaaaaaaaaa

SEQ ID NO: 64405 - DNA, 1113 bp, Homo sapiens
agttgcggggatttttataacaccatatatggatatatatggctatatttttgcttatcgttcattgcctcagcgataaagggaaataaaaatattgatctataaaataagccgatgataacacaatgccaaaaaatagcttatggttaaagtgccaagggggtgaaggcttgaaagcaagctaaattgcaacaacatattgatttaacatttaaatacaaggacttggcaataaaataattcttggaaatatggcttctcatttttaggtttacttttggaaaaactactctatatacacatatccaggttgtaacacttggacagtagcattatggggcatgatataactttggtacacattgcagatatggatgtttaatgtctgtaaatgatattccttcaccagttagacttctgtacatccaggtgaccagccacctggttctaagtcatatcccaccagaatccctggagtccttgccagagccatcagagacagcaggcgaaagcaggctcactgaatccatattgtgtttcctctctcggttctcctgggttccactgtcagttctccaaacgtggaaaaaaactgctccatttctttctgtagcatgtcatttcttttctcggcatcttcttttgctcgctcggcatttcgcatttttatttctatcattgtgaactttttcctctcctgatccagttcatcatggaggctcatcatttctgtttccaaagtcaagtttcgctgttctaagctctttatcctggactcatactctatcttctgtttggtcatttcctgtttcaggctggaaactaaactgtgcagtgcactgtggttgctgctgctgttgcccacaaatgtctcactgttgtcactgctactggtggcacgactacttcgacctcccacactcctgtggtcacttttgctttcatagtccctggggtggggaaaggtcgtcctgcgggggcccatccaaaacagggtcctcaaagttccccccaaaaaagtcttgctctgggcaggtggtggtagaagagcgacaggagttggagttctcagggagggagatttcacaggaggaagtggaccaggtagcactg

SEQ ID NO: 64406 - DNA, 1919 bp, Homo sapiens
cgaaagccggggataagagcggcagcagcgggaagaaaagtctaaaacggaaagccgctgccgaagaacttcaggaggctgcaggcgctggggatggggcgacggaaaacggggtccaacccccgaaagcggctgcctttccgccaggctttagcatttcggagattaaaaacaaacagcggcgacacttaatgttcacgcggtggaaacagcagcagcggaaggaaaagttggcagctaagaaaaaacttaaaaaagaaagagaggctcttggcgataaggctccaccaaagcctgtacccaagaccattgacaaccagcgagtgtatgatgaaaccacagtagaccctaatgatgaagaggtcgcttatgatgaagctacagatgaatttgcttcttacttcaacaaacagacttctcccaagattctcatcacaacatcagatagacctcatgggagaacagtacgactctgtgaacagctctccacagttataccaaactcacatgtttattacagaagaggactggctctgaaaaaaattattccacagtgcatcgcaagagatttcacagacctgattgttattaatgaagatcgtaaaaccccaaatggacttattttgagtcacttgccaaatggcccaactgctcattttaaaatgagcagtgttcgtcttcgtaaagaaattaagagaagaggcaaggaccccacagaacacatacctgaaataattctgaataattttacaacacggctgggtcattcaattggacgtatgtttgcatctctctttcctcataatcctcaatttatcggaaggcaggttgccacattccacaatcaacgggattacatattcttcagatttcacagatacatattcaggagtgaaaagaaagtgggaattcaggaacttggaccacgttttaccttaaaattaaggtctcttcagaaaggaacctttgattctaaatatggagagtatgaatgggtccataagccccgggaaatggatacaagtagaagaaaattccatttataaagtactgagagaatgatattggattttgctgaacaggcctatcttgaactttggtaaattatttttgacagaatactcttttcaaaatggcatttgctgatttcataaacctttcacgtctggacgaattaccaaatgccatgaattgccactgtgtgtttatgtagaaaatacaaataaaagttattttgatggcttaggtttccttaaacttagttctcttgtttttgggtaactgtgaataattaagttggaatcaagattcagattaactttcctatttgcatagaacacatgagaggaataaaatggttggtaaatattggctaacccttgatttttataccagattaaccttggattcccagtgtctggcacagttttaatagcttaaatggaggccaggtttctggatgttttaacattctcttaagccttcagaagggtaaaaaatttaaagcaaaatgatctaccagggtttaaagcaaagttgcaaattactgaagctaatctttgcttcctgattttgaggtttttggttttttgtgcccacgttgtggggagctcttttttacctcattacatggtgctgtagtactcccattcaggcactgaaaacaaagttaaccctataagtaactcatggatggaaacccgtagaacttaacagcctcctcctgaccttaaaagaataaaggttcacagtttacctttaattccctagcagtcttgccagatgtatggcataaagtcatgtgagaagagtaggtggaaaaaactgtacaaacttaaccccttcaggtgttcagaacagattaatataccatgtatttaataccaataataatgcaaaataaaacgtttcatactaag

SEQ ID NO: 64407 - DNA, 2685 bp, Homo sapiens
gcggccgcggcggcggctggggcgttcgcgggccggcgcgcggcgtgcggggccgtgctgctgacggagctgctggagcgcgccgctttctacggcatcacgtccaacctggtgctattcctgaacggggcgccgttctgctgggagggcgcgcaggccagcgaggcgctgctgctcttcatgggcctcacctacctgggctcgccgttcggaggctggctggccgacgcgcggctgggccgggcgcgcgccatcctgctgagcctggcgctctacctgctgggcatgctggccttcccgctgctggccgcgcccgccacgcgagccgcgctctgcggttccgcgcgcctgctcaactgcacggcgcctggtcccgacgccgtcgcccgctgctgctcaccggccaccttcgcggggctggtgctggtgggcctgggcgtggccaccgtcaaggccaacatcacgcccttcggcgccgaccaggttaaagatcgaggtccggaagccactaggagattttttaattggttttattggagcattaacctgggagcgatcctgtcgttaggtggcattgcctatattcagcagaacgtcagctttgtcactggttatgcgatccccactgtctgcgtcggccttgcttttgtggtcttcctctgtggccagagcgttttcatcaccaagcctcctgatggcagtgccttcaccgacatgttcaagatactgacgtattcctgctgttcccagaagcgaagtggagagcgccagagtaatggtgaaggcattggagtctttcagcaatcttctaaacaaagtctgtttgattcatgtaagatgtctcatggtgggccatttacagaagagaaagtggaagatgtgaaagctctggtcaagattgtccctgttttcttggctttgataccttactggacagtgtatttccaaatgcagacaacatatgttttacagagtcttcatttgaggattccagaaatttcaaatattacaaccactcctcacacgctccctgcagcctggctgaccatgtttgatgctgtgctcatcctcctgctcatccctctgaaggacaaactggtcgatcccattttgagaagacatggcctgctcccatcctccctgaagaggatcgccgtgggcatgttctttgtcatgtgctcggcctttgctgcaggaattttggagagtaaaaggctgaaccttgttaaagagaaaaccattaatcagaccatcggcaacgtcgtctaccatgctgccgatctgtcgctgtggtggcaggtgccgcagtacttgctgattgggatcagcgagatctttgcaagtatcgcaggcctggaatttgcatactcagctgcccccaagtccatgcagagtgccataatgggcttgttctttttcttctctggcgtcgggtcgttcgtgggttctggactgctggcactggtgtctatcaaagccatcggatggatgagcagtcacacagactttggtaatattaacggctgctatttgaactattacttttttcttctggctgctattcaaggagctaccctcctgcttttcctcattatttctgtgaaatatgaccatcatcgagaccatcagcgatcaagagccaatggcgtgcccaccagcaggagggcctgaccttcctgaggccatgtgcggtttctgaggctgacatgtcagtaactgactggggtgcactgagaacaggcaagactttaaattcccataaaatgtctgacttcactgaaacttgcatgttgcctggattgatttcttctttccctctatccaaaggagcttggtaagtgccttactgcagcgtgtctcctggcacgctgggccctccgggaggagagctgcagatttcgagtatgtcgcttgtcattcaaggtctctgtgaatcctctagctgggttcccttttttacagaaactcacaaatggagattgcaaagtcttggggaactccacgtgttagttggcatcccagtttcttaaacaaatagtatcacctgcttcccatagccatatctcactgtaaaaaaaaaaattaataaactgttacttatatttaagaaagggaggattttttttttttaaagataaaagcatggtcagatgctgcaaggattttacataaaggccatatttatggtttccttcctgaaaacagtcttgctcttgccatgttctttgatttaggctggtagtaaacacatttcatctgctgcttcaaaaagtacttactttttaaaccatcaacattacttttctttcttaaggcaaggcatgcataagagtcatttgagaccatgtgtcccatctcaagccacagagcaactcacggggtacttcacaccttacctagtcagagtgcttatatatagctttattttggtacgattgagactaaagactgatcatggttgtatgtaaggaaaacattcttttgaacagaaatagtgtaattaaaaataattgaaagtgttaaatgtgaacttgagctgtttgaccagtcacatttttgtattgttactgtacgtgtatctggggcttctccgtttgttaatactttttctgtatttgttgctgtatttttggcataactttattataaaaagcatctcaaatgcgaaatccatgaaaaaaaaaa

SEQ ID NO: 64408 - DNA, 4955 bp, Homo sapiens
ctctctctctttcgggcggagtcgcccaccactgccagcccagcgctggggggacctgctccaggctgtagccgcaggaccccaccaccccccatggctcccctggccttggtgggggtcacactcctcctggcggctcccccatgctccggggcagccaccccaaccccctccctgccgcctcccccggccaatgacagcgacaccagcacagggggctgccaggggtcctaccgctgccagccgggggtgctgctgcccgtgtgggagcccgacgacccgtcgctgggtgacaaggcggcacgggcagtggtgtactttgtggccatggtctacatgtttctgggagtgtccatcatcgccgaccgtttcatggcggccatcgaggtcatcacgtcaaaagagaaggagatcaccatcaccaaggccaacggtgagaccagcgtgggcaccgttcgcatctggaatgagacggtgtccaacctcacgctcatggccctgggctcctccgcacctgagatcctgctgtcagtcatcgaagtctgcggccacaacttccaggcgggtgagctgggcccaggcaccatcgtgggcagcgctgccttcaacatgtttgtggtcatcgccgtgtgcatctacgtcatcccagccggcgagagccgcaagatcaagcacctgagagtcttctttgtcactgcctcttggagcatcttcgcctatgtctggctttatctcatccttgctgttttttcccccggtgtggtccaggtgtgggaggcgctgctgaccctggtcttcttcccggtgtgcgtggtattcgcctggatggccgacaagcggctgctcttctacaagtacgtgtacaagcgctaccgcaccgacccacgcagcggcatcatcataggcgccgagggcgaccccccgaagagcatcgagctggacggcacgttcgtgggcgccgaggccccaggtgagctgggcggcctgggcccgggccccgccgaggcgcgcgagctggacgccagccgccgcgaggtcatccagatcctcaaggacctcaagcagaagcacccggacaaggatctggagcagctggtgggcatcgccaactactacgcgctgctgcaccagcagaagagccgcgccttctaccgcatccaggccacgcggctgatgaccggcgccgggaacgtgctgcgcagacacgcggcggacgcctcgcgcagggcggcgccggccgagggcgcgggcgaggacgaagacgacggcgccagccgcatcttcttcgagcctagcctctaccactgcctggagaactgcggctccgtgctgctgtccgtcacgtgccagggcggcgagggcaacagcaccttctacgtggactaccgcactgaggacggctctgccaaggcgggctccgactacgagtacagcgagggcacgctggtgttcaaaccaggcgagacgcagaaggagctgcgcatcggcatcatcgacgacgacatcttcgaggaggacgagcatttcttcgtgcggctgctgaacctgcgcgtgggcgacgcgcagggcatgttcgagccggacggcggcgggcggcccaaggggcggctggtggcgccgctgctggccaccgtcaccatcctggacgacgaccacgcaggcatcttctccttccaggaccgcctgctgcacgtgagcgagtgcatgggcaccgtggacgtgcgcgtcgtgcgcagctcgggcgcgcgcggcaccgtgcgccttccctaccgcacggtggacggcacggcgcgcggcggcggcgtgcactacgaggacgcgtgcggagagctggagtttggcgacgacgagaccatgaaaactcttcaggtgaagatagttgatgacgaggaatatgagaaaaaggataatttcttcattgagctgggccagccccagtggcttaagcgagggatttcagctctgctactcaatcaaggggatggggacaggaagctaacagccgaggaggaggaggctcggaggatagcagagatgggcaagccagttcttggggagaactgccggctggaggtcatcatcgaggagtcatatgattttaagaacacggtggataaactcatcaagaaaacgaacttggccttggtaattgggacccattcatggagggagcagtttttagaggcaattacggtgagcgcaggggacgaggaggaggaggaggacgggtcccgggaggagcggctgccgtcgtgctttgactacgtgatgcacttcctgacggtgttctggaaggtgctcttcgcctgtgtgccccccaccgagtactgccacggctgggcctgctttggtgtctccatcctggtcatcggcctgctcaccgccctcattggggacctcgcctcccacttcggctgcaccgttggcctcaaggactctgtcaatgctgttgtcttcgttgccctgggcacctccatccctgacacgttcgccagcaaggtggcggcgctgcaggaccagtgcgccgacgcgtccatcggcaacgtgaccggctccaacgcggtgaacgtgttccttggcctgggcgtcgcctggtctgtggccgccgtgtactgggcggtgcagggccgccccttcgaggtgcgcactggcacgctggccttctccgtcacgctcttcaccgtcttcgccttcgtgggcattgccgtgctgctgtaccggcgccggccgcacatcggcggcgagctgggcggcccgcgcggacccaagctcgccaccaccgcgctcttcctgggcctctggctcctgtacatcctcttcgccagcctggaggcgtactgccacatccggggcttctagggcctcgcgcagagactcgtccccaccgcccgcccggggctagggactcggctgcacctgctcttggaccctggtctccttttccccccagactcggcctcctctcctgggactcggcctcccttctccgccccctcccctggctttgattgcccctgttctgtgtccccagtagctcagccttccctcttcctctcgggagcctccccggttcctcccctgcggtgaccccaactccagcccatcctgttggtgaccgtctatatccctggggaaatttccaccccagtcccctccccagggaaccacccccagtaaccatcctggggagtttaaggtctctctccttggtcacccagcctggctttgcccccaaagtctcccttcccctagtgacccccccccacttcaccccatgtcccagagcctcagaacccaccctccctgggggaccctcgaaggaggctgtcagaggccgtcttcagcttaccagcccttccccccagccctcagggagctccgctcaggccccggcgggagggagcgggtgggtgtgcgcgcaaggaggccgcacacctttccttccaatccctccactcgggttcttgggaggacactcattctccaggctcggagacgaggggagaagtttggggtttcagtcccagggcttagccggaggaagcacattttgaacctgcaacttcagacattccagctcccccactcgccctccactacctctgagagcccagccacgccttggagggaggggcttgggtgtgtatatagtgtgtttgggggaggggggacccgggagggtgcatgtcttgggaaaagggggggacagacaacttttgagagggcagcagactccctcagccatgagaaccagctttggggaggaggccgggaatcaaagcgagtccagttgatctcccctgacaatctggaaggttcattttgccctcagtgccagccaatccgggcaggaccctcgaagaggagaccgagggtcccagaggaccaatgctacaagccagcaaatgctgccacatctctgccctgatggggggtgggaaatgggtggggggatgggactgggcccaagggatctgggtgggcatttttaactttggaggccttccatctgtcggtaggccatctgcattttcttactgttgatgtttcctgcccaaaggacacatttgggcagtgccacccactccttgggcccctaggatgacccaactacccccataactttctgcttcccacaggttttcagcattctatcgtcctgttgtgctcagccccaacatcccagacccgttacccactacccttctctcccccagctcatcatcagtcgctgtctcttttctgtgatttctgtaaaagttgccataaaactttgaaattctgcctgaaaaacagtcccgtgggaagctgggattcaggaggagggggctaataaggtctctgactgagatttgggcaactgttaaaccaagtaatctgggtttttgcggcccgcggtcgtctgcgggacacacccacatatagcagcagcgccggggtccagccgccaagctcttccactcgccacgcccccatcagtaatgagctttcactagccacgcccccatccgtcagcctagctcttccactagccacacccccatccatcagtcatgggcttccacaagccacgcacctccactctccatgcccccattggtcagtcgtgggtttccactaaccacgcccccattcatcagccaagctcctccacttgctacgcccgcatccgtcaattacgggtttccactaaccacgcccccattcatcagcctagctcttccactaatcacacccccacttatcagtcgtgcttcagccacgccttcctgcttcagtcaggggcttccactagccacgcccccatgcatgagccacaaactgtttctctttatgggcatcctgggaacacaaaagagagacgttcatttgcctgagccaaagagctggggttgatggggtttcctaaataaagcaagtaattttctcagatcctagaaaaaaagcaaaaaaag

SEQ ID NO: 64409 - DNA, 900 bp, Homo sapiens
atggcttctgctgcctgctccatggaccccatcgacagctttgagctcctggatctcctgtttgaccggcaggacggcatcctgagacacgtggagctgggcgagggctggggtcacgtcaaggaccaggtcctgccaaaccccgactctgacgacttcctcagctccatcctgggctctggagactcactgcccagctccccactctggtcccccgaaggcagtgatagtggcatctccgaagacctcccctccgacccccaggacacccctccacgcagcggaccagccacctcccccgccggctgccatcctgcccagcctggcaaggggccctgcctctcctatcatcctggcaactcttgctccaccacaaccccagggccagtgatccaacaacagcatcacctgggggcctcctacctcctgcgacctggggctgggcactgtcaggagctggtgctcaccgaggatgagaagaagctgctggctaaagaaggcatcaccctgcccactcagctgcccctcactaagtacgaggagcgagtgctgaaaaaaatccgccggaaaatccggaacaagcagtcggcgcaagaaagcaggaagaagaagaaggaatatatcgatggcctggagactcggtcctgttgctgtcctttgccctcatcatcctcccctccatcagcccttttggccccaacaaaaccgagagccctggggactttgcgcctgtacgagtgttctccagaactttgcacaacgatgctgcctcccgcgtggctgctgatgctgtgccaggctccgaggccccaggaccccgacccgaggctgacacaacccgagaagagtctccaggaagccccggggcagactggggcttccaggacaccgcgaacctga

SEQ ID NO: 64410 - DNA, 683 bp, Homo sapiens
tttcgtcagagctgcgcgtgctgctttgcccgagcccgagcccgagcccgagcccgagcccgagcccgagcccgagcccgagcccgaacgcaagcctgggagcgcggagcccggctagggactcctcctatttatggagcaggcacccaacatggctgagccccggggccccgtagaccatggagtccagattcgcttcatcacagagccagtgagtggtgcagagatgggcactctacgtcgaggtggacgacgcccagctaaggatgcaagagccagtacctacggggttgctgtgcgtgtgcagggaatcgctgggcagccctttgtggtgctcaacagtggggagaaaggcggtgactcctttggggtccaaatcaagggggccaatgaccaaggggcctcaggagctctgagctcagatttggaactccctgagaacccctactctcaggtcaagggatttcctgccccctcgcagagcagcacatctgatgaggagcctggggcctactggaatggaaagctactccgttcccactcccaggcctcactggcaggccctggcccagtggatcctagtaacagaagcaacagcatgctggagctagccccgaaagtggcttccccaggtagcaccattgacactgctcccctgtcttcagtggactcactcatcaaca

SEQ ID NO: 64411 - DNA, 4235 bp, Homo sapiens
tttgaacactgcaaaaggcttttattttataggcaccactgcaaaatgaggaatcacatcaaaacatatcaaatagaaaataataatttattttaacttcattttactgtttgtaactaatcatgattttgtgaacttgcctgtataagtctgtaccttcaaatctacaaagcaaaagtttactacaatgagcacttaaaattccacaaaccgtctccatccacaactttcctgtacatgcaaattctttcagtgggctgcaatatttgcaaacatgctttaaacttccataaagatgcaagatattttgctttctgctaaaacctttacactctcttgggaaccttaaccaggaaaatgtttaaatgtatatcccaactctaaacgctgccggtttggttatatgtattaaatcgttaaccaccgggttgggtggttttgagttgaaaccttcacctaaatgataatatcttaacggtcacgcatatgaaacacattcagtaacgtaccattataaaatagggttccattaaaaatacatactggcagttgtatttgtgttttaggcaggaaaaaaagcgtgtttaacttttttatatgaatatagtttaaacaagttattctgtgaaagtatgcttaataaaagatctttctgaaatttaaacactttatgtaaaagggtacaggtagaaaagtacaattgctatttgaaaaaagctctgtttgttaatattgccttccaagatagtaagggtgtttttctctctcttcccttaaaatagacctatgacacccagagttgtagggtttgcaaatttggactataaacatgaagaccgtacttatcttatatacaaaaacttgccgcattgaacgaggcaggaatttctaccccagtggtagtggtctcctttatgtacataatgcagaagtgaaaattatacagtagtcaccgataggaaggaattgtatactctagtgccgtccggggattttgtgccgtgggttaagagttcttggatcgtcatccagttatcgaagattttcttattcctcttcttcatcatctttttgtggctcagttcgagaatgttcatctccttcctgtcatcggctgcttgctgctccttgagacaatccaacctgctctgcatcatgaactcgcgccgccgccgctgctccttggccttcaccaggtgctgcttcctctcctccttgctccagtagcgccccatcttcatctcgctcaccgcgtcgtcgtcggtggtcatgccgctgcgctcttcccggatcttcagggcgcgctcccgcagcaggcggtcccgcacgggcctcttggtgatgtagcgcgtcccgtcgctgcggatcttcaccttccactccatgcgcggctccgacggggtgggagagctcaggtccttgcacatgctcaccaggctcatctggctttgcgcgtactccacggccgacttctgctggatcagctgcatgtagctctggtagtgctgggcgtgcgccgggatgtgcgcgtgcttgtatggggagtggtgataggagggcaggtaggcgctgcccagcttctggctgggcgtggggctccggctcccgtcgctggctctccgctctttgctttccaggggctggttggggtccagctccttcagggacgggctataggtaggggtgcccacttcgggatcttccgtgatggagagcagattcttggaggctggcccgtaggcttccgtggtccccacagccccttcgctgctcgggcagctgatgccctccgccgctctcctcaaggagttgtcgggggagatctccagggtgagcggggtgctgcggcagctctcgcctgtgttgtaggcgctcgagctgtccttgtcggatttctccgggagctcggtgatatctgagagctcgtgtctgcgcacgtcgatgctggtgttgtagttgcggaagccgctgttgtgcagcatccaggactcgcggtactgctccttgagctgctgcatcttgtgggcgcgcacgatgctcaggcactccagctcgatgctgcgcagctcttcgttcagcagctccagctccttgtccacgctctcagggtcactcttgccggcgtccagggggccgctagggtagtacaggccgtaaggggtggcgctcttcacctggcacttgagctccaggagctcgcggaagcgctcgcactcgtccaccgggatccccaggtaggcggcgcccgtgcactcgggcgaaatgaacgacttgttgctgaagggcaggtcgccgctgcccaaggtgtcctggctgcaggtgagcttcctctgccccgccagcgggttggaggatgcggtggcgtcgtcgccattgttctcttgctccgagctctcgtcattacgggtgctctcgtcggtccgccccacaccgctgtccttctcgtgctggttggacaagatggtggctgtatctgtggtcccaccgtcttcgtcgtgcttcttctgctgcagcacgctagctgtgaattgcatggcctggtggtgctgctcctccagcatgtccatgtgcaggtcatccagaaagtcgttcctgtcatcatccatccagccctcatccagctggagttcagcccttgcaatcagcaatgaaaagtttttattttcttcactggttagaagagccacagcctcttcacggttctgcacctctatcccattaatctggataatgcggtctccttctcggatgcgcccatccttggctgcaatgctgttagggtcaatctcactgatataaatcccaatgtcgtcttcatcgtccgtccggtagcacacagtgaggcccagcttgtcctggctgttcattctgtagaggtccacttcctccagctccagctcctccctgtccatctcctgatggatgtctccaatgtagtcatttggatcgtagtattcatgggctgagggatgctcctctggcaagagatagggatccagcacgggtgggctgggagaggacatcttagtgagggccatgatatgttcaaaggtgatgtcggtttgggttcccgtgtccaccagctgagactctgatggaggcgtgaacattttggtccttggtgttcttctcaacacctgcaccactatgggctccttggctgtcttgaaagcttccacagcctggtcatgagttgctctggataagtctctgccgttgacctcaataatcctgtcatgaatttgcaggcctccttccttggctgcaggcccactgtcaactatcttggatacaaagattccttcactggatgatccatcgtggttatccacactcggccggccaccaataatattgaatcccagggagccggagtcccgatgcaggacaagagtcagacttttggtttcttcgcccttgccgccgggcggcgcggccacgcagcggctgagcgagtcgaggcgcgcgctgtattcggtgaatttcttctggtagcgcagcgcggtcatctgcagctcaagctgcgccgcggccagctgggccaccagcgacttctcgcgcttcccagcgcgcagcgcctccttcttgagcgccttgtgcagcgcgcccaggcgggcctggagcgcgccgttgtgcgcccgcagcgctcgcgcgcagcagtggccgcccgcgcgctgctcgccgtgcgtcaagggtagcccgcagccctcctggcagcggcccactggccgcgcgtcgcacgcgtcgcgcatgtgcgcctccacgtcgcgccgcagcagcacctggccgcaacccgcgtggcgacagcgcgcgggcgcgaagtcgcagcgctcgaggtgctccggcagctgctgcagcttgaccacccggccgcagccgcgcgtcgcgtacgcgcacttgatgtccagcttgaggataaggcgcttgagcggcaggacgtggttgagctctttggccgacaggcgaccgcggcagcgcgccgggcagctgccctcctgcaccacccagggcagcacgcagccggcgcagaagacgtggccgcacggcgtggtcagcgggtcctccaggaccttgtggcacagcgcgcacttcaggtccgggtccacgtcgccgtcgaagcggtccagctcgaagcccatggtggcggccaggccccggggtcgccgccgggcggccgggcgccccctccctccccacgaggcggcccagacaggccggctacgccgcccgcgcgc

SEQ ID NO: 64412 - DNA, 4226 bp, Homo sapiens
gccataacggagacctatacttctccaacgtgatgctgcaggacatgcagaccgactacagttgtaacgcccgcttccacttcacccacaccatccagcagaagaaccctttcaccctcaaggtcctcaccacccgaggagttgcagaaagaacaccaagcttcatgtatccccagggcaccgcgagcagccagatggtgcttcgtggcatggacctcctgctggaatgcatcgcctccggggtcccaacaccagacatcgcatggtacaagaaaggtggggacctcccatctgataaggccaagtttgagaactttaataaggccctgcgtatcacaaatgtctctgaggaagactccggggagtatttctgcctggcctccaacaagatgggcagcatccggcacacgatctcggtgagagtaaaggctgctccctactggctggacgaacccaagaaccttattctggctcctggcgaggatgggagactggtgtgtcgagccaatggaaaccccaaacccactgtccagtggatggtgaatggggaacctttgcaatcggcaccacctaacccaaaccgtgaggtggccggagacaccatcatcttccgggacacccagatcagcagcagggctgtgtaccagtgcaacacctccaacgagcatggctacctgctggccaacgcctttgtcagtgtgctggatgtgccgcctcggatgctgtcgccccggaaccagctcattcgagtgattctttacaaccggacgcggctggactgccctttctttgggtctcccatccccacactgcgatggtttaagaatgggcaaggaagcaacctggatggtggcaactaccatgtttatgagaacggcagtctggaaattaagatgatccgcaaagaggaccagggcatctacacctgtgtcgccaccaacatcctgggcaaagctgaaaaccaagtccgcctggaggtcaaagaccccaccaggatctaccggatgcccgaggaccaggtggccagaaggggcaccacggtgcagctggagtgtcgggtgaagcacgacccctccctgaaactcaccgtctcctggctgaaggatgacgagccgctctatattggaaacaggatgaagaaggaagacgatttcgtgaccatctttggggtggcagagcgggaccagggcagttacacgtgtgtcgccagcaccgagctagaccaagacctggccaaggcctacctcaccgtgctaggacggccagaccggccccgggacctggagctgaccgacctggccgagaggagcgtgcggctgacctggatccccggggatgctaacaacagccccatcacagactacgtcgtccagtttgaagaagaccagttccaacctggggtctggcatgaccattccaagtaccccggcagcgttaactcagccgtcctccggctgtccccgtatgtcaactaccagttccgtgtcattgccatcaacgaggttgggagcagccaccccagcctcccatccgagcgctaccgaaccagtggagcaccccccgagtccaatcctggtgacgtgaagggagaggggaccagaaagaacaacatggagatcacgtggacgcccatgaatgccacctcggcctttggccccaacctgcgctacattgtcaagtggaggcggagagagactcgagaggcctggaacaacgtcacagtgtggggctctcgctacgtggtggggcagaccccagtctacgtgccctatgagatccgagtccaggctgaaaatgacttcgggaagggccctgagccagagtccgtcatcggttactccggagaagattatcccagggctgcgcccactgaagttaaagtccgagtcatgaacagcacagccatcagccttcagtggaaccgcgtctactccgacacggtccagggccagctcagagagtaccgagcctactactggagggagagcagcttgctgaagaacctgtgggtgtctcagaagagacagcaagccagcttccctggtgaccgcctccgtggcgtggtgtcccgcctcttcccctacagtaactacaagctggagatggttgtggtcaatgggagaggtgatgggcctcgcagtgagaccaaggagttcaccaccccggaaggagtacccagtgcccctaggcgtttccgagtccggcagcccaacctggagacaatcaacctggaatgggatcatcctgagcatccaaatgggatcatgattggatacactctcaaatatgtggcctttaacgggaccaaagtaggaaagcagatagtggaaaacttctctcccaatcagaccaagttcacggtgcaaagaacggaccccgtgtcacgctaccgctttaccctcagcgccaggacgcaggtgggctctggggaagccgtcacagaggagtcaccagcacccccgaatgaaggtaggtgcatggcagcagcccctggggtaaaaggtcccagctaattccgaggcctagagaaacactgagatctgtagctggctgcctgggatggagaggaaatgagacttgcaagtcctcaagccctcggaaggtgagaacccatcttatgtgtgagaggtaggtgctggcattgtatctggagctcagctctccttggaccactgtggtcacacctgggtccccacttgccctgacttgctcagtcacttgacatctatcatctttccttcttgtagaggaataaggaagagagcatgagttgagaaatgagagaaatcataatgaactccaaagaacagtgagtgttcacctcttgagggaggcaggaatatgattgtgagtgctcccatgagggctctggggacaaccttctttcttcgaaggcacatgggttcaaggaggtaggggaaaccgtcaggatgacgctgttactggcatcatgagtagagcagagaatgtggtccttccttgcagcctgaattggatgcgttgtcaggctgcagagaggaggaggagttaggaaacagccatttgccaagccagcttcacaaagagcaaatgagttcatcacctgggtccaggcgtcatctggcagcatttcagccccaccagagctgcacctgcctgaggactccactagagggggctccaggctcacccgcacacgcactggcatcaggggaatgtgcagtctgggacctctcgaggaggcaaggctgcaaaagcctcaatactggcacaccctctgggaaaggctggggacccccgtgtgtctccagagatacaatggtctattcaacagccatttcttgagtacccacaatgtgaggtgccagacactgccacacacaagggatatacaaaggtaacaagaagctcacaccatctagagggggagtcatctataagaatatctaattgcatgtctaaatgagggggcgcagtggctgggcagagaaggggattcagtcttcacgggaagactccagagaagaggtgatgtgagtgggcactctggaagctgacaagtcatcgtgtctggtgctttccacagaagggtcaggtcccgtggcctggcccaggcccagacggggtcttctgaataccacccctacccgcattccaggagagcatcagtgctgccttctctggggctaccaggcccgctgcgtcaccccgggatcccaggcagcttcacaagctgcccacatccttccccagcccaccactctagccagtagaccagcgctgaggcaggagaagaggggccaggcagaagcagagaaaggctgacagcccgctctgcatccctctctggtctcagaaaccaggagtgagtcacacaaccagctctccctcctgctgtgctcttctgcactctcccaagcccctgggcactcgggaagtttattagggcagggggacttaggttagtggctgatgtgtgtctgtcaccaaaggccaggccaggccaggccatgatgcactttcttgattactcaattctgcaaatagatagataaagagagccccttcttccctccctatgtgcaccccaatacagaacatcagataacaaagccctattgtccagccccagtaaccaccacagagaatgttctgcagccccaggggacaaaaggacaaatagaggcttttttcttaacttagggctttgcagaaaattcaagaatttcacttagggctctcagtcc

SEQ ID NO: 64413 - DNA, 1208 bp, Homo sapiens
atctacacctcccccaagacatcagggacaaagtggggtggagtgagatggggaaggagaagaaggtatagaagactccaagggtcttctttaaaggtaccctggtactcagttaacaattcctcccaggcagctagctcctgtgagtgccaaagacaatggaaaagaggaaggggggggcggagggagggagggagaaggaggggctgggaaggcattcaagcagctgcagtttccggatatgtgtccacatctgtgttctgtcttctgaaaaagaaaaatttccccccaaaccacaccctgcccctgcattgtctgtttgacacaaagtttcaggaccctgaaaaaaagccccaaagtgcttcttcatcatcttggggaatacagggtacgtggtggtggtctctgtattttccgaagctgggggtagggagtgggcagactagcaaggtcagcctcaggaggctaaaacctctgaccttgctgcagtcttcttagatgtcagaagagaaccaggtttccaggcagagcactggggcttcgacacaaactgtcagaaaggcttgtcgggcctgctggtcttggcatccccgctggctgctttgcagatgacgctgttcgtgtgcttgcagcggcaaccagggcggcgcagacggtcgtagccacgctgggccagcttcacgcagccggtggcaggcaggtagcagagcaggcagggcagcaccacggagagagcacccatgaaggaccagcgggcgcagcagttggagcgggagcaggagcaggggtggtcagcgcaggagccctcatcgtcctcattcgtgcagtggtagaagatgccctgcaccaaacacatgcacgtgccatagttgaccagagtctgggctgagcacaggcactcctggttgcagacccagcaggaaggcaacgtccggggggatgcacactccttgcatttacacttcccacaggcctcgcacagcaagaagtgcttgtccagctcgggtgggaccgccgggcccttgaggtccagcggctggcagtggaccaccttgggctggatgcgcacagcccttggtgaggcctggtcagccacgggtggtggtgccatgtggtctaagagccgttggtcagaggatgtgctgctgctgctgctcacagagctggggcgcccgctgaaggagatccaatggtgggtgacatcctgg

SEQ ID NO: 64414 - DNA, 1959 bp, Homo sapiens
ccttgagactcgacatccagagttttttgtggcctagtgatgtaggcactcttctgccacacaaccaatggtgattactgaaattccaaactcctgaaaagagctatcggcccagtggtttcttttagaaggccgtttgtgtggcaccaaaaagcaattgcttcctccattcctactacctggaaacacaaacttttaaattcatgccagttcaattggaacagtagcaaatttcatgaagcagctaaaaagaagagcaacagctggtacatcaggcattaataatataacaaaggaagaaaaaagagaaatttttcattagtactttttgatgtcaatttattatttatccctttgccagtattcaaacagacaggcagtcataaaacattaaaaaagatcctttaaaacggtcaggcatctgttttacctcagttcctttttagaaacctggaaatcaggagccccggcttttatgctatagcaagtttgacacttgctgtatcaaaaatattgcttgaggatcactacgtagaaagagttttgtttaaaattttatgaaaggctggttaggcaggcagacaatggtttctaaggcaagatccagtgtaaatcaggcaatgtgctgtttcccaactgtttgactcctcagttcatattctgaaaccggggggcgtttgacaaaacccactgtttcagttaattaggcatcctgtcaaatctttccaatcaaggactaggcatgctgcacctggtcctaggtttaaaaaacacattgtggggggcaattctgatgtgaccctcaggggcccgctggccatgctcagaactggcattcagcgtgcatgccataattaccatccacacaaaataagtagacctccttgtccagcagctctgagagattctgcctaatcctaatgacctgccacaccattttaacttctttgataaatgtctatccttgtgatttagacctttcctctcctgtaaagaaggtatctcttcctgggacagaagactcctcagaagtagaatcactgtagaaataaagcaaatgaaaaatggagaagcaaaaaccaaagtaaaacagaagccttaacagccctctccccagcaggagcttgttggaggaggtgtgggtgctgagtcccccctccctagcttgtcttgccctcagtgctctgggtgcttttgcctttccaggtactgcccttggtgtagaggccatggtccttgatgtacgtgatgacagcatcgggaatcaggtactttacgctctgcccttggcccaaggctcgcctgatgtatgtggcactgatctcattctgcacaggctccttggccaggtgaatgttgtgctggtgcatccgtaggatgggagattctgcgatgtaaccttttgggtcgtgacctactcggcccacgcacaccaagccaaacttctccactatttcctggatgtgcgcatccttccagaggttgggggtctggaaggtcttcaagacgtctgccccacagagaagcttcagctcaggcacagctgcaggggtcgagaagagtgccttgccatggtctgggccttccatctggggtggagatctgagcagtttgctgtgatgatgcctcagcaccttcactgtctccatccactgtgcctgctcactctcccaagggtccacccggatccagtcggatgtctgcagggccagccgggccatggccactcggtgatgagaagctgcgaggtctttcttcccataggtgtcgttgacaggagagatgataccctggatgacctggtacattcctgtttggtgtaggtgatctctggccacctcaaacatgcgcaggtgcatgttggtgatggggttaaaggagccacaggccaggagcaccacaggtattcggctcttcatcttgtcaggcacatccacacctgttgcagtgcaagtgcaa

SEQ ID NO: 64415 - DNA, 498 bp, Homo sapiens
ttttttttttttagtagagatggggttttgccatgttggccagggtggtctcacactcataggctcaagtaatctgcccgcctcagcctccaaaagtgctgggattacaggcgtgagccactgtgcccggcctgacttcaaatcctgtgttgaatagaagtagtgagagcgggcatccttctcttgttcctgatcttggaggcaaagatttcagtctttcatctaaaatgactgaaagactttcagccatgggccttgcatgactggcctttattttgttgcagtatattccttctcttcctggtttgtggagtgttttaccaggaaagggtgttcaggctgggcacagtggctcaagtcacacaaaagtgtcaagtcagccctgcccaagggccccagtgcccatcttcctgctgaggggctgggcctcaccttggctggctgggcccctcccacctggatccctgcagaccccaccgcactcagcctcacacgaaa

SEQ ID NO: 64416 - DNA, 1367 bp, Homo sapiens
ggcagtctgctgacccttggaagatgaaggagaaatgggagaaggcagaggggtcaggtgggggctgccagaggaagcggccctgagctgctggttcccagtccctccctcataagcaaagctgaggccctcaggttaccacgggacactgttaagtttattctagggtgagtgggtgcccaaggggggcagtgagtatggccgaggtcacctggtggcagggtgctcagggatggccacaggttctatagggccctgcagggcctgagtctctagtcagttgggatgcttcaccttctgccccaccccaagggggttggggcagtcatggatgtagtagttttcgtaattcgcagggatcagtgatgggcactgagcaggcttgattctcacacacatatgcagtggcctggtcttccaaccgtcggagggtactcaggaaaggcagctggcgggacaggaagctcgaggggtccccatcagccagaatcagcaccttgttaggaatgtagacagagtggacgcactgcaccagggccttggtgtccttggcctgacggtctccacagatcacgatctgcttgagggtctgctgctgggctgagagggcgcggaccatctcgggcaacgccaccgggacacgacgcatgcgctcggaaaaggcggtcaataggcacacacacttgtccatccagtccttgtggcccgtgaagccatgcagccggagcaggttgtgggctgacacggaattggcgctgggctctgctccatcctggtcgtccttcagacgcaggggcaggccagcccccagctcagcctcactgcagaagtagccgccaccctgggagtcccaaaagagcctgtcctgtgtgtcctgcagccgcagagcccactcgagccacgcactctcctgtgaggcctcatacaggtccagcaggccccgcaccacgaaggcgtagtcctccaggaagccccagcagggtgggttgctgtgctccacagtccccccagggccggtgtagcaggtccgcatcaggcggccactggccacatcaaacatgtgccgcttcaggaacttggcaccattggtggcatagttgatcagcctgtcttggcccaggacagccccagtcacagcatagcctgacaccatcaagccattccaggcagccagcatcttgctgtccaggtgcggcttgggccgatgcttccgggcctggaagagcttctccagccctgaattgagcaaggtccgcacggcctccacatccaagccaaagcgggcagcagtcagctccagcgagtaccggacggtcagcacattctggccctgcagctcccccttggggtcctgactggctcgtgcc

SEQ ID NO: 64417 - DNA, 1911 bp, Homo sapiens
gagccatccatcggggagtttaatgagcaggttctgcgactgatgcacagccttggaatagatcagcagaaaaccattgagtctttgcagaacaagagctataaccactttgctgccatttatttcttgttggtggagcgcctgaaatcacatcggagcagtttcccagtggagcagagacttgatggccgccagcgtcggcctagcaccattgctgagcaaacagttgccaaggcacagactgtggggctcccagtgaccatgcattcaccgaacatgaggctgctgcgatctgccctcctcccccaggcatccaacgtggaggccttttcatttccagcatctggctgtcaggcggaagctgcattcatggaagaagagtgtgtggacactccaaaggtcaatggctgtctgcttgaccctgtgcctcctgtcctggtgcggaagggatgccagtcactgcccagcaacatgatggagacctccattgacgaagggctggagacagaaggagaggccgaggaagaccccgctcatgcctttgaggcatttcagtccacacgcagcgggcagagacggcacactctgtcagaagtgaccaatcaactggtcgtgatgcctggggcagggaaaattttctccatgaatgacagcccctcccttgacagtgtggactctgagtatgatatggggtctgttcagagggacctgaactttctggaagacaacccttcccttaaggacatcatgttagccaatcagccttcaccccgcatgacatctcccttcataagcctgagacctaccaacccagccatgcaggctctgagctcccagaaacgagaggtccacaacaggtctccagtgagcttcagagagggccgcagagcatcagatacctccctcacccagggaattgtagcatttagacaacatcttcagaatctggctagaaccaaaggaattctagagttgaacaaagtgcagttgttgtatgaacaaataggaccggaggcagaccctaacctggcgccggcggctcctcagctccaggaccttgctagcagctgccctcaggaagaagtttctcagcagcaggaaagcgtctccactctccctgccagcgtgcatccccagctgtccccacggcagagcctggagacccagtacctgcagcacagactccagaagcccagccttctgtcaaaggcccagaacacctgtcagctttattgcaaagaaccaccgcggagccttgagcagcagctgcaggaacataggctccagcagaagcgactctttcttcagaagcagtctcaactgcaggcctattttaatcagatgcagatagcagagagctcctacccacagccaagtcagcagctgccccttccccgccaggagactccaccgccttctcagcaggccccaccgttcagcctgacccagcccctgagccccgtcctggagccttcctccgagcagatgcaatacagccctttcctcagccagtaccaagagatgcagcttcagcccctgccctccacttccggtccccgggctgctcctcctctgcccacgcagctacagcagcagcagccgccaccgccaccaccccctccaccaccacgacagccaggagctgccccagcccccttacagttctcctatcagacttgtgagctgccaagcgctgcttcccctgcgccagactatcccactccctgtcagtatcctgtggatggagcccagcagagcgacctaacggggccagactgtcccagaagcccaggactgcaagaggccccctccagctacgacccactagccctctctgagctacctggactctttgattgtgaaatgctagacgctgtggatccacaacacaacgggtatgtcctggtgaat

SEQ ID NO: 64418 - DNA, 1976 bp, Homo sapiens
tttcgtcaagagtggagatgacccaccggccatgagacagggcagtgagcacacgtatgagagctgtggtgacggagtcccagccccgcagaaagtgcttttccccacggagcgactgtctctgaggtgggagcgggtcttccgcgtgggcgcaggactccacaaccttggcaacacctgctttctcaatgccaccatccagtgcttgacctacacaccacctctagccaactacctgctctccaaggagcatgctcgcagctgccaccagggaagcttctgcatgctgtgtgtcatgcagaaccacattgtccaggccttcgccaacagcggcaacgccatcaagcccgtctccttcatccgagacctgaaaaagatcgcccgacacttccgctttgggaaccaggaggacgcgcatgagttcctgcggtacattttttttgccatgcagaaagcctgcctgaatggctgtgccgggttggatcgtcaaacgcaggctactaccttggtccatcaaatttttggagggtatctcagatcacgcgtgaagtgctccgtgtgcaagagcgtctcggacacctacgacccctacttggacgtcgcgctggagatccggcaagctgcgaatattgtgcgtgctctggaactttttgtgaaagcagatgtcctgagtggagagaatgcctacatgtgtgctaaatgcaagaagaaggttccagccagcaagcgcttcaccatccacagaacatccaacgtcttaaccctttccctcaagcgctttgccaacttcagcggggggaagatcaccaaggatgtaggctatccggaattcctcaacatacgtccgtatatgtcccagaataatggtgatcctgtcatgtatggactctatgctgtcctggtgcactcgggctacagctgccatgccgggcactattactgctacgtgaaggcaagcaatggacagtggtaccagatgaatgattccttggtccattccagcaacgtcaaggtggttctgaaccagcaggcctacgtgctgttctatctgcgaattccaggctctaagaaaagtcccgagggcctcatctccaggacaggctcctcctcccttcccggccgcccgagtgtgattccagatcactccaagaagaacatcggcaatgggattatttcctccccactgactggaaagcgacaagactctgggacgatgaagaagccgcacaccactgaagagattggtgtgcccatatccaggaatggctccaccctgggcctgaagtcccagaacggctgcattcctccaaagctgccctcggggtccccttcccccaaactctcccagacacccacacacatgccaaccatcctagacgaccctggaaagaaggtgaagaagccagctcctccacagcacttttcccccagaactgctcaggggctgcctgggaccagcaactcgaatagcagcagatctgggagccaaaggcagggctcctgggacagcagggatgttgtcctctctacctcacctaagctcctggctacagccactgccaacgggcatgggctgaaggggaacgacgagagcgctggcctcgacaggaggggctccagcagctccagcccagagcactcggccagcagcgactccaccaaggccccccagacccccaggagtggagcggcccatctctgcgattctcaggaaacgaactgttccaccgctggccactccaaaacgccgccaagtggagcagattctaagacggtgaagctgaagtcccctgtcctgagcaacaccaccactgagcctgcaagcaccatgtctcctccaccagccaaaaaactggccctttctgccaagaaggtgggtgtgtgggggtctcgccgctgctgtgtatcaagagagctccaagagttgcttggttgtggtttgaagggagtgagaacattgtccgggggctttggcg

SEQ ID NO: 64419 - DNA, 418 bp, Homo sapiens
tatttcgtctccctgcaggtggaggtagaatcgaggaacagtccggagaaggaggagcgagtgcctgccgaggagatcacctatgagacactgaagaaagccattgtggacagcgtagcagtggaggagcaggagcgtgagcggcggcggcaggtggtggagaagttccagaaggcacccttcgaggagattgctgcacactgcggggcccgggcatcgctgctccagagcaaactcaatcagatctttgaaatcaccatccggcccccaccaagcccatcaggaaccatcactgcagcctacggtcagccgcagaaccactccatccccgtctacgaaatgaagtttcccgatctgtgtgtatactgaattccaagagcctgagctcctcaaggagatggggtctgaggaggggctc

SEQ ID NO: 64420 - DNA, 1240 bp, Homo sapiens
ttttttttggggaagaatgtgtcattttctgaatcccttctccactgacccactttccatccctccacacaacttcagtaggttgatggcttctactggtccaggccccttgaccccagctagggcctcagggactttcgggccttttccaaaatttcctccctgatcttggggtagtcggggtgctccctgaggacatcgttgcagatttcgatggcctccacaaatttcttgtccttcaggtagttgaaagcaagtttgaagccaatggcagggttggcgtgatgactgtacttccaggccagtttgtagttggtgactgcatccttgtaggactgctccttctccatgatgaagcccatgtactcataggccttgtagcaggacttgttgtattgcacacagcgccgcagcagttctaaggcgaggtcgaacttgctgccctggcagtaaatgtcagccagcaggagccagctcttctccaggtcctcagcctcactcagcacccagggggtcttggccaggcgcttcaactgcatacgcgccttggggatctgcttcaggaacacgtaggcttgtgccaaggccagcagggcagggacgctgtccttctcagcctgcgctatctggatgaagctgcccagcgcagcctccatgttagccttctccctggtggccagccggcagaggccctgcagcagccgcagctgggtctggctggagtctgaatgtgggtaaaactcacgcagcagtttctcggcggtgctcacaccctgctgctccaactccttcttctccatgtagttgctctcagctccctggttctcaaaagcctctccgcccacaacctcgttgtctggattcagacagatctgcaccatgtggtagatggcgctctggccccaagtgctgtccttgcgtgccttgttcaggaactttaaggcttcgttgggctgccctatgtgccagcagtagatacctctgcagtaattgaaccctggttccaaaggcacccggctagacaccttcttggccaattcaaagaaggcaggaatgtcttcaagttttccacttcttcttagcagatcgattaatttatgcaataccaaaaaattgtctaaaataagagacagaaatctccaggctgaaatgcccagtagctgttatcagatgagggtgctggggccttaggagaagccaagagatactgcccatctgggctgagcagggacattccaac

SEQ ID NO: 64421 - DNA, 1780 bp, Homo sapiens
cggtggaattcgatggatgcctgcaacaggtacagcaagctgaattgcttagtggcgcccacactcttcctggagttccatggctcccagcaggcactggaggagcagctgcagcgcacagaggagatagtccagcagaacggagcctctgacttctcctgggccaaggaggccgaggagcgcagccggctttggacagcacggcacaatgcctggtacgcagccctggccacgcggccaggctgcaagggctactccacggatgtgtgtgtgcccatctcccggctgccggagatcgtggtgcagaccaaggaggatctgaatgcctcaggactcacaggaagcattgtcgggcatgtgggtgacggcaacttccactgcatcctgctggtcaaccctgatgacgccgaggaactgggcagggtcaaggcttttgcagaacagctgggcaggcgggcactggctctccacggaacgtgcacgggggagcatggcatcggaatgggcaagcggcagctgctgcaggaggaggtgggcgccgtgggcgtggagaccatgcggcagctcaaggccgtgctagacccccaaggcctcatgaatccaggcaaagtgctgtgaagggggtctgagcacttagcccacaagttccctgactacggagccggttctggaacttttcttcatgccacggcccctgcaaggaaatagatgctgaggcagtcttcctgccagcgagcccactgtatctgggcccaaggccagagggcccagagagaagcctgagcaccgtgttacctccctggccctctggctggcccccaggagcctttggttcaagtaaacgaccccagggtggttccccagcaaagctgcttcctctctgctcctacgcatcctgtcctggcgggaagagagcgtctgggtccattcaagactctgatgacacccctccccgaggcctcccactgccggggtcccaggacccttcccccttcacctggtgacaggaacactcctttcctggtatggaacgtgagctcccgtgacatgatgataggtcttctccttggggcctcccccaataaatctgtaataaacctgaaacccacctacagctacctggaagtcagcaggcagcacttcctcccctccccctccagggtctctgtcctttggtcagtgacccctttgttttggggctgtcctctgacttcttatagcctggggaggaggttggtgctcagggttcggaaaggaacccaggtccctgtcccagctactccgcctcagagctgaggacctgcccacggcacatgtcactcaggatgggctccccaactgggcctgaaccgggcctctgaacacactgaatgtgttcctcagcagctgccacgtctctagaaacagagatgagactatttttgcacccacctcttcatggggtgatgtatcgtaccaccagctgttttgccctcaaggtctgtccacccgagggcctgcccctgtcttgggccggagcccgtcttgagaccttggcagttgttcccccctaagcccacaggagggcgcccgaaatcatgaagctcagataccacgcggcatctgcagctcacgactcctctgcccagggcctgcggcactcagccctgggcaaacctcctcctatggtcaggtaagtcctggcagcctggaagccaagctagtcctccatcccctgcaggtcccaggaacctgcagtgctgtctcatcttccttgcccctctagccttcggtccctttg

SEQ ID NO: 64422 - DNA, 421 bp, Homo sapiens
ctcgcaggccgcaaggtgctgctcttcgtctcaggctacgtcgtgggctggggtcccatcacctggctgctcatgtctgaggtcctgcccctgcgtgcccgtggcgtggcctcagggctctgcgtgctggccagctggctcaccgccttcgtcctcaccaagtccttcctgccagggggggtgagtgttcagccccaggccccaggcccctaggccctctctgactggccaggacccttctcagtgccaggggctgtgccaaggcctgctgtcaggaccctaactctcagtgaccctaggagatgagcacacaccccctgaactcagagaccccagagtggtcacgtgatagcctagcaaacgctcttcattataagaaacaggaacgggcgtatgcaactgctctggtaagtcaggttag

SEQ ID NO: 64423 - DNA, 628 bp, Homo sapiens
cagtatattcggtgctcttcgaactggtgcttatatggtgtacattttgatgaccaaaggcctgaagcagtcagtttgtgaccagggtttttacaatggacctgtcagcaaattctgggcttatgcatttgtgctaagcaaagcacccgaactaggagatacaatattcattattctgaggaagcagaagctgatcttcctgcactggtatcaccacatcactgtgctcctgtactcttggtactcctacaaagacatggttgccgggggaggttggttcatgactatgaactatggcgtgcacgccgtgatgtactcttactatgccttgcgggcggcaggtttccgagtctcccggaagtttgccatgttcatcaccttgtcccagatcactcagatgctgatgggctgtgtggttaactacctggtcttctgctggatgcagcatgaccagtgtcactctcactttcagaacatcttctggtcctcactcatgtacctcagctaccttgtgctcttctgccatttcttctttgaggcctacatcggcaaaatgaggaaaacaacgaaagctgaatagtgttggaactgaggaggaagccatagctcagggtcatcaaaaaaaaaa

SEQ ID NO: 64424 - DNA, 850 bp, Homo sapiens
cagtactccaatcaacatttatgtgcaggatcatcaacagacagaccattttacagttttcagaattaaagtcttctagttgcagtgaagtcttgaatctggatcacctggattcatgcaagatggcacagggtgcttgtcatcatctacatatagagttagctttttttgcccatgcacaatgtttctttatcaataatgaagctggatgataccaaatagattctattgctttattgattattactttcattaaacaatgttagccatataggatgattaaaaaaacaactaatatccttggaatatgaacatcctattaactgatacaaactgactccacctttcttatagcagtgaattttcaggtcacatacaatcagtaatttatactccaaatacaacaatcacgtttgtattaatcatccagtacaattcacaggttcctattacacaggtggatgtacttagagagttttagcacaaaagctgatacaaatatgaaagtgtgctcagtcgaatggttagtgaggtgctacaggtgagtgtcggcgatgggtatcctcctgagctccacgatctgggagtcagtcaaggtgcccccctcctggctgccttgaccagattcattatcactgacactgagaccagcaccagtttttaatgcaaatattaaatcatcaaactcctgggactcctcatcggctatcagtgacccctggccatatcctccagaggacgggaacgtggctccattttgtggacttggctttaaatcagggctggcctgactgccctgttggaaggatgctctctcccagtcaggtggcacctcctccatagcaccgat

SEQ ID NO: 64425 - DNA, 820 bp, Homo sapiens
cttgacatggccccagctcttcctggagaccctgccggagctcctgcacatgtcccgcccagcagaggatggacccagccctggggccctggtgcggaggagcagctccctgggatacatctccaaggccgaggagtacttcctgctcaagtcccgcagtgacctcatgttcgagaagcagtcagagcggcatgggctggccaggcgcctcaccactgcacgccggcccccagcaagctctgagcaggcccagcaggaactcttcaatgagctgaagccagctgtggatggggcaaacttcattgttaaccacatgagggaccagaacaattacaatgaggagaaagacagctggaaccgagtggcccgcacagtggaccgcctctgcctgtttgtggtgacgcctgtcatggtggtgggcacagcctggatcttcctgcagggcgtttacaaccagccaccaccccagccttttcctggggacccctactcctacaacgtgcaggacaagcgcttcatctagggtgggcctgttggggagccaggagacagcagggtctgagagaggagccacagtccctaatgacacccactcctagccctgaggctcgtgcccctcagactggggaagagtccaaggaagggagggagcagccactcctcaatgctcaatggctcccctgaaatcaagacaggggccacccgagatggtctgagggtggacatcggctacagtgggtgggcaggacgatttggggggaggcccgaggctggctcaggggccagggaggagaacactcagggtggcctcagggggaga

SEQ ID NO: 64426 - DNA, 841 bp, Homo sapiens
  misc_feature (1)...(841): n = a,t,c or g
ttttttttttttcaccattgaagaacctgcattatcgtttattgtgatcctaattcggtccacagtaacaattgaaactgcctcgactaaattttaagtttctggggcagcaccaccatgaaggcagcgactgcctttttaaaagacagggttctgacattcagagatttctgtttctctatccatcatttttgggcatcttgaatcacctgatttagagtcagtgacatcctgactggattggttctgctctcgctgggcgggtgagacccccagacccacgtccacagtgcacctgatgttctcccagcggtcgtcacttccccaaggaggccaggtaggcataccagaacagagctgccaggttggcgaagagcacccggaacttcagagggacgtagttgatgttgatgaactgtagtggcgtccacacccgccagttcatcctcagcgccggccagaagccccccctcatcttggcggcgaaggctgaggcgtctttcccctccagaaagttcatgatgaggaagaacaacatgaggaaggccggtgcaaagacgaggcggtccaggagaagcctcctgagccctgccagggggacctcaggagggatccaatgttccatgaagaagtagaagaagtgactcagcggccctgtgaagaagaacccgtaaacggcatatctcagaggcccaccgacatccagacttctagagttttcttttttccgcttcttctcaatcatctgggccaggaagttcccaagtgctgacaaaatgccactggtggccgccttggtgagcaccgggaattccaccacncggactaaggtcctcaaggt

SEQ ID NO: 64427 - DNA, 1988 bp, Homo sapiens
agctgcaccactagaaagatggcggagcaagagcaaagaaaaatccctttggttccagaaaatctcctgaaaaagaggaaggcttatcaagccctcaaagccacccaggcaaagcaggcacttttggcaaagaaggagcagaagaaaggaaaagggctcaggtttaagcgactggaatcattcctacatgattcctggcggcagaaacgtgacaaggtgcgtctcagacgactagaagtgaaacctcatgccttggaattgccagataaacattccttggcctttgttgtacgcatcgaaaggattgacggcgtgagtttactggtgcagagaaccattgcaagacttcgcctaaagaaaatttttagtggtgtctttgtaaaagtcaccccccagaatctaaaaatgctgcgtatagtggaaccttatgtgacctggggatttccaaatctgaagtctgtccgagaactcattttgaaacgtggacaagccaaggtcaagaataagaccatccctctgacagacaatacagtgattgaggagcacctggggaagtttggcgtcatttgcttggaagacctcattcatgaaattgccttcccagggaagcatttccaggagatctcatggttcttgtgccctttccacctctcagtggcccgtcatgctaccaaaaatagagtgggcttcctcaaggagatgggcacacctggctatcggggtgaacgcatcaatcagctcatccgtcagctgaactagacccaggtgccaaactgcggtaaattttttatcagtgaagtggaagcatgtgttttgttttggaaatttttatcaagtatcttcagagaagattatttcctgctttatcttcagaaactggaaagggtcaaagaaaagacagtagctggccggtcgtggtggctcatgcctgtaatcccaacacttagggaggctgaggtgggcagatcacctgaggttgggagttcgagaccagcctgaccaacatggagaaatgccatctctactaaaaatacaaaaattagccgggcatggtggcacgtgcctgtaatcccagctactcaggaggctgaggcaggagaatcgcttgaacctgggaggtggaagttgcagtgagctgagatcacgccattgcactccagcctgggcaacaagcgaaactctgtctcaaaaaaaaagaaaagacagtagcatatgttcatgtcaagcacctctcatcacagtcgagttccaaggaaaaattccagcgttttctgcattgggtgctgtgtcatctgaaatcggcacattccatggaggaaggagtcctgctttgttgcatgtatcctagggtttaatgttggtaaatgagtcactctagcatttgtagaaggctccctgagactcctgcagcagtcgaccaagcccaaggacataattgaatctggagagtcctggggccttgttttgaaaaagacttgaaatacacataggaagaaaggcataaaaataaatgttcacttgtctctgctgtgagtatgtgttccaacttttcagtgatggctttgagaattctcaaacttgactggctctaagtgtatctggtggcttttgtatcgtaacctgaaactggcttagtactttttcctaaaagctcaggatttgagaatgaggaccccttcgccaggaaaacatgtatacactcaaaattttgcttgcagttctagggtgtttagacccttctcagatacctgtgcatcttatgggttttgtttttctctttgagacagtctcaccctgttgcccaggctggagcgcagtggcatgatctcggctcattgcagcctccacctcctgggttcaagtgattctgcctcagccccttgatcagctgggattacatgcatgtaccaccacacccggctaattcttgtatttttagtagagatggagacagagtttcaccatgtaggtcaggagttcgagaccgg

SEQ ID NO: 64428 - DNA, 1346 bp, Homo sapiens
ggtggtggaattcgcggatgtggagaagaaaggtgctggcaggacagagttccgctacccttcctatgtgcagcacatcatgggggacatattctcccagggatttgggcctttccgctgggtgtgcacatcgggggacccccaggacctggcggtcacagacgaactggccacatctgtgctggaggaagccattgctgatggagtgaaggtgtctgtgaagctgcagtacatggacaacatccgctggatccgggaggccgccaggcaccggctggtggtgggctcccaggcaaggatcctgtactcagaccagaagggccgcgtggccatcgctgtggccattaaccaggccatcgcctgcaggaggatcaaggcgccggtggtcctgagccgagatcaccatgacgtgagcggcaccgacagcccctttagggagacctccaacatttacgacggctctgccttctgtgcagacatggctgtgcagaacttcgtgggagatgcctgtcgcggagccacctgggtcgcccttcacaacggagggggcgtgggctggggtgaggtgatcaacgggggattcggcctcgtgctggacggtaccccggaggccgaggggagagccaggctgatgctcagctgggatgtctccaatggtgtggcccggcgctgctggtcagggaaccagaaggcctatgagatcatctgccagaccatgcaggagaacagcaccttggtggtgacactgcctcacaaggtggaggacgagcgggtgctccagcaggccctgcagctctgagggagccaggagtcgcggcccctgcctcccttcctccctggcgatcctcacctgcccagccatggcacacacccttcctgcacacccgcactacctgcacttctcgcacatcctcacgtggcccttatggtgccctgtgcagggtgccaccacagcctcattttacagacagccccctgaggcccagagacatgcagctctctgtccacaaccatgccacttgcatgggagccctgaaggctgtcaaagtccatttagggccaagtcccaagcctgcccgggggccctgcggtgaacactggtcaagctctctccggctgggatgatcacaccctctgcttcctggccacctgccagcctccatgcaactctgtctgtctgctgcccatctgctgtctgtgcaagcaacttctggaccctggcaccctgggctgctggcctggaggagttcgggaaggaggatagaccaggaaataaagggtcaacagagctgtgtgctgcactgtgggctggtgggacggggcaggccgggtcttgcctaaggata

SEQ ID NO: 64429 - DNA, 672 bp, Homo sapiens
tcctgtggtggaattcgaggcccacctgggtgacaccttgatcatcaagtgtgacaccaagcagcaagggatgaccaaggtgtgggtgacaccaagtaatgaacgggtgctagatgaggtgaccaatggcacagtgagtgtgtctaaggatggcagtcttcttttccagcaggtgcaggtcgaggacggtggtgtgtatacctgctatgccatgggagagactttcaatgagacactgtctgtggaattgaaagtgcacaatttcaccttgcacggacaccatgacaccctcaacacagcctataccaccctagtgggctgtatccttagtgtggtcctggtcctcatatacctatacctcaccccttgccgctgctggtgccggggtgtagagaagccttccagccatcaaggagacagcctcagctcttccatgcttagtaccacacccaaccatgatcctatggctggtggggacaaagatgatggttttgaccggcgggtggctttcctggaacctgctggacctgggcagggtcaaaacggcaagctcaagccaggcaacaccctgccagtgcctgaggccacaggcaagggccaacggaggatgtcggatccagaatcagtcagctcggtcttctctgatacgcccaattgtgtgtgagcaggatg

SEQ ID NO: 64430 - DNA, 1732 bp, Homo sapiens
tttttttttttttgcgaaagaacagaagagtataatgttcaacatgcagggaaaaaaataacaatacatatttcagaaataggagcagcttcagtgcaggcagtatcatggcagccactccacgggaggaacgggatcctctgccaaccttgtcagccactccaactaagcagctgctgcaccaggtgtgttgctgctgtctttctaagggttcaagaacatgggctctggggtcatatggcctgcgttcacattccagctccattcatagcctgcatgacctttagcacatgtcttggcttctctgcctcaatttccccatctcatggacctgctggccaaggacgaccagaatggcgaggcggaggccttcaaggcagagatcaagaagaccgacgtgaaagaggagaagaggaagaaggagctgaacgaaatcttgaaaagcacagtgagcagcaacgacaagaaaaccaaaggccggacgggctggccgcagcacgtctgggccctggagctcaagcagtgaggaggaggagaaggaggaggaggagagcgcgagtgagcaggggccaaggcgccagatgcagacccaggactccggaaaagccgtccgcgctccgctctgaggactccttgcatttggaatcatccggtttatttatgtgcaatttccttcccctctctttgaccccctttgaggcatctgctccccgtctccccctccaaaaaaaaagtggatatttgaagaaaagcattccatattttaatacgaagaggacactcccgtgtggtaagggatcccgtcgtctcatagattctgtgtgcgtgaatgttccctcttggctgtgtagacaccagcgttgccccccgccaacctactcaaccccttccagataaagacagtgggcactagtgcgtttgtgaagtgtatctttaatacttggcctttggatataaatattcctgggtattataaagttttatttcaaagcagaaaacagggccgctaacatttccgttggggtcggtatctagtgctatccattcatctgtggtcgttccctctttgaagatgtttccaacagccacttgttttgtgcacttccgtcctctaaaactaaatggaatttaattaatattgaaggtgtaaacgttgtaagtattcaataaaccactgtgtttttttttttacaaaaaccttaattttttaatggctgatacctcaaaagagttttgaaaacaaagctgttatacttgttttcgtaatatttaaaatattcagaagtaaactaaattatcatgattgcctctaactttattttaaagactcagtgggttccaaccagttcaccctgacctgcggcctacgcagaagggagggagggtgctcttaaagaggaaggtgtccttgttacaaaatcctgcaaatgggtctgggggtttgtcgggtgtgggtgtctccttcccctcttccccccagctgggggaacggctggagtaggtctctagaaggaagatctgggctggagaacccagtccggcagttcgctcagaaggtgtaaaggtgctcttggctttcctgaagtcaatcagaagccatttcttgaggccgtcagtttttgtttggagagtgtttctggtggaggagttgtgaggagaaccccggcattattgctgcaacgggaactagtctggggtgtttaattcaaactatggggctttcatccaaaaa

SEQ ID NO: 64431 - DNA, 1223 bp, Homo sapiens
gcctcacagtacatcagcgaactcacacaggggagaactcctttgaatgtaataaatgtgggaaaacattttactataaatcaggcctcactaaacatcagagaaaacacacaggggagaagccctatgaatgcacagaatgtggcaaatcttttgctgtgaattcagtcctcagattacatcaaaggactcacacaggagagaagccctatgcatgcaaggaatgtgggaagtccttttctcagaagtcacattttattatacatcagagaaaacacacaggggagaagccctatgagtgtcaggagtgtggggaaacctttatccagaagtcacaactcactgcacatcagaagacacacacaaagaagaggaatgctgagaagtaagatgagttgggaaattctcttgactgaattaatccttcaaaacaatcagataattcacacaagaggtacaccttatgaatcgcatcaatagagggaaattttcagctacaatctttgctctctctgtgtatcagcaaatacatagagagattctgtacatttatttgggagaaaattttatcatattttaggcttttctaaatattagataatatagatggcagaagtcatgcaaattgtaaaacaggaaggaaacctttcagaagtcatacttttgttttgcaacatagaagtcacacaggagaaaaatcctgtaagtaaaacgaatgtcatgacattttctgtcagggcagccagctgtagacatccaaaagctcacaaatgagaagctccttgagtatctagaaatctctttacacaattggagctcatgtactagagaattcaaagggataactgcaaagacactggtagatatagaagcctttattaagaattgatgtttcattcaatttcagatcactggtacttggatagatattttaaatatttggaaggtgttcaataaaaattcaaataatttgtactgagggaaacagttatactacaaatcatgttgcagatctgatgccgagattgctctattttaaaaggaaacctgcaaatgtctacatatatgaagcttttaaaaagcacaagttatcaggcaacatcattaaacatacattaaatgtctgttagcatataggattttgtgcgtatgtgagtgtgctataacatgtaacttgcggatgttcagcgtgcatgtggaatccatccataatggtacatagc

SEQ ID NO: 64432 - DNA, 2411 bp, Homo sapiens
  misc_feature (1)...(2411): n = a,t,c or g
atctgtttggcctgaccgtctctgcagtggcacgcatagcgngatcacttcctggggttgaggcatgtgaaaattataccttccgatacggccgaaatcctctcatggaacttcctcttgccgttaaccccacaggttgtgcccgttctgaacctaaaatgagtgcccatgtcaagaggcctcacaccttaaacagcaccagcacctcaaagtcatttcagagcacagtcactggagaactgaacgcaccttatagtaaacagtttgttcactccaagtcatcgcagtaccggaagatgaaaactgaatggaaatccaatgtgtatctggcacggtctcggattcaggggctgggcctgtatgctgctcgagacattgagaaacacaccatggtcattgagtacatcgggactatcattcgaaacgaagtagccaacaggaaagagaagctttatgagtctcagaaccgtggtgtgtacatgttccgcatggataacgaccatgtgattgacgcgacgctcacaggagggcccgcaaggtatatcaaccattcgtgtgcacctaattgtgtggctgaagtggtgacttttgagagaggacacaaaattatcatcagctccagtcggagaatccagaaaggagaagagctctgctatgactataagtttgactttgaagatgaccagcacaagattccgtgtcactgtggagctgtgaactgccggaagtggatgaactgaaatgcattccttgctagctcagcgggcggcttgtccctaggaagaggcgattcaacacaccattggaattttgcagacagaaagagatttttgttttctgttttatgactttttgaaaaagcttctgggagttctgatttcctcagtcctttaggttaaagcagcgccaggaggaagctgacagaagcagcgttcctgaagtggccgaggttaaacggaatcacagaatggtccagcacttttgcttttttttcttttccttttctttttttttggttggtttttggtttggtttttcccttgggggggggtttcattgtttgggttttctagtctcactaaggaaaaacttttactggggcaaaaagccgatggctgccctgccccgggcaggggccttcctatgaatgtaaaactgaaatcaccagcgagggggacagagagtgctggccacggccttattaaaaaggggcaggccctctaacttcaaaatgtttttaaataaagtagacaccactgaacaaggaatgtactgaaatgacttccttagggatagagctaagggataataacttgcactaaatacatttaaatacttgattccatgagtcagtttattgtagtttttgatttctgtaaaataagagaaacttttgtatttattattgaataagtgaatgaagctatttttaaataaagttagaagaaagccaagctgctgctgttacctgcagaactaacaaaccctgttactttgtacagatatgtaaatattttgagaaaaaatacagtataaaaatagttattgaccaaatgctaccaggctctgcagcagctcgggggcttataaaatgttcatagggatgttacaatataattttgtgttataaaatatgccattataattatgtaataaccaaaatttcaacctagagtgttgggggttttttggaaaccgcagtctattagtactcaatggttttatacaccttacttctgacagagcggggcgtatgctacgactacaacttttatagctgttttggtaatttaaactaattttttcatattatattgttgcatccctacttcttcagtcaggtttttttgtgcttacaatttgtgataactgtgaataactgcttaaaaatacacccaaatggaggctgaattttttcttcagcaaaagtagttttgattagaactttgtttcagccacagagaatcatgtaaacgtaataggatcatgtagcagaaacttaaatctaaccctttagccttctatttaacacaaaaatttgaaaaagttaaaaaaaaaaaggagatgtgattatgcttacagctgcaggactctggcaatagggtttttggaagatgtaattttaaaatgtgtttgtatggaactgtttgtttacatttctttaataaaaaaaacactgttttgtgtttgcttgtaggaaacttaatcaccattttgaaccaggttagctttttattttggtacttaaaattctggtactgacacttcacaggctaagtataaaatgaagttttgtgtgcacaattcaagtggactgtaaactgttggtatattcagtgatgcagttctgaacttgtatatggcatgatgtatttttatcttacagaataaatcaattgtatataaaaaaa

SEQ ID NO: 64433 - DNA, 1853 bp, Homo sapiens
cggccgcgtcgacatgagcttgtccgtcagctggtagctttcattcgtaaaagagataaaagagtgcaggcgcatcgaaaacttgtggaagaacagaatgcagagaaggcgaggaaagccgaagagatgaggcggcagcagaagctaaagcaggccaaactggtggagcagtacagagaacagagctggatgactatggccaatttggagaaagagctccaggagatggaggcacggtacgagaaggagtttggagatggatcggatgaaaatgaaatggaagaacatgaactcaaagatgaggaggatggtaaagacagtgatgaggccgaggacgctgagctctatgatgacctttactgcccagcatgtgacaaatcgttcaagacagaaaaggccatgaagaatcacgagaagtcaaagaagcatcgggaaatggtggccttgctaaaacaacagctggaggaggaagaagaaaatttttcaagacctcaaattgatgaaaatccattagatgacaattctgaggaagaaatggaagatgcaccaaaacaaaagctttctaaaaaacagaagaaaaagaaacagaaaccagcacagaattatgatgacaatttcaatgtaaatggacctggagaaggagtaaaggttgatccagaagatactaacttaaatcaagacagtgccaaagaattggaagatagtccccaggaaaatgtcagtgtcacagagatcattaaaccatgtgatgatccaaaaagtgaagctaaaagtgttcctaaacccaaaggaaagaaaaccaaagatatgaaaaaacctgtcagagtacctgctgaaccacaaacaatgagtgttcttatcagctgtacaacctgccatagtgaatttccatctcggaataaactttttgaccatctaaaggccacaggtcatgcaagagcaccttcatcatcgtctttaaacagcgcaacaagtagtcaaagcaagaaagagaaacgtaaaaacagatagagattctgcctgtgcttttgtttgactgtctctagattttgaaaccaaaaaactgaactgaaatcatctaaagagttaaaatttcagtgatctgcaattaattacattgtggaagattattttttatcttgtaaaaacacttttttggtttaatatatatttttaaaacatttcactagtgattgaattctacttttgccatctgaattgacttgaatgtcttaaaacaggtaaatactgtaaagtgtgtattcttgatgtttattggctcatgtggacagaaatgtacagggagaattacattattttaacacacagaagtgcaactttctgctttattttctgaatttcacattacttttacttaatgcttttgtgttttgttaatacttcataatatgtgaaaaactcggatcttttaaaaagcatcatagatcatttttccatatgacactggttccgattttaaaaattatttttaaataaccgattattgattactgtattttttttctcaagaacagtgataggtagaaactaattgaacatttggtagtctttcaagaatagtgtctcttcaaggttttacttgatttaatttgatattttactggtttaccagtaaggtgtattgttcagttttttgctccgatttgaattgtggaggtggaagcaaattagtttacatggcatgtcctccctaggcacagtgacagctgtaaagtatgacggaacaaggtagcagatggtacagaatttatactatttaagaagagatgtggcgttcttcattgagtttttttcttcactattttcagaagtttttgttcttttttttttcg

SEQ ID NO: 64434 - DNA, 2039 bp, Homo sapiens
atccgccaagcttggcacgaggcctcgtgccatggtctggctgcactcagtccctcaagcaagggctccatggaggctggcccttacctgccccgagccctgcagcagcctctggaacagctgactcggtatgggcggctcctggaggagctcctgagggaagctgggcctgagctcagttctgagtgccgggcccttggggctgctgtacagctgctccgggaacaagaggcccgtggcagagacctgctggccgtggaggcggtgcgtggctgtgagatagatctgaaggagcagggacagctcttgcatcgagaccccttcactgtcatctgtggccgaaagaagtgccttcgccatgtctttctcttcgagcatctcctcctgttcagcaagctcaagggccctgaaggggggtcagagatgtttgtttacaagcaggcctttaagactgctgatatggggctgacagaaaacatcggggacagcggactctgctttgagttgtggtttcggcggcggcgtgcacgagaggcatacactctgcaggcaacctcaccagagatcaaactcaagtggacaagttctattgcccagctgctgtggagacaggcagcccacaacaaggagctccgagtgcagcagatggtgtccatgggcattgggaataaacccttcctggacatcaaagcccttggggagcggacgctgagtgccctgctcactggaagaggtgagggccagggtgctggggggtggcccccaggagtgaagaccttgacaatgaggatacaaaggggaggtatggtggaaagtcaggaaaggcatctcgtccccaaatcagtgggactggctgggaggccctctgtgagactgagggtcattccagggagccaagagggctttcccacaccagcaccccaccccccactccccactctctgcagccgcccgcacccgggcctccgtggccgtgtcatcctttgagcatgccggcccctcccttcccggcctttcgccgggagcctgctccctgcctgcccgcgtcgaggaggaggcctgggatctggacgtcaagcaaatttccctggcttccccttcagccccagaaacacttgactcttctggagatgtgtccccaggaccaagaaacagccccagcctgcaacccccccaccctgggagcagcactcccaccctggccagtcgagggatcttagggctatcccgacagagtcatgctcgagccctgagtgaccccaccacgcctctgtgacctggagaagatccagaacttgcgtgcagcttctcctctcagcacactttgggctgggatggcagtggggcataatggagccctgggcgatcgctgaatttcttccctctgcttcctggacacagaggaggtctaacgaccagagtattgccctgccaccactatctctagtctccctagcttggtgccttctcctgcaggagtcagagcagccacattgcttgccttcataccctggaggtggggaagttatccctcttccggtgctttcccatcctgggccactgtatccaggacatcactcccatgccagccctccctggcagcccatgttctcctcttttctcaccccctgactttccctgagaagaatcatctctgccaggtcaactggagtccctggtgactccattctgaggtgtcacaagcaatgaagctatgcaaacaataggagggtgtgacaggggaaccgtagactttatatatgtaattactgttattataatactattgttatattaaatgtatttactcacactttgcctctaaggagctagagtagtcctctggattaaggtgataaataacttgagcactttccctcaaccagcccttaactagaacacagaaaataaaaccaagactggaaggtcccctctacccctcccaggcccagagctagctgactgtgtatgagcctgggagaatgtgtctcctccacagtggctcccagaggttccacacactctctgaagctccttct

SEQ ID NO: 64435 - DNA, 3123 bp, Homo sapiens
gtcaggtccatgagctgcccaccgtcctggccttactgtgccccctgccccaccaacataggtgaaagcacctcccctctaaggaagaccatagagaccccaacactgtgggaccccaaagctccttcatgctcactggagctcccaccgtgggtgcttgcaagtcctcagcgctcccggggtacagccctccccttcctgccctctaatgtcctcccctcccttgcccttccctccacttcctttctctgccgtcccctcctctcccatcttgtgacctctttactggcggggcctggagcccatgatggacacttgcggaaggaggggtggcggagcacccctgagatgacatcgctgcctgccccagagcaccccgcctctccctgtgactcagttctttgcagcccagatgtgagcatgtgcaccctgggacctgctgcccgttgggatgcccaggccaaatcagcccctctgcctccatgctgcactgattgcaagagtttcccacatctgcagaggccgtgggctcagccccacaccagccaggccaccagtgttgatagcggtgaggcggggacaaagggaatgtctcagttcacagtgtggacatggtggaggtctcggccttgcgagacaaggcagggggaggggataggaaattgggggtattctgtgactcctgggccaccggggagccagaatcttccagccagactggatgggcagggcttagcttcctgatgccgcccattcaccactttcaccccgggaacctacctgggcatcatgggaggcagagcctgaaccccaacccaaccctaactctaatgctaacccctaaaccatccctcaccctaacccaatcctcgccctaaccctaatgctaacccctgacccgacccaatcctaaccctgatgctaacccctgactcaactctcaccctaaccctgatgctaacccctgacccaatcctcaccctaacactgatactaacccttaacctaacccaacccagccctaactccaactctaaagctaactcctaaccctaggagaggagcccaggccgggccctctccctgctggtttcctgttgggctttggagccccagatgcctgcccagaggcttccttgtgcggggtggggtccagcagtgggggatgggcccagagctggtgtagccaccagcagagccatcctgatccacaggaccatccctggtggggtggggccccctggggcaggaaggccactgaggccagggagactcccaggcccactcacggcgcaggccccacaggagctggctggaggctatgggtgcggggcgtgggcctgccgggggttgcgtgacaggcagtggggagtgggttgtgctggcagctgtgggtgagtgaggaggctcctctcatgaagggccctggggaagtggaatctggccctgagagacccccggcctcctctgcaggggctgccggcaggaggggaaccggggaccacctcccgccacagagcctggggcccccagccttgcctacagggagggtagatgagagtgtaaactgcatatgaggttgggctaaacctggacatgtgtttcataaccaaagcagccaggaatctccggctctgcccagtgatcatctgggcaggacatggggacgagtgtccaggctgaagtcagggcccggccagcagagggccattttgtattgagctccacagctggtcacattctgtggaatgtgcagacgtgcacggcccatcagacagggtctggagtggggctgccatcttgggcagctcctcccgggtgtctgcaaaatgcagaggtcaccagagccaaggcagcaaggcaaggagcccggcttctaaggaactctgagcaggtgtggtccatggctgggaggcagctggccccacagcacatagcacggagggcggcgcggagtcctggacgctcttggcaggtcccctcatggaggatgtgggggattggcttaggcctggtctggctggccttcctggaccgcagtggccaggagctgaaaaccgtgaccccagtctccctgcagctgttcttgatgggatttctgttcgccagtcagatgcatttgcacaggacttggatcctgaactgtgtaacctggagaggcaggtgtgagcgggccatgctgctggcccagcctgtgccggtgtctgtttctgttgtctctcggcccttctgtgagccctcagtaaagctcttcgtgcttcagtcagcaagagtggattctgtcgtcggcaactctggggaccaaaccccgagcctccccctcccccagaccttgcagtgccatggagctgagggacctgtggatccacagctgtggccccggaagggctgcaggagctgaacctgcgtgagccccgcagagggtgcagagccggcttgtgcaggctcccagcaggctcatgacagcgcggatggttaaatgtagctcctgacagccaactgttaaggtttcaggcatttttgcaccaggtgacatgatggtagcctgaacgtgaccttggcagcagtctctacatcaaggaaactggcaaatgtcaacatgctgggtaccctcgctcctgccgccgcaggctgtcagtgtcttccagcccacactgcggggggccttgttgtgtggctgcctcccaggctggggcgagggtctccagagaccaccatcgtgcaggctcttggtcaatagcagggtgtggtgctcctgccaggggacgcattctccgtgtgacctctacaccccaggtcaggtcaggatgtgatttgcttctccagggccgtgactcactagatccacctcccactggtgcctggtggcccccgacagccctggccctgtccaggccctggcctgtcctacagtcacaggtgctggcctgtccctgctgtcctcctgaccacctggtgctcccggccaccctgcccgcccccctgtctcctcgggacagcctggctgcctccacttgctggcccctgccggcccaccctctttccaagcctgccctgcccctcagctcctggggtggggaggggagacctcgccttctgcctgcagcgactcccacctgtcac

SEQ ID NO: 64436 - DNA, 1493 bp, Homo sapiens
gcccatgactacgccaaacttggcacgaggcctgagtcctttgagcacctgccacctctcccagtatctccttttccactacctgaattagtagaggaaaggggagacacacttcctccccagaagcctgagctcaaagtgaaacgggttttcagacccaatggcattgccctgacttggaatataaccaaaatcaatcccaagtgtgctcctgtagaaaagctaccacctcttcctgtgtcatgagaactctaataataagttgatttggaagaagattggagaaattaaagctttaccactccccatggcctgtactttatctcagtttttagcttccaacagatactattttactgtccaatcaaaagatatttttggacgatatggaccattctgtgatataaaatctatccctgggttttctgaaaatcttacgtaaaaggtgtttaataatgatatactactttttttttcatatttgtttgtttgcaatgttactgtaatactatttgccattgtaaaaggccagctcagattgtgagccctttctattgggacagtcctcttctatatgttttaagtggccagtaatttaatgaatttctggtttgtattaaatatgtccttccaatggataagttctaaaacatacgctatcattggcccatgttgctgaggtgcattgtgaacaatacctttagtgactgtggaactgctgcttctatcagaagacctaggatacaagcagccactgtttcctccgttaacaatcagcttttagtaacctgctgtggtcagcatagctacaggaaaagtcagcccttgactgagggccagatcatccctggagtgcacctctactaagattttatgaaaagatgacatgttgggctgcatgataaaagttaattataaaaattaaaagattttttttttgagatggaatattgctctgttgcccaggctggagtacagtggtcactgcaacctccatctccctggttcaagcaattctcctatgtcagcctcccaagtagctgggactatagtcacttgccaccatgcccggctaatttatttttagtagagatgaggtttcaccttgttggtcaggctggtctcaaactcctgacctcaggggatccacccgcctcggcctcccgaagtgctgggattataggcgtaagccaccatgcctggccaaaaattaaaagattttatgaaacgaaatggcttcccattctttctattcagcttctaagtgggctattcatttgggctctcctctttttttgttttgttttgcacttttgttcaatcatttggggaaatagcctggaggtctttcctgaatctgtttgtagacataataaaatttgtgtgctgtgtacacaaaaacataatgtatcttatgaaagcattacccaacctgtttgagttgagaatgatttggcccaccttagatttgaggctttagttggctgatttcc

SEQ ID NO: 64437 - DNA, 3886 bp, Homo sapiens
ttttttttggagacacaaaaagtcagagagactttatttaaatagagttaatttgaagtaaaccagagagttttgtgtgcagaagcattttgcttaacttagggccatcaccacattatgaactcgtgtgtgtgtgtgtgtgtgtgcacgcgcgcgtgcacaggctagtgtccttctgtgggtgtgtctgcgtgaggacccatccatgcatgtttgatctttatggcctccccctgtgcacctgcgcctatggataaggtatagtcttgtcttgattcccagtattcattctccttgaagaatcctgacagccttcagtcaccttcccttttccagtctcccaaaagcaatggcgccttaaatgtgcggtaaggatgaggtgagtcttgaggtagcctaggccacagctgccccttcaaggcaaggcctcagctgagttcaggaaataggagaacctggccccggagcaaccccagaagcgcaggaccacgaacgtcctgacccccagcagcaagaggccgcccagggccccaaagaagatgccgaagaacgcgtcgagtttcatgctcaggtgctcacagtgctcgccccaggccgtgtagatggagaaggacacacagctgcagcggggccctctgggcaggtgctggcactggccttcatggtcacagtagcccctactgcacggggacacgcaggtgaagccgctctgggggctgtagaccaggtcgtagcccttgtagccatcgcatctgaagtaagccttcagcgtgctcacgttcagggctgtcacatcgcgcacgtcttcctcggagatgggctggaagaccacgtcgttcctgggctcctcactcctccgtggaacgtggtataagaacgcctccaccaccgcggccagcagctggttgttcaggaagtcaatgaccgggccccgagggcggtactggaactccgagatgaccatccagtgttggatggggcttcccgaggccggtgctgcagaatcgattcgttccacttggctgttgcggagaaaggcccgcatgtccagggtccccagtctgtatgccaccgaggcgttgacctctgccatggaggcattttcctcttcactgagcaagagctggatgactcttaagggaagttctaggttgacagttggactgaagttgttcccagccaggaagcagcggctgtcagtgaaggctggggggcaggtgcacatgggctgacagcccagagtctgggagatgtagcagtggccttgattgtagcagtaattcacagggcaggactggttctgacacaggaaagagctccccagagccgcacagtgccgcccatccccagtcaggtttggagggcaggcctcgcagcccttcccaggaacgcagtggacactcgggaagcacggctcctcacaggcatcctcggagccctcgcagtagcggccgaaggtgcccccgtcacacttgcagccagccacctccagggaggagttgcccaccctgctggtctgattgtacaaacactggctctctgcattgcaatggcagaccacagtcctgggctggagtgcagatgccaagccaatcttggcacttcttgctagaatctccagagtgaatggctccagcgacttgggtgtccacagcaacgtcccattctcaaagagctccaagtcggtgcagctgtctctgagcgtgaagttggcatcctcagcattgctggtgtactgaatcagcgtggtctgccccttgtaggcttcaatcacacgaccaccattgatggagggcgggtactgattgagggtggcgttcgcctgctcgtagtttttactgacttccctcgtgtgaagtccgatgcttgcgttgcgcagggccagggtgtcatagatgcatgagctatctccgtcacagttggagatcaaatgttcagcccaggagctgtttttttgcagttgtgagtagaaaacaggggtgaagttggaaggcagctggtcattcctcttgccaaggaggcctgtcccgttgatctgccaggtcattccaaagtggaaaagcatctcctcagggctccctgggggaatggtggagccattgggcatcctgaagtcgtcctctggattgttattccagacccccaggagcccctccgtgcggttctggtactcgggcgggaggctggcggaggcgtggaggatgttggagagcgcgatcaccgagacggtggcccagccgtcgaagctggccgagacctcagagccgttgcggctcaggaggactccggtggcgttgaacgtctcctggcctccgccgtcttcatggtcaggctgaaatgtcacagtctggttatccagcaggacacggattgcgtcgtgaggctcaaggagccattggaccgtgacggggcccaggctgctggagcggtactgagccgcaaaggcgatgaagttggtggcctgggctgagccagtctgggcggtgcggccctgaagcaggaaggaggagttcccgtcttgggccccgaccagcagaaagtcccccagcccattgaaggtgtaactgacaccatccaaggtggtgatgtgggggtccccgaacatccaggcgggctgtgggggcctgtatgtagcacagcccacgtggggccgcctctgctggtacagggcacagaggtagggcttgtcattccagcggcagcaccagctctgtggctccagttcctgggccaactgccaaggacgctgcacgtgccagccttcacgaaactctccccagggcccgtagctgcagcacacgcctcctcgccaagaggtgaagctgcacagctgcctactgccgaggccccagcgacctatgctgacgggttggaatcgtaagtcccgtcgtccctgctgccaggaccaagggcaggagacctggttccagccccagctgggccaccgaggctggctcttcagccactgcaggcactcgagacggtagttgggcctttcttcccggtgtagcctgtagaactgcagcccttggaggcctgagttggaattcaggaatctatcagggcgatacctctcccacactggctgggacatcagtgggctgttttcgaaatagccatctccactagagaagcccatgagcaccgggttgcctgagcgctgggccacgtcccactgcatcccaccgctctggtagagaaacagggcataggacctgctcccgtccgtggagaggatggcttggtaggtgttgctcccgagggtccactgggcaggataggcgtgggcattgacccacgtgacctttagggcccacctggccttgtagcccccgttgtttgtgatctttctaatccaagactcggcctgctggactagcaggctgtgttcaccatagaacgtctcgtattcctgataaaatgtggtcccccgaccagtggagaagtcagcatcgtcccagaacggagccaccagggccacagggtcccggcctgtgaagcctgttgggagtgggttggggtaggagaaaatctggtagtctgactctgggaagatgatctggccattgtctgtgaagtagagggaatcacggagagaggagccaagggggaagccagtcgccggcttgaagagtggggaggtgaagtccacggtcctcctgacgaactccaggtccccggcgtctgccccataggggaagagggaaactcctctctcaggcaggatggggatgggggcagctgtggagcgggtgtgcatggcagtgctgggaatggtggaaatgatggtctgggaggttgtggggggtggtgatgtggctgtgcgtctcccaccgtctgtcttcagtgacggtgttgtcattcctgatgtttccatcttcagagg

SEQ ID NO: 64438 - DNA, 1543 bp, Homo sapiens
ccgtgtggtggaattcaaaactggcaaagatgtggccacccaaatactagaaggagagctctttgactttgatcttgaagttaaaccagtgttagaagttttggtggggaagacaattgagcagtctcttctggaagtaatggaagaagaagagctggctaacctgcgggccagtcagcgtgagtatgaagaactacggaatagtgaacgtgctgaagttcaacgacttgaagagcaagagaggcgacaccgagaagaaaaagaacggcgtaagaaacagcagtgggaaataatgcacaagcacaacgagacatcacaaaaaatcgccgcccgagcatttgcacagcgttacctggctgaccttctcccgtctgtttttggcagcctcagggatagtggctacttttatgatcccattgaaagagatattgagataggatttcttccatggctaatgaatgaagttgaaaaaaccatggaatatagcatggtgggaagaacagtgcttgacatgttgatccgtgaggtggttgaaaagaggctgtgtatgtatgagcatggggaagacacacatcagtctccagaacccgaggatgagcctggtggtcctggagcaatgacagagtcactggaggcctctgaattcctggagcagagcatgtcacagacacgggagctgcttttagatggaggctacctacaaagaacaacatatgacagaaggtcatcccaggaaaggaagtttatggaagagagagaactcttagggcaagatgaagaaacagcaatgaggaagtccttaggggaggaagaattgtcataggagggaagcttcaaagtcatgaaaccaatcaacagccaagtcagcaagcaatcaggtaatgatgtgcgagtcccctcaggttatagaaattatgttgtatttagtcagtatgtctttttgtgtaatggactgggccaatcaaatgtgataaaattaatttgagaatgaaacttaaattgaattcatttatttaatagaatattcaaaggctatattgtaattctaatgagaattatatttaattactagctttctattaccattatatgtaaccagcaaatatatttttccttagcccttctaattttgcgggttagttttttttagtaagtatgatatttaatgttcaatatcagtgctgtcagccatatagcttttcttctctataggaaaaactatttcacctactgtaagagtgaatgcctagccaggcgtgggtggctcacacctggtaaatcccagcactttgggaggctgaggcgggcagatcacctgaagtcaggagttcaagaccagcctgaccaacatggagaaacttcatctctactaaaaatacaaaatttggtgggggggggggcgcatgcctgtaatcccagctactcgggagggtgaggcaggagaatttcttgaacccgggaggcggaggttgcggtgagccaagtttgcaccattgccctccagcctgggcaacaaaagggaaactccctttcaaaaaaaaaa

SEQ ID NO: 64439 - DNA, 2279 bp, Homo sapiens
tttttttttttttgattttaagtcctttaatttattttgaatatcagtaattacattttcaaaatatgatataatttaaaggtatcagtaccataaatctgtatcttacagtaggaaatgtaagagtaaacagcctatatacactttgtactactgacacaattttatgtatacaactctatacagtatctactaatctccagaaaacccacctacaatccatctgtctgggactgtgggcaagtgggttctttctgagatcagggtctcactctgtcacccaggttgcactgcagtagtgcaatcatggctcactgtagccttgacctcctgggctcaagtaatcctcccatctttgcctcctgagtagctgggactacaggtacacaccaccatgtctggatacattttgtatttttggtagacaccgggtttcaccatgttgcccaggctggcctcaaactcctgggctcaagtgatctgcctgtcttggcctcccatcgtgctgggattagaggcatgagcgactgtgccaggctgactgtggacaagttttacaaataaaccaaaataaaaatattctcacttttcagctgcacatggtggaaatgtacatgtatgatgacaaagtcggagatatttattacgctgaagacatttaactttgttccatgccagccatgagtgacaacgctagagattccaaatggggaaaggatcctctacagacggctttgtttaaaatggttacaagaaacatatggcagtttttaaaatcagattccattttctctatagattccattcgccaagtgcccaggcctgcctgccaaccgtctgcaaacatgagagccaagttcaacaccttcatgatagcttctttcacaaagctgaccttttctctcagcagacaccggtcatggatggttgacagatacctatagtgaattttaatcaattgatctaaatccttggcttcctcgacttgatgttgaaactccagccctgtactgtgtagaatcctggtcatgatgtagttgtgcaagctgttcacgaaatgcatgagcttcactcttaagaggaacatgcgatgaatctgctgtcttactggttctttttgtggtccgaactgagcaactgtgtcttgttcatgtataaggccttctttaagtcgtggtttttctgcagtactaaccagttcaccaaaaagtaaaacatccagactatattttgcccactttatttgcaataagagaagaaacacttgattataaattttttgacattccaaacttataacaatgtccacgggccatgggaccttgtagctgagggtcagaccatctaagatatgaacaggcagcttcttcttagctgtgtcaacattttcaaaagatatagatagacgtgaactatcttcaggataacgctgtcctactgcttcttggagttggacattaagaaaagacacattctgccatgtttccttttctcttattttatcaaaaattgacgtgtagaagtcatacatggtatctcctccttccattaagaaaaaattcctcatagcttgcaagtattctaccaacctgtaatctttttttagagtttgcatgagatttccacagcaatctagatactgcttgtcaatatgaggatagaggcaggatctcagcgttaattcaaaagtctggcatgtcacagattccgatgatctatccacacatacatcaccaccagcaaacttctcgtgaaagtcactctgctccaaatacatccttgcaaagttaatggcaagcagtggatcatgaacatcatccagttcaagatggctttcagcaatggactgcatcttcatcaggttctccttggttgcctgttgctcagtaagaacctgtggagtggaatcttctccatgtcgaagacgggactgtacagattccagaaagagagtgtataaactttttctttctgcatctctggctcctgcctggcaggtggtgctctccgcacactgcaggttcttcagcagctgcatcgacttgccagccattatgatctgcttcaggacaggtttgaggaaggacaccatggtgtgctgcctgctggagggcccctggtcactgccggaactcgcactagcgttatcactcattttttcttcattttctgtcttttctgatacgctatataacgtgtaagttgcataccagaagtctctgtgattaactggaacatttttgtttctctggatgatgaactccctggcgccatcccac

SEQ ID NO: 64440 - DNA, 646 bp, Homo sapiens
cgttggacttggattatcaaaagtggagcagttccagctatccatttccacggaagtcaagaaaagtattgacataccttgcaagatatcgagcacaaggtttgaaacagatgtcattcactggtaccggcagaaaccaaatcaggctttggagcacctgatctatattgtctcaacaaaatccgcagctcgacgcagcatgggtaagacaagcaacaaagtggaggcaagaaagaattctcaaactctcacttcaatccttaccatcaagtccgtagagaaagaagacatggccgtttactactgtgctgcgtgggattacaccatactagaactgttgaaacaacatgcacaaaatcccctcccagggtctgtgcccaccacatccttcccaacaggggcaaccacagccagtccccagctgggctcccagactcaggctcgccttctctgaggctcttccggggctttccaggaagctgttatgggttataccttcgttcccacctgatcccaggacttgtgctccagaatctttatttgacactgtttcttaatgcattaaagacttgtctggggactgagagaacataggtcgtgccactgtccatcatatcaccacctagagacttccagtaagtagcaa

SEQ ID NO: 64441 - DNA, 1035 bp, Homo sapiens
catattcaaaccatctttatttacaaaatactatcctgagaactattattccattaaacttcaatttgagcaaaagtgcaatcacttaagtaatagcagttacttaaactgaaaatgagatcagtcaaaattacttttgaagaaagcaacaatattgtcaggtttcttgctgtggttctggatgtccagtagcaggctcctttgaaggcggaatcaatcctgaagggaactcgcttctacctttagaatgtggggttggggtaaaatccaggtctcggatgaaggtaaggaggtaaacccctcggtggatagatgtttctcattgcaaatggagcatgtggtggacctgggaaatcccttggtggaaaataacctcgagaagctccaaacatggttcctggaggaggtggggggaaaggaggtcctcttctcatgaacgggccccttgtatccactggaaacaatggaccgctgattggagcaagaggtggaggaataaggccagggccagttgcttcattttcagcagggagagatgaatcaggcacatttaaattaccaagatcatctttggcatcatttctactggattccatttctgaaggcattgacctatccattttatccaaagaagtcattttaaaacttctgggttctgctggtccagacagtctttcagaattagaataaaatctgtcttccctttgtggaggaagagttgaatcaggatatgattgccctggtggaggaaacatcatcctacggtcctgttccaccggagatgacagggacccagtgtcagaaggagccctgtgaggatcgattaacctgtcatagcttggttctcctctttcattggtaatctgatggtccaggggattccctgggctgcttgggcctcttcctcctccccctggaagcacaggtgagagtctgagtggatcctccaacaaagtttgaggagagggaaaagctctcgtttcagatgaaggccgacccaatggtgagggactacatggggaatgctctcgtgcc

SEQ ID NO: 64442 - DNA, 572 bp, Homo sapiens
tttttgggctccgggacccccgggagtgggagcggcagtcggggacgcctcaactcgttcactcagggaatcctgcccatcgccttctccaggccgacttcgcagaactactgctccctggagcagccaggccagggcggcagcaccagcgccttcgagcagctgcagaggtcccgacggcgcctcatctcccagagatcttccttggagaccctggaagatattgaggagaacgcccctctccggagatgtcgaactctctcaggttcacccagaccaaagaattttaagaagattcattttatcaagaacatgcggcaacacgataccaggaatggcagaatagtccttatcagtggcagaagatccttctgtagtatattttcagtgctgccgtatcgcgacagtacccaagtcgggtatgtatatgcatgcatgctttgtagttctctgggtgaaaagatctcacaccaatgtacataatgtggccatcctttccattttcaagaagttgccttgctttgatactgcaaattcagtatttgtacactggaatgataaaaagatgttcc

SEQ ID NO: 64443 - DNA, 881 bp, Homo sapiens
cgcgtgggggttttatatggacctttggaaggctgtttatttacccaatggaagaaatccttcatttctgatttcgagctggcatcgtgacacatttggacctcagaaagactcttctcaagttgaggagggggatgatgttcttgacaaattacttgaaaacattggccatacaagtcctgaatgccttttaccgtcacagctaaatctaaatgaaccttccctaaccccatgtggcatgaactatgaccaagagaaggaaatcattgaggtcattttgcgccaaaatgctcaagaggatgagtatatccagagtcataacttcgattctgcaatgaaagtcaccagccaagggcagccctccccagtggagcctcgaggacccttttatttctgcaggttattgcttgatgacttgggaatgaattcttgggacagaaggaagaattttcatctattgaagaaaaattcaaaattattgagagagctgaaaaatttggactcccgccagtgccgtgagacacacaaaatcgcagtgttttacattgctgaaggtcaagaagacaagtgttcaatcctctctaatgaaagaggaagccaagcatatgaagactttgttgctggacttggatgggaggtaatgcatttcattcaggaggtgtttattgaccagcactgtttaaagatgtgtccaaactagacattgtgtaagtttttacatgtgcttttgcattcaaatatagcatagatagagttctggaattgaagaatttattggatttgacatctgttagttgcttgtcagtatttaatacatgaacttttgttttcctttaactttcctcttaatattttttcatttgctttttatcagaactgaa

SEQ ID NO: 64444 - DNA, 2962 bp, Homo sapiens
tttgggaggctgaggatgtcagtgggggaggacccgcacgttcttacccagttggaggcctttgttactatctttctcctcctgagtccatgggcgccatctttgaggatcctgtccatgtcgttgtttatatcatcttcatgttggggtcatgtgcattcttctctaagacatggattgaagtgtctggttcctcagccaaagatgtagctaaacagctgaaagaacagcagatggtaatgaggggccaccgagatacctctatggttcatgagcttaataggtacatccccaccgcagctgcgtttggcggtttgtgcattggcgccctgtcagtgctggctgacttcctgggggccattggatctggcactggaattctgctagcagtcactattatttaccagtattttgaaatatttgttaaagaacaggccgaagttggtgggatgggtgctttgtttttctaaatgttcaaatatttcattttgtgcgtgtgaaagggaaaacactttgacggatcgtttttgtcagatgacactggtggctccccttttctcccctcacagtttcttgtttcgagtgctgactgacccgtttctgaaatgggcaccgagctaagtctgtgtgcagcattagtacccgctgccttaaaactcaagtttacattattcattaaaaaaagtacatctagtgttgcctgtaatgctggaaaccagtgtatctaccttgctgtgttaaatcatgacagtgagacggtgagatggattcgttttgcacacaacattcaaaacacttcatattgcccccacttgttgaaaaataaatgtagttcaaattgccactttccagtatttttgagcttatttaatgagttctggaacatttatatctaatctatattttagataattactttttatacttttttaactcatggtatccccactccccacccccacctcatttttatttgtcccttctcaaagcagccacttagcccacatgggcgaaatcaagtctccagttatttctgccacaactgcttctaaggcctcctccttctcctcctcctcttcctcttcctccttttccttctcctcctcctctcttcccagtgacagcatcatcgtgctgtttgcctgtattggctatgccttctaactccaaccagtcacttgagaatattctttcaagattctgggccccgattcttttctgtttaaatccctaaagcaaagatctaattctcaagcaatgtctgtagttcagtgggggtgaacaatgaatatattcatgctaggaatttgtgtctgttgttgtactcacagcagcaacatgagtgtaaacagtagacaataaacttttatttaagaaaactgattcagttgtgttggaaaaaataaagaaatctgatattaaacgttttctaagatcatttgtataggttcagtgtattcataagaagtccaccctgagatgcctgtaaaagtcaaatgtaattacacttcaaactttaatcctaaattattgacagatagatagatagtgaccaacttaagggtaatcatatatgtgactaacatttgggaggaaacaggaaaacagtggtctcaaaacaacaatatcccagtctccatttgaaagagcatagatcttggtaaatcattttgaaaactatgtgctttatttcccaaaagatcaaacttaatttttaaaagacacccttttcagaagtatgggttttcattgctgtttagtttcttaggtgtggtatgtcttacgtagcttatgcttacaaagccaaataatcgcagggcaaggcagataaaggcaggcaggatagtgacagtggctcggtgagcatccgccaagggcctcagaccactgttaccataaaaacatccacccagtgttatgacgtccgatttttttttcccttaagaaggtggaaatatggcttttaatacataggaaaccttcagtttttaaatgcagggcaaataaacatttttaaacagtgccagccagactgccagttctcaaacagactgaatttccaaagcacaaccttttcatgtttataaaaaatagaaatggcatttagggatacattctaggatttggctctgacttctaagttgcactcttaggaagaaggagaggataagcttaggtcagctgcagaggtcattcccatggggagtggctggggaggaactgggctatgtggaaagactgggctgcgcccgtctacggatgccttctctcttgatttcaatgattgatagcatgtggctttcagacctaaggaagagttagagctttggagaatcacaatgcctgtgattgaaatcaggatttaaaaaagggttagaggcataggggaaggctaccattacaggaagtagttggatcttaattttcacatgtatagggctagacagcttcatctgtaaagttctgtatttccataattgttttatctttaggaagtccagtgtaaagatcttacagtttcactcataaaaatatcctgggctcagacagtgagcctgtggacaaacggaggctactgcagcattctggcattagcactctgattttatctggagagccctttcatatggttctcagggcctggcttacccgctggagccaggctagaaacatgacttagggctggatgagaatcatcctgagaattccgtgggggccagactggaaagtcctggaaaatcatggagctgctggaggccctaaaagtcaacacaaaaagagctaaactcactcaagaagctaagaaaatggcccaggaacactggtagaactgctagatgacagggtttcaggcatgggaaccagatcaatctgtacttcttgctgtgaactactctgtattgggtttcaggtactggctgatcttgctggttctgttcatggtttaacatcaactcgtgcc

SEQ ID NO: 64445 - DNA, 3429 bp, Homo sapiens
  misc_feature (1)...(3429): n = a,t,c or g
ccgtgtaccaggtgctgctagtgggaagcacgctgctgaaggaagtgccttccgggctgcagctggagcagttgccttctcagagcctgctgacccacatcccaacggcggggctgcccacttcgctaggaggaggcctgccttactgccaccaggcctggctggatttccgaaggcggctggaagctctactacagaactgccaggcagcttgtgccctgctccagggggccatcgaaagtgtgaaggctgtgccccagcccatggagcctggggaggtcggtcagctgctacagcagacagaggtcctgatgcagcaggtgctagactcgccatggctggcatggctacaatgccaggggggccgggagctgacatggctgaagcaagaggtcccagaggtgaccctgagcccagactacaggacggcaatggacaaggctgacgagctatatgaccgggtggatggattgctgcaccaactgaccctgcagagcaaccagcgaatacaggccctagagttggtccaaacactggaggcccgggaaagcggactgcaccagattgaagtgtggctgcagcaggtgggctggccagcactggaggaggctggggagccctcgctggacatgctgctccaggcccaaggctcttttcaggagctgtaccaggttgcccaggagcaggtcaggcaaggggagaagtttctgcagccgctgactggctgggaggcggctgaactggacccccctggggcacgctttctggccctgcgagcccagctgactgaattctctagggctttggcccagcggtgccagcggctggcggatgctgagaggctgtttcagctcttcagggaggccttgacgtgggctgaggaggggcagcgagtgttggcagagctggagcaggaacgcccgggggttgtgttgcagcagctgcagctgcactggaccaggcaccctgacttgcctcctgcccacttccgaaagatgtgggctctggccacggggctgggctcagaggccatccgccaggagtgccgctgggcctgggcgcggtgccaggacacctggctggccctggaccaaaagcttgaggcttcactgaagctaccaccggtgggcagcacagctagcctgtgtgtcagccaggtccccgctgcacctgcccaccctcccctgaggaaggcctacagcttcgatcggaatctggggcagagtctcagtgaacctgcctgccactgccaccatgcggccactattgctgcctgccgcagaccagaggctggaggaggtgccctgccccaggcatcccctactgtgcctccaccaggcagctctgaccccaggagcctcaacaggctacagctggtgctggcagagatggtggccacggagcgggagtatgtccgggctctagagtacactatggagaactatttccccgagctggatcgccccgatgtgccccagggcctccgcggtcagcgtgcccacctctttggcaacctggagaagctgcgggacttccactgccacttcttcctgcgtgagctggaggcttgcacccggcacccaccacgagtggcctatgccttcctgcgccatagggtgcagtttgggatgtacgcgctctacagcaagaataagcctcgctccgatgccctgatgtcaagctatgggcacaccttcttcaaggacaagcagcaagcactgggggaccacctggacctggcctcctacctgctaaagcccatccagcgcatgggcaagtacgcactgctgctgcaggagctggcacgggcctgcgggggccccacgcaggagctcagtgcgctgcgggaggcccagagccttgtgcacttccagctgcggcacggaaacgacctgctggccatggacgccatccagggctgtgatgttaacctcaaggaacaggggcagctggtgcgacaggatgagtttgtggtgcgcactgggcgccacaagtccgtgcgccgcatcttcctttttgaggagctgctgctcttcagcaagcctcgccatgggcccacaggggttgacacatttgcctacaagcgctccttcaagatggcagaccttggtctcactgagtgctgtgggaacagcaacctgcgcttcgagatctggttccgccgccgcaaggccagggacacctttgtgctgcaggcctccagcctggctatcaagcaggcctggacagctgacatctcccacctgctttggaggcaggccgtccacaacaaggaggtgcgcatggctgagatggtgtccatgggtgtggggaacaaggccttccgagacattgctcccagcgaggaagccatcaacgaccgcaccgtcaactatgtcctgaagtgccgagaagttcgctctcgggcgtccattgccgtagccccgtttgaccatgacagcctctacctgggggcctcgaactcccttcctggagaccctgcctcttgctctgttctggggtccctcaacctgcacctgtacagagacccagctcttctgggtctccgctgtcccctgtatcccagcttcccagaggaagcagcactggaggctgaggcagagctgggcggccagccctctttgactgctgaggactcagagatctcgtcccaatgcccatcagccagtggctccagtggctctgacagcagctgtgtgtcagggcaggccctgggtaggggcctggaggacttaccctgtgtctgagcccgggactggacgagcagtagatccagcagcctgcagctccaaggaacattgcctctctggatctgctgtgaccagggtgtggctgacacctgggctacctccaacctacatgtgcaacgctgttgactaccctttctgatgtgtgtggccattggactaactggcacggggcctctctagggaagtctggttgtagagcctgaataggctcctggccccatgaccccttctccctgtccccagctcccaatcccagtttgtgggttaagaataggcttagagccagacattgggtgttttccatgctgtaggctggtgggggacccatgtgcctctaaggcaagtgactagggtgcccccacccctcaggaagaacacaggtgggctcctagcagctgatccccaatgcctggccttaaagccgagctcagttaccatagggacaggtccacctctactggggccntcatgcttgcctttcgctggcccccaggcccagcccctttttactggggcagtttcgttattttgacttgatgccttttgaataactttcaatagaattgtctaaaattatcttactggttgttaggcctttggtgtctcagagaaggagtctaggtctttgatgtgtgatttaatcttttatttgtttataataaaaaatagactgatttgt

SEQ ID NO: 64446 - DNA, 467 bp, Homo sapiens
attattagtacagtgcggtggaattcctaccccattcccatattccagatcctgtgtatcgatgaggccacagcaagtgtggaccagaagacagaccagctgctccagcagaccatctgcaaacgctttgccaacaagacagtgctgaccattgcccataggtatgtaaacgcctggtaacagcctaatcagggactgtggtagcatgcaccgagagcctccgttgctttcagggaccccagtggtcagggccttagagatcctgcccccccagatctcagctcctccttctccagggacgagaagggtcctttatagcactgcctagggccctttatagcacattatctgagggccctttatagcactgcctagggccctttatagcacattatctgagggactctgcagtcccttccccagcaccaagccaggggctaaagcctgtggggacagacctgtggtgt

SEQ ID NO: 64447 - DNA, 1229 bp, Homo sapiens
gagaagcagagctgtaagagctgtggtgagacctttaactccatcaccaagaggaggcatcactgcaagctgtgtggggcggtcatctgtgggaagtgctccgagttcaaggccgagaacagccggcagagccgtgtctgcagagattgtttcctgacacagccagtggcccctgagagcacagagaagacacccactgcagacccccagcccagcctgctctgcggccccctgcggctgtcagagagcggtgagacctggagcgaggtgtgggccgccatccccatgtcagatccccaggtgctgcacctgcagggaggcagccaggacggccggctgccccgcaccatccctctccccagctgcaaactgagtgtgccggaccctgaggagaggctggactcggggcatgtgtggaagctgcagtgggccaagcagtcctggtacctgagcgcctcctccgcagagctgcagcagcagtggctggaaaccctaagcactgctgcccatggggacacggcccaggacagcccgggggccctgcagcttcaggtccctatgggcgcagctgctccgtgagctgagtctcccactgccctgcacaccaccacattggacctgtgctgtcctgggaggtggtgttggaggccccatgaagagcgccctggactgctgagggtgggccaacagcccagagctcaggacacttggctttggggggaaggaaactgaggcccagagaggggcaaccactggccaagggtcacccagcaagttttggctaagagcctggcctccagccccagcagtgtggcccagagcaggggccgactgccaaagtaaccatcatccatatgggccgtgtggtgatgctggcccggaaggcagaaagaggcagcatgggcactgccagggacagccacatcctgctggtctgcagcgtggtccaccccgcctctgcccagcctgtctacaccgtgtgagctgaatcgtgacttgcttcccacctcctttctctgtcctctcctgaggttctgcctgcagcccccaggaggtgggcctgccccatcctagctggactcatggttcctaaataaccacgctcagaagctctgctaggacttaccccagccactgagtggcaggcgcatgagatttgtggctgttcctgatgctagtggcacacagtgcttatctgcataaataaacactggccaccaaaaaaaaaa

SEQ ID NO: 64448 - DNA, 525 bp, Homo sapiens
ataggggaggcgtgggcacttgtagttgtcttaggactgatgtctgaattaactaagggaacttgtctggtttgcagagtgctgatggcagagattggtgaggatttggataaatctgatgtgtcctcattaattttcctcatgaaggattacatgggccgaggcaagataagcaaggagaaggtgagttttcttcttttggttcatggccccaggagcctatcagaagtgggagctactcttgttgatacagagagagggaagcaggcagtctgccgccactatagtgggagtcagacatctcaggtggcttttaaacaacatgaatgggaagagaattggtttatgaattgaagaaataggattataacatcttctggtgtgggcttggatggttctttcatccttggaatttatccttgtttctgtaaaattcataggtctggctcatatgagcttccctccctggcttgatggggatgtggggaagacatcccatctgcttgtgctgagggaaaacaggag

SEQ ID NO: 64449 - DNA, 1065 bp, Homo sapiens
ttttcacacatataaacaagtttattagattgtcagtgatactttgagacaaattcaagttatttcattttacttcatataaacagaggaagggaggaaagttttaaacttcaagctttgttcagcatgtgtgcagttagcatccacaaaagcaccattgggtatgggagaattagcaccacagaattttaggacctaactgttaacatgcatcactgaaaaacttggaacataaaaactgaagtagtacgtggtatggtctattataaacaatacaaggcaatttatgatttgttctcatacagtacaatacaatcacaataaatgagaaccttttaagaacaatacgggacaaaaaccaccttgcaccctgttaacactaaagcagttacagatttaaaaaaatgtttctggtaagaggcagtgggttgaaattatccctcccccctcaatttttaaattcagagttatatagttacatgatctcttaagaaagtattttcaaatctatatgtctctctacctcaaggctgacaaatggtggtttgaaaacgaaaggcttgatgaattaaaaaaaacaaaacccaaaaactggatagagtcgaaaggtacttcaatgtggtggaaattattcaacataagatcagtttggaaatgatgccagtggtgttgatacttgtcttcccttccgtggaggaatgtcaagtactgaggccttgcattcatgatgaacttcagttcatttctttcaccgaatgcctttattctgaggtgtaacataagagatttattccttattcctcaactgtttttgtagtatcatggggctgttccttatgcttgatttgacaacagtgaaaaaggttgatattctctctggatttggggtaatttgtgagcttcaggaaaattccatatttattagagcccacatcaaagtagaaccttttattgtccactctgaaagaagtcccctctgggagttcaagcgggtcatcgtctccacctcttcgttcttgtatgtctccttcgccatagtcttcaatcaaaaaaaccaaggcatca

SEQ ID NO: 64450 - DNA, 2398 bp, Homo sapiens
ttttttttttttagattatgtatatgaaaactaatttattaaacctctgtacacaaagatgaacatacctgtatagcaagcatatatgaaggatgaagttacaaaaaagtaaaagtattactaaaattgacacatgtaaatcacttacaaaaataccccaaatgggataaagctgctcatccctgatttttctcatttggttgtaggagttgaaacatgaatttaaaatggtagaattttttcttttaaaaagtgatatattaaacttatatacaggataattagcaaaatgtagaaagggaaaacaatgtacaaaagacagataaaaaccatcactctcgacggatagtcacaatccaaaaatagtataaaccttaacaaaccctctctaaaccaggtcatattcacatctccccccaagttttgtcagtgagaataaaatatactgaactagtgagctcagtctttctttaaaataggcttgactttggaacatgaaccttggatagatttttaaacatgggagggacaaacaggaaaaccattctatctatccacttaattagtactaattaacggaacaaagttattaaatagctctcagtgctaagtcaagccattattcagaggcctttttgtttttctgctggtttcggggtgagttctttaacaagcttcttatcctgaggtacattccagtagattctgccatattctcaaattcaaatggcgtgattccagttgcaaatttgctcatgtcaggtatagggctatgaattttagtggccgttgaaggactggtgtctgcaggaaagagcttctggctgcccccattgctgatgtcacagtttggtacgacactgccattatcaagaagggcaccttcagtgtttaccggagccaactctgctttttccttctgacaaagtgatgtcacctcagagtctggactggaggcatgtccagcttctgatttctttgtaaaaatctctggtacctcaggctcatccagcgtctgcttttcagatgtttttccctccgggacagggaggtctagctcatttggacaaggtgatgaggcaacggaattgcccagttaaaggtgtgtcccacaggaacgtcggaagtcgctgttttacgctcctcggcctgctcaagagctgccccagatccgcctctgctgttccttcccagttcttctagagtcagtgcgtcctcatcccacagctccagatgctgttctggtctggggtgagtcactgggagtcagcggcggggtgccctttgggagtggaggggtgaagacgggtggaggagttccccgggggagtggaggagtgtcaggaggtaatggtggttgaaactgaaaactttcgctgctctgagaaccatgtggtacctccatatctgaatcgagctccatgtcggcgggagatcccgctgagttgctttcattcttctgcttctttggactacctgggctagagtgagatgaagacctcttgttgccagacttcacacctggcgcttggaagttagaagtaaggtaattggcaaacacatccttctgctgacatgcctgcattggtatggaaccaaagatcctccattcgtctggaattcctctgggagtagatatattaaaaccaggatagttgaccaattttgagagatcgtaagtgacacttttattctgttgtatttctccaacttctgtttccccatcagtgccatcttttccatcatagagtgcaagccccgaattctccaattcagcctctttgagccaccctggtgggtaccctagctggcgcatccgatagataaaaggtggaagactcttgtctgtcacacctagtgcatcttgaagttcctcactaataactcctggcttgaatcttccaaatctttcttctacttcttctgcgtggtatcgctgctggaaattctgattgtttgcttctccacaggcatccatatactcttttctcttttcacttattcgagcagcattccgaggcattgggcaatctttcatttggtgttcttcagaaccacaattgagacagtgaggctttggcactgaaagcttccttgttgtttttaatggcacaggactcttccactttgtggtcctcctctagcacaatactggatggtttgaaatagcattgttcatgaatagaatctgtaatataggtccatctaacttagtatcgttcaccaatattccactcggtcgagtcagaatgctcaattttcgtttaagttcttgattctcggcgcggagctgctcgatggtctcctcgcactgccgaagccgctcccgtagctccgcgtcgccgaccccattttcgtcctcctagtcgccgtcgtcgtccttgaagcgagtacgaaa

SEQ ID NO: 64451 - DNA, 778 bp, Homo sapiens
ttgctgccgtttaaagctgcttcagaattcatcctagggaagagtgagctgggacaagaaaccaccccttctttcaatgcaatggtcgtgaacaacctgaccctccagattgtccagggccacattgaatggcagacggcagatgtaattgttaattctgtaaacccacatgatattacagttggacctgtggcaaagtcaattctacaacaagcaggagttgaaatgaaatcggaatttcttgccacaaaggctaaacagtttcaacggtcccagttggtactggtcacaaaaggatttaacttgttctgtaaatatatataccatgtactgtggcattcagaatttcctaaacctcagatattaaaacatgcaatgaaggagtgtttggaaaaatgcattgagcaaaatataacttccatttcctttcctgcccttgggactggaaacatggaaataaagaaggaaacagcagcagagattttgtttgatgaagttttaacatttgccaaagaccatgtaaaacaccagttaactgtaaaatttgtgatctttccaacagatttggagatatataaggctttcagttctgaaatggcaaagaggtccaagatgctgagtttgaacaattacagtgtcccccagtcaaccagagaggagaaaagagaaaatgggcttgaagctagatctcctgccatcaatctgatgggattcaacgtggaagagatgtgtaaggcccacgcatggatccaaagaatcctgagtctccagaacgaaa

SEQ ID NO: 64452 - DNA, 1824 bp, Homo sapiens
  misc_feature (1)...(1824): n = a,t,c or g
ccagagacaccacctggaggtgcaccagcgcagccacactggggagaagccctacaagtgcggggactgctggaagagcttcagccgcaggcagcacctgcaggtgcaccggaggacgcacaccggggagaagccctacacctgcgagtgtggcaagagcttcagcaggaatgccaatctggcggtgcaccggcgtgcccacactggcgagaagccatatgggtgccaggtgtgcgggaagcggttcagcaaaggggagcggctggtccgacaccagagaatccatacaggggagaagccctaccactgtcctgcctgcgggcgaagcttcaaccagaggtccatcctcaaccggcaccagaagacccagcaccgccaggagccgctggtgcagtgagcatagcaggtggcaggcagcaccatcattcatctttctcactgcagggccttgcggggtgcaaggtgatggctgcaggaaagcactggtcccatcgccttcccacccattcgccaacgcgggaaaggcaaggcctggcttacttagagcttccagagagcatagctgcctccatctcttacccaagtggtgctaaacaatttttcttccaatgtttgagggaagcagtctcctgcggttcagttcaggctgagattttctccttcagtggactgtctgtgtccccctgccgaacaaagctgggagtaaaggcaaaaccttgacacgtgttggtagctgggacctcatcttcctgagggctctgtcttgcctgcagggtcatagctcagactcttcccccaccccctctcttttccattgaacaaacatttattgaacatcctctgagcacctggccgtgggaatgccgtggtgaatgagagactagacgtgatgcctctgggggttgtgcgttggggatgcatgcgacagcccatgacccgaggcattctcagggtatctgtgctgtgtgcccgtgagaacatcttcccatgaccactcctgccctcctgccccgtgctggatcttccctccccagctgggatctgctcccaggcaactgtgtgaattttacattatttggagcctcatctgtgtcaggctataacattctatcctcatctgtaaaacttccccgtccattattccttgcactataacaactgtcaacacaccaactattaggaagttagtattttgctattgatcactgaataaacatcagagtattttaaaaaacagttctctagaaagaactgttataattaaaatgagtctgaaagatgaactctagtattaatgccctatatttgatggcactttatagttcataaaattaatttcaccccattctcattggacccatttcccaagtatttattgaggccctgtaacaaacatgtcaggaactcttctgggtgcttgagacacatccatgaataaaatagggggagaagctgttgacctcgtaaagcttatgtctcgtggatgtacctgatcttcagaacccgtggatattcctgcaaatcctctgggcctgtattcattgctttgtcagcatcttgccctgaaatgcatttgtcacctacctcttgttactaaatggtctctgccctccagacccttgtcatccaaggcactaggggtcctggacacccactggggatgatgagctggtagcnacctgttttgcatgagtgccaagtcaggaaaaataaagatatttgtaggcattaaaaaaaaatacatttctttaaaaatcgagaagatgcaatatttgtaaactgttgaagcttccttattgtgccatcacttaagggtttcatttc

SEQ ID NO: 64453 - DNA, 2399 bp, Homo sapiens
cttcaatacagtttttagataatgcatttaggaaaaggtggcaaactctcctctcagttgatgaccttgtggagaaactggtcaagaggctggagttcactggggagctcaacaacacttacatcttctatacctcagacaatggctatcacacaggacagttttccttgccaatagacaagagacagctgtatgagtttgatatcaaagttccactgttggttcgaggacctgggatcaaaccaaatcagacaagcaagatgctggttgccaacattgacttgggtcctactattttggacattgctggctacgacctaaataagacacagatggatgggatgtccttattgcccattttgagaggtgccagtaacttgacctggcgatcagatgtcctggtggaataccaaggagaaggccgtaacgtcactgacccaacatgcccttccctgagtcctggcgtatctcaatgcttcccagactgtgtatgtgaagatgcttataacaatacctatgcctgtgtgaggacaatgtcagcattgtggaatttgcagtattgcgagtttgatgaccaggaggtgtttgtagaagtctataatctgactgcagacccagaccagatcactaacattgctaaaaccatagacccagagcttttaggaaagatgaactatcggttaatgatgttacagtcctgttctgggccaacctgtcgcactccaggggtttttgaccccggatacaggtttgacccccgtctcatgttcagcaatcgcggcagtgtcaggactcgaagattttccaaacatcttctgtagcgacctcacacagcctctgcagatggatccctgcacgccctctttctgatgaagtgattgtagtaggtgtctgtagcctagtcttcaagaccacaccctggaagagtttctgggctggctttaagtcctgtttgaaaaagcaacccagtcagctgacttcctcgtgcaatgtgttaaactgtgaactctgcccatgtgtcaggagtggctgtctctggtctcttcctttagctgacaaggacactcctgaggtctttgttctcactgtattctttttatcctggggccacagttcttgattattcctcttgtggttaaagactgaatttgtaaacccattcagataaatggcagtactttaggacacacacaaacacacagatacaccttttgatatgtaagcttgacctaaagtcaaaggacctgtgtagcatttcagattgagcacttcactatcaaaaatactaacatcacatggcttgaagagtaaccatcagagctgaatcatccaagtaagaacaagtaccattgttgattgataagtagagatacattttttatgatgttcatcacagtgtggtaaggttgcaaattcaaaacatgtcacccaagctctgttcatgtttttgtgaattctaggctggtgctgcactgaaatagagcagtaagcttgtgataaaggccaattccaggtagctcttgaaggtgatagccatctactttccagtggctgccaaccacagggagtgccagttaacactggaaggattaaggcaaggtcccttctcttgagactcccctctgagatctgaaaaatgaagtggcttaggaacatcagcagtgaagaactgccaagagttggtgaaggttgtctcttccgagggccttctgaagacagggctcttgaacagacaagtggaagggctgtaccagggataaaggaaagaagtgcctgtccagcagggagcttgaatttaagttccatgtatgaagtcattggctctatctgcatttttctgtcattctcttcatttgttttaaggtggaaaattttcttacagttgatgcaaagtatcaactactttaccctaccttctccccttttagatgggttcttcctgagttttggagtcttgtatgattatcagtattcccctgtcaaaatcaaatctattcaggtttcttcactgttgagaacacctaaatgtttttatttttgagaagtggggacagagtctcactatgtcacccaggctggagtgcaatggcatgatctcagctcactgcaaccttcgcctcctgggttcaagcgattctcctgcctccgcctcctgagtagctgggattataggcacacaccaccacgcccagctaattttttgtatttttagtagagacagagtttcaccatgttggccaggctggtcttgaactcctgaccttgtgatccacccacctcggcctcccagagtgctgggattacaggcatgagccaccacgcttggctaagaacacctaaatttttatgtttcttggctcaaaaaccagttccatttctaatgttgtcctcacaagaag

SEQ ID NO: 64454 - DNA, 2799 bp, Homo sapiens
aggaaaaatgtcatttattcaaaatatgaaattttattataattgatgtttaatgcaattcactttacgaaggtttttgtggttttccctaaaatttctgttttaatgaaggctcctgatcatcctggatgtcgacaagttttcttcttcatgtgacgtctctgatgcacaataaactgattagtttttctaaaactgattatattcatagggtttcatctcactctaacataaagtttaagctaaactacgtccatttaactaataagccaaatttgtaagagcttaacagactataaacttaactcttgctttaaagcaacaaaaacaaaaccctgatgaagacctggaagtgaattgttcgtttttcagactctagcttccttgaccttgtgctctatggttttgaacacacaggacccaagtttgctgcagaaataacctccaaatccatcttatgaaccaggaagactgtgagggtttttcttttttttttttaagggccaagggtaaatgtaatatttatcattagcaccacatcccatggtcagccccacctgaataaacggcatattgggatttttccacaaactatgagcctaatgaaaaaggaaatggataagggaaacaagttcccagcctatgtcacatgagtttctgcactatgtgttatgtggtaaggtatgcattccctcaggacttcccaaatccattacatgctagggttttctctctggtatgcattctggtgtgatgtaccctaagagctgccttacggacaaaagttttcccacattcatcacattcatagggtttctcccctgtgtgaattctctggtgtactctgagagttgaattttgggcaaaagctttcccgcattcattacactcatagggtttctcccctgtgtgaattctctggtgtgcactaaggtgtgatttctgggagaacgttttcccacaatcattacattcataggatttctcccctgtgtgaattctttgatgtactctgagggttgaattatgggcaaatggcttcccacatacattacattcatagggtttctcccccgtatgaactctctgatgtgcactaacatatgacttctcagagaaggttttcccacattcactgcattcatagggtttctcccctgagcgagttctaagatgtgctctgagatgtgatgtcttggagaaagtcttcccacagtcattacattcatagggtttctcccctgtgtgaattctgtgatgtgccctgagggctgaattatcagcaaacgttttcccacattcattacactcatagggtttttccccagtatgaattctctgatgtgcacagaggtgtgttctttgggagaaagttttcccacattggttacattcatagggtttctcccctgtgtgaattctttgatgcactatgagggctgccttatagacaaaagttttcccacatacgttacattcatacggtttttcccctgtgtgaattctctcatgtccactgaggtatgatttctgggagaaagttttcccacacttgctacattcatagggtttctcccctgtgtgaattctccgatgtgtactgaggcgtgtcttctggaaaaaagtttttccacattcactacattcatagagtttctcccctgtgtggatattctgatgtgctctaagggctgaattatgggcaaatgttttctcacattcattacattcatagggtttctcccccgtgtgaattctctgatgtattttgagggctgaattatgggcaaaagttttctcacagtcactacattcatagggttttctacctgtgtgaattctctgatgtgctctcagggctgaattgtaggtgaaagatctcccacattcattacattcatagggtttctcccctgtgtgaattctttgatgtgccttgagaacagaaatatgggcaaaagaccttccacattcattacattcataaggtttctcccccgtgtgaattctatgatgtgctctgagggctgaattatgggcaaaagttttctcacagtcactgcattcatagggcttctcacctgtgtgaattctttgatgtgctctcagggctgagttataggtaaaagatttcccacagtcattacattcatagggtttctcccctgtgtgaactctctgatgtacactgaggtgtgtcttgtgagagaaagttttctcacattcaacacattcatagggtttttcacctgtgtgaattctctgatgtgctctgagatgtgatgtcttggagaaagttttcccacattcaatacattcatagggtttctcccccatgagaattctctgatgtcctttgagatgtgatgtcttcccatattcactgccaccacagagttccatctctgcatctgttttctggtgtcctatgaggggtgacttgtaagatctcccacagccattgttatcacaaggtttctcttttgtgtgaattctcagatgtttactgaggtttgaattctgacagaaagctttcccacattcattacattcataaagtttgaatcccacataagttccaggatgctgaataggatgtgaacttgaacaaaaggattttgcacattcctcatattggtaagttttctctcctgagtggggcctctgatgctgaatgaggtgtgctttccggtaaaaggattttctgcatttcccatgttcatcagaaaggtagaatttatcttctgtgtgaattctctgatgtgctgtaaagtctaatttctggtagagggcatctgc

SEQ ID NO: 64455 - DNA, 1433 bp, Homo sapiens
ggcacgagaggacccagcgcagttccggcactacgcgctcaatgtgcccctgtacacacacttcacctcgcccatccgccgctttgccgacgtcctggtgcaccgcctcctggctgccgcgttaggctatagggagcgactagacatggcgcccgataccctgcagaaacaggcggaccactgtaacgaccgccgcatggcgtccaagcgcgtgcaggagctcagtaccagtctcttctttgctgttctggtcaaggagagtggccccctggagtcagaagccatggtgatgggcatcctgaagcaagccttcgacgtgctggtgctgcgctacggcgtgcagaagcgcatctactgcaacgcactggccctgcggtcccaccacttccagaaggtgggcaagaagccggaactcacgctggtctgggagcctgaggacatggagcaggagccagcacagcaggtcatcaccatcttcagcctggtggaggtggtcctgcaggcagagtccacagccctcaagtacagcgccatcctgaagcggccaggcacccagggccacctgggccctgagaaggaggaggaggagtctgacggtgagcccgaggactcaagcaccagctgagctccaccagccgcctgccccgcctgccccgcctgcctgtcccgccacactggctttaggacctgttgacacggaggggggtttttaatttggtttttaacaactcaggggtttgtttttatttttatttaatttttgcagctcaacttttaaacaaactgcaggggagagggtggggctggaaggaaggctgaggcctggtcagcagtgaccccagcagagcaggccccagtcctcctgggaggctggcccccctttttttctgggccctactgccctcctctgcccaggaaatgggggggtttcagcaactcagtgtcacagaataaaatcaagtgtggagtgccatctggtgtgtagggcgcctctgggaagcctgggcagcagaatgccccttgcacccagggcaagggacccagttcaggcttcacccctcgctgctgagccgatgtcaacacctggaactttcctgtcagttccaacacgattcagagctggctgcctggcagatgattgatactggagtctcattctgcctgattaaaaatggaattagtatgcaacactgagagcgcccccatcaccctgacgaatgtgactgtgtctgacgaatgtgactgtgtccaaccctgcccccacttcctctctgcaccagctccgcagggcctggtgggagtcatgggtcctgtgataccccctcccctcagttcctcaagcagcactctgtgaggtcctgtgcccagctctggtgtgagtgggtgccccggcagcaccaagggagcctggacagaggagccggcctgggctg

SEQ ID NO: 64456 - DNA, 526 bp, Homo sapiens
atacaaatgtgaggtgtgtacaaagggtttcagtgagagttcacgccttcaagcacaccaaagggttcatgtggaagggagaccctataaatgtgaacagtgtggtaagggtttcagtgggtattcaagtcttcaagcccatcacagagtccacacaggagagaaaccatacaaatgtgaggtatgtggaaagggcttcagtcagagatcaaatcttcaggctcaccagagagtccacacaggagagaaaccatacaaatgtgatgcatgtggtaagggtttccgttggagctcaggtcttctcattcatcaaagagtccatagtagtgataaattctataaaagcgaagactatggtaaggactacccttcatcagagaatctacacagaaatgaagattctgttttgttttgaagtcctcaaatgggagctgaaattttccagtcactagagttctttcagtagaaaaagaatttttaaaaattaaaatgtaatgttgctgcccaacttcaacattcataatgg

SEQ ID NO: 64457 - DNA, 1115 bp, Homo sapiens
atggatgaaacaggaaatctgacagtatcttctgccacatgccatgacactattgatgacttccgcaatcaagtgtattccaccttgtactctatgatctctgttgtaggcttctttggcaatggctttgtgctctatgtcctcataaaaacctatcacaagaagtcagccttccaagtatacatgattaatttagcagtagcagatctactttgtgtgtgcacactgcctctccgtgtggtctattatgttcacaaaggcatttggctctttggtgacttcttgtgccgcctcagcacctatgctttgtatgtcaacctctattgtagcatcttctttatgacagccatgagctttttccggtgcattgcaattgtttttccagtccagaacattaatttggttacacagaaaaaagccaggtttgtgtgtgtaggtatttggatttttgtgattttgaccagttctccatttctaatggccaaaccacaaaaagatgagaaaaataataccaagtgctttgagcccccacaagacaatcaaactaaaaatcatgttttggtcttgcattatgtgtcattgtttgttggctttatcatcccttttgttattataattggctgttacacaatgatcattttgaccttactaaaaaaatcaatgaaaaaaaatctgtcaagtcataaaaaggctataggaatgatcatggtcgtgaccgctgcctttttagtcagtttcatgccatatcatattcaacgtaccattcaccttcattttttacacaatgaaactaaaccctgtgattctgtccttagaatgcagaagtccgtggtcataaccttgtctctggctgcatccaattgttgctttgaccctctcctatatttcttttctgggggtaactttaggaaaaggctgtctacatttagaaagcattctttgtccagcgtgacttatgtacccagaaagaaggcctctttgccagaaaaaggagaagaaatatgtaaagtatagtttaaacccatttccagtccaaaccaatgaaaatagtttcccaaataagtattttgtcaaatcatttacaaaaaaaataaaaattttacttaaaaaaaaaa

SEQ ID NO: 64458 - DNA, 1669 bp, Homo sapiens
ttttttttttttagcttacaaacaacagaattttatttctcatagttctggaggcctggaagttcaagatcaaggcaacgacagagtcggtgtttggccgacagctggttttttggttctcatacatgtcatcttcttgccacgtcctcatatggtggaagggtcgagttagctctctggggcctttttaaataagggcactaatcctaatcatgagggctctgcactcctgatctaatcacttcccaaaggcccacttcttaaatgccatcaccttggggattaggatttcaacataatggcttttgaggggatacaaactagaactaaagaacagaccataggcaccagctaaagactggtatgtcagtaagaatagctgaatgaggctggaaagagataataattagaagggacaaagtcccattccagagcccaacacctagggtttcattaggctggggtttctcaaactcagtacaactgacattttgggccagattatttttcgttgtggggtactgccctgtgcattataggatgtttagcggcacccctggcttctatttactggatgccagtagcacacacatcccaccatcccccaaccccccaagtataatgaccaaaatgtctccaaacattgcccaatgtcctctggggggcaaaattgcccccagttgagactgctgtattcaatccacttccattagttctctttaaatcacaacattctggtcgatataacagatagaaattcctgatctagacagcagaattctgttgtgttaagagagaatacacaattatagctaaactcttattctcactttatataaatttatttacactcacctaactacattattctaacaaaacactgggacaacttgtaaaagtacttatgcatatgtgcaggacaggaagagaaaataaaggaaccagatttattggggtggtttaagtgagatcatgggatgaactcgtttacttctattcagcagtagcctttgtggtcccaggcttccggtggccagataattccctcaactccatgagcaggtgaccgaggaggactctcacatcctgcatgtgtttgagaagaaggcccatctggtgatacagatgaggatctggcatccccagaggagaagaaaagcctggatcctcagaagatggggttggcggcggaggcagaggcccaggggcctcctcaggagcagttcctggagcagctgatttctgaggagctggattcaatgtgggaggtgcagcagagctggaagcaccctgcactctgatctctagctgggggctctgtttccaaacttggttgtcctcagtggctgcctcacaccagtatgacccggagtgatcttctgaagctgtggggatctggaattctgaggagagccccctgctttgcactatccttccatccttgtagaaggagaagaggaggcgggcagctgacctctgcaggggcaactttgtctgacaactcagggtcatggggcttcctgcttggggttcagctgagggtacagctctgagaattggcgctggaaacagttcttggactgtgatagccacaacagatgctgtttctgggatcccaggaccagggctctggaagatgccactgcagtggtagtgcccgctgtctgcc

SEQ ID NO: 64459 - DNA, 913 bp, Homo sapiens
ttcactgcagaagaaggggacttgtggtttaccttgagagggaacgcccccgttcaggttcacttcctggatccttactgctctgcctcggtggcaggagcccgggaaggagattatattgtctccattcagcttgtggattgtaagtggctgacgctgagtgaggttatgaagctgctgaagagctttggcgaggacgagatcgagatgaaagtcgtgagcctcctggactccacatcatccatgcataataagagtgccacatactccgtgggaatgcagaaaacgtactccatgatctgcttagccattgatgatgacgacaaaactgataaaaccaagaaaatctccaagaagctttccttcctgagttggggcaccaacaagaacagacagaagtcagccagcaccttgtgcctcccatcggtcggggctgcacggcctcaggtcaagaagaagctgccctcccctttcagccttctcaactcagacagttcttggtactaatgtgaggaaacaaacatgttcaggccccgaacatttccggtgctgactcggccttaaacgtttgtgccataatggaaaatatctatctatctgttctcaaatcctgtttttctcatagtgtaaactcacatttgatgtgtttttatgaaggaaagtaaccaagaaacctctaggaattagtgaaaaaagaacttttttgaggtgtgttactatactgctgtaagttatttattatataaagtattgtaaatagaatagtgttgaagatatgaaatatggctatttttaatggtgacaattatgacttttagtcactattaaattggggttacctatatcagtacaatttgtagttgtttccaggtttggctaataatcattccttaacctagaattcagatgatcg

SEQ ID NO: 64460 - DNA, 686 bp, Homo sapiens
ctgggccgcagggcagtgcactcctcagccggcttcctctggtcacgccggcggggccgcagcactgtgtgaggggtggggccctggcacctagcttgggcacgtgccctcctagccggacctcccacaggcaggggctctgctcccacctgcctctgccagcccactagtgctcaccgttccctaggtgtgtttgtcaaagtgtctctgatgaaccacaacaagtttgtcaagtgcaagaagacttcagctgtgctgggctccatcaaccctgtgtacaatgagaccttcagcttcaaggccgatgccaccgagctggataccgctagcctcagcctgactgtggtgcagaacatggaaggggacagtaaggccacaccctaccctgggctgctgggatggggaccacgaggggctgccgagtgttcaggcagagtgagtgcctcctgtcctgacctcaaaaggagctgtacgagctccctccctggttaaggaaactagtgctcagaaaggctgaaatattgcccaaggcctgggtttcaggcccagctttagtccagttgagctctgtctgtggcaccctagaaacaggttaagcagccgggcatgctggctcacatctgtaatcccagcaccttgggaggccaaggtgggtggatcacttgagctcaagagttcaagaccag

SEQ ID NO: 64461 - DNA, 1642 bp, Homo sapiens
atgagacgctttttaagcaaagtctacagtttcccaatgagaaaattaatcctctttcttgtctttccagttgtgagacaaactcccacacagcactttaaaaatcagttcccagctctgcactgggaacatgaactaggcctggccttcaccaagaaccgaatgaactataccaacaaattcctgctgatcccagagtcgggagactacttcatttactcccaggtcacattccgtgggatgacctctgagtgcagtgaaatcagacaagcaggccgaccaaacaagccagactccatcactgtggtcatcaccaaggtaacagacagctaccctgagccaacccagctcctcatggggaccaagtctgtgtgcgaagtaggtagcaactggttccagcccatctacctcggagccatgttctccttgcaagaaggggacaagctaatggtgaacgtcagtgacatctctttggtggattacacaaaagaagataaaaccttctttggagccttcttactataggaggagagcaaatatcattatatgaaagtcctctgccaccgagttcctaattttctttgttcaaatgtaattataaccaggggttttcttggggccgggagtagggggcattccacagggacaacggtttagctatgaaatttggggccaaaatttcacacttcatgtgccttactgatgagagtactaactggaaaaaggctgaagagagcaaatatattattaagatgggttggaggattggcgagtttctaaatattaagacactgatcactaaatgaatggatgatctactcgggtcaggattgaaagagaaatatttcaacacctcctgctatacaatggtcaccagtggtccagttattgttcaatttgatcataaatttgcttcaattcaggagctttgaaggaagtccaaggaaagctctagaaaacagtataaactttcagaggcaaaatccttcaccaatttttccacatactttcatgccttgcctaaaaaaaatgaaaagagagttggtatgtctcatgaatgttcacacagaaggagttggttttcatgtcatctacagcatatgagaaaagctacctttcttttgattatgtacacagatatctaaataaggaagtatgagtttcacatgtatatcaaaaatacaacagttgcttgtattcagtagagttttcttgcccacctattttgtgctgggttctaccttaacccagaagacactatgaaaaacaagacagactccactcaaaatttatatgaacaccactagatacttcctgatcaaacatcagtcaacatactctaaagaataactccaagtcttggccaggcgcagtggctcacacctgtaatcccaacactttgggaggccaaggtgggtggatcatctaaggccgggagttcaagaccagcctgaccaacgtggagaaaccccatctctactaaaaatacaaaattagccgggcgtggtagcgcatggctgtaatcctggctactcaggaggccgaggcagaagaattgcttgaactggggaggcagaggttgcggtgagcccagatcgcgccattgcactccagcctgggtaacaagagcaaaactctgtcc

SEQ ID NO: 64462 - DNA, 670 bp, Homo sapiens
ttttttttttttcgatttgggcttttttctttttggtctggatgttggtggaatttccccattcgtaagacttttctgtgagagggaagtaagagaagaagaaataagcattttgggttcctacattggccttccttccttccggctggtacattgtagttggggaaagggtcggttttcttctttagttctgttgaggccccagagaagcaaaggatccccaaaggacaacagctgtcaggcctccatgtccaaggctgagcccaaatgcgtggggttggacttcccagccccatcctgccccttctctccgcactcttttgagacctggcagatctgagaataaacttcagcaatgacagtggccttgcagtccagccctcccccaggaggtaaatctgggatgtcctctgaggccagagtcctgaaaactgtgttcaggctggggggcttctgagcagaggcacacagttcagcgattctgcagcccagggctgcgtccagtgctagctccctcctgatcgcctcctcagaaggcctaggggccccagggaagcagaccaggatgcaggtcatgttgtccaggctgccccagggatccacgctctcatcctctctgccgtggctcgttcaccatcctctcccaagtccctcgcccgactctcgtgcc

SEQ ID NO: 64463 - DNA, 1595 bp, Homo sapiens
caggagtctactatgcaactgcatactggatgcctgctgaaaagacagtacaagtcaaaaatgtaatggacaagaatggggacgcctatggcttttacaataactctgtgaaaaccacaggctggggcatcctggagatcagagctggctatggctctcaaaccctgagcaatgagatcatcatgtttgtggctggctttttggagggttacctcactgccccacacatgaatgaccactacacaaacctctacccacagctgatcacgaaaccttccatcatggataaagtgcaggattttatggagaagcaagataagtggacccggaaaaatatcaaagaatacaagactgattcattttggagacatacaggctatgtgatggcacaaatagatggcctctatgtaggagcaaagaagagggctatattagaagggacaaagccaatgaccctgttccagattcagttcctgaatagtgttggagatctattggatctgattccctcactctctcccacaaaaaacggcagcctaaaggtttttaagagatgggacatgggacattgctccgctcttatcaaggttcttcctggatttgagaacatcctttttgctcactcaagctggtacacgtatgcagccatgctcaggatatataaacactgggacttcaacatcatagataaagataccagcagtagtcgcctctctttcagcagttacccagggtttttggagtctctggatgatttttacattcttagcagtggattgatactgctgcagaccacaaacagtgtgtttaataaaaccctgctaaagcaggtaatacccgagactctcctgtcctggcaaagagtccgtgtggccaatatgatggcagatagtggcaagaggtgggcagacatcttttcaaaatacaactctggcacctataacaatcaatacatggttctggacctgaagaaagtaaagctgaaccacagtcttgacaaaggcactctgtacattgtggagcaaattcctacatatgtagaatattctgaacaaactgatgttctacggaaaggatattggccctcctacaatgttcctttccatgaaaaaatctacaactggagtggctatccactgttagttcagaagctgggcttggactactcttatgatttagctccacgagccaaaattttccggcgtgaccaagggaaagtgactgatacggcatccatgaaatatatcatgcgatacaacaattataagaaggatccttacagtagaggtgacccctgtaataccatctgctgccgtgaggacctgaactcacctaacccaagtcctggaggttgttatgacacaaaggtggcagatatctacctagcatctcagtacacatcctatgccataagtggtcccacagtacaaggtggcctccctgtttttcgctgggaccgtttcaacaaaactctacatcagggcatggcagaggtctacaactttgattttattaccatgaaaccaattttgaaacttgatataaaatgaaggagggagatgacggactagaagactgtaaataagataccaaag

SEQ ID NO: 64464 - DNA, 569 bp, Homo sapiens
cagggcctcatcacactgggctggattcatactcaccccacacagaccgcgtttctctccagtgtcgacctacacactcactgctcttaccagatgatgttgccagagtcagtagccattgtttgctcccccaagttccaggaaactggattctttaaactaactgaccatggactagaggagatttcttcctgtcgccagaaaggatttcatccacacagcaaggatccacctctgttctgtagctgcagccacgtgactgttgtggacagagcagtgaccatcacagaccttcgatgagcgtttgagtccaacaccttccaagaacaacaaaaccatatcagtgtactgtagccccttaatttaagctttctagaaagctttggaagtttttgtagatagtagaaaggggggcatcacctgagaaagagctgattttgtatttcaggtttgaaaagaaataactgaacatattttttaggcaagtcagaaagagaacatggtcacccaaaagcaactgtaactcagaaattaagttactcagaaattaagtagctcagaaattaaga

SEQ ID NO: 64465 - DNA, 2347 bp, Homo sapiens
ggaattcgcccgcggggaggcccgacttcgaccacctgctacggacctacggagacgtggttgtaccagttgcaaactgtggggtccaggaatacaactcgaaccccaaagagcacatgactctcagagactacatcacctactggaaagagtacatacaggcgggctactcctctcccaggggctgtctctacctcaaagactggcacttgtgcagggactttccggtggaggacgttttcaccctgcctgtgtacttctcgtccgactggctgaatgagttctgggatgcactggatgtggatgactaccgctttgtctacgcggggcctgcgggcagctggtccccgttccatgctgacatcttccgctccttcagctggtctgtcaatgtctgtgggaggaagaagtggctcctcttccccccagggcaggaagaggccctgcgggaccgccacggcaacctgccctacgacgtgacctccccagcactctgcgacacacacctgcacccacggaaccagcttgctggcccacccttggagatcacgcaggaagcgggcgagatggtgtttgtgcccagtggctggcaccaccaggtgcacaacctggatgacaccatctccatcaaccacaactgggtcaatggcttcaacctggccaacatgtggcgcttcttgcagcaggagctatgcgccgtgcaggaggaggtcagcgagtggagggactccatgcccgactggcaccaccactgccaggtcatcatgaggtcctgctcgggcatcaactttgaagagttttaccacttcctcaaggtcatcgctgagaagaggctcctggtcctgagggaggcagccgctgaggacggtgctgggttgggtttcgaacaggcagcctttgatgttgggcgcatcacagaggtgctggcctccttggttgcgcaccccgacttccagagagtggacaccagcgcgttctcaccacagcccaaagagctgctgcagcagctgagagaggctgttgatgctgctgcggccccatagcacctgtcgtgaggatagaaggacgggtggacgagaggcagcctcctgctccggggcccttccagaaataaagaccgccctccctgtgacctggggcccacccctgtcgaggcttgtggcctggctgttcatggccactgcctgggtgcctgttttcaggtgaggcccaatgaggtcagggacccaagatgggatgtggcccttctgacctgcagcaggcctgctgggagctcggagatggtgccaggacctggctcttttgggggccctgcctccttaggccaggacgcctgagctgacaggagtctgtgtctggtgtgccttctctggtggctcctcttaataggccagccctgtcccctcgtctcaggccattggaccacccctggctctgccctgtgggttcagggaggggttggagcagtgctgggcaagctcaccagggcctccaggcagggctggggttggcctccatcacctccaggtgatgggctgtggaaccagcggcctgcgccttcctctgggtacccagagtggagggctgggttgggctggcctttgccacctccctgcctttgcagggcctgtggacagctggagaggccacagatggggtggaatcccatctgctgctgaatcctcacctgggcctgagggactgtgcctgctgtgcactcacagctgggtcttcccaaggatgctgttctcaggagtggtgggtccccagcccctcttcacactgggtatgatggaggtgtgggcgggctcgtccaggccgatcaaggcacagcagtgagcagcggaggcctgtggtggggaatggactctcgtgggatcctcttgcagaggatgccccaggcctgaaccctctagtggatccacagtttgtggagactggcactctcccagccctgtccttgaccgagagtccagcattttttcagttggcccctggttggctgcctcaccccagcaggggaggaggcatccgaatccacagggacggcacgtgccatggctatgcacattgcctgcccgtggcatcaactggggccgctggcacttgtctaggatggaagcccccaagaagggcaggggtttctgtctgctctgttcagtgaatcatgtgaagtgcttgcaaaggcagctttacacagtaggtgcttcatatgtgtctgtcgaatgaatgcgctccagccaacagctttccagggacctgtatgctgggcccccctgctagctcccggggacccctggtctgtacgggaatgccctgagacatccggcctcctacagatggagct

SEQ ID NO: 64466 - DNA, 1944 bp, Homo sapiens
ggcacgaggttcccgcccgggactaagccggggagcgcatcccggctactgcgggtcctgggtcttcacctgcggagccttacggcagctgagcggtgggagggacctgagccgcggcgctaggatgggaaacagtgcgctccgcgctcatgtggaaacggcgcagaaaactggtgtctttcagcttaaggaccgagggctgaccgagttccccgcagacttgcagaagctgacgagcaatctcaggaccatcgacttgtccaacaacaagatcgaaagcctaccgcctttgctgataggaaagttcactctgctgaagagcctctccctgaacaacaacaaactgactgttctgcctgatgagatatgcaatctgaaaaaactagagacgctaagcctaaacaacaatcaccttagagagctgccgtctacctttgggcaactctctgccctcaagaccctgagcctctctgggaaccaactgggagcattacctccccaactttgtagcctacggcacctggatgtgatggatctctctaagaaccagattcgaagtatacctgactcagtgggagagctgcaagtcatcgaactcaacctcaaccagaatcagatatctcagatctcagtgaagatatcttgctgtccacgccttaaaattcttcgcctggaagagaattgtcttgagctcagcatgcttccccagagcatcctcagtgattcccagatctgtctgcttgctgtggaaggcaatctttttgaaataaagaaacttcgagaactggaaggctatgataagtacatggagaggttcacagccaccaagaagaagtttgcgtgaagttctccaggactatggaaaccttacaggatactgacttagaacctctgttggaatgtggctgagtcaaagcctcctgttgttgttaggggtatctacagtaaggagatgatacttcaggagattatatttcactcaatgatcttttctcatttcagggctcttctcaaataagctaaaagaaaaaggatcaggagacaggaaaagtcttccgttttgagtcatgagtagggcaatagacaaggttctcttcaaaaccatcattagtttggctttaagaaaccagtagctagctgctatttatatggtgagggggtgctgcctggtaacagaatagctccacaccacagcttgagattttgtttagtttcactgtgtgagctttcataaagtctgttgccattccatctctgtgttaacacttcatatttttatgaaattcagataatttgtgagaggctggcatggatctaaggatttattatttttattctagtccatcagttcagtcgcagtttttatactaggactttaggatgtacataaatgtgtgactgtttgtcttgattaaaagtgcactttggcctgggcatggtggctcatgcctataatcccagcactttgggaggccaaggcgggtggctcacttgaggctaggagttcaagactagcgtggccaacatgaggaaaccctgtctctactaaaaatacaaaaattagctgggtgtgttggtgcatgcttataatcccagctacttgggaggctgaggcaggagaatcgcttgaacccaggaggtggaggttgcagtgagccgagattatgccactgtactccagcgtgggtgacagagtgagactctgtctcaaattaaaaaaataaaaaataattttttttttttaaagtacgctttgttggctgggcacggcgactcacgcctgtaatcccagcacattgggaggccaaggcaggcagatcacgaggttaggagttcgagaccagcctggccaacatggtgaaaccctgtctctactgaaaatacaaaaattagctgggcgtggtggtgggtacctgtaatcccagctacttgggaggctgaggc

SEQ ID NO: 64467 - DNA, 390 bp, Homo sapiens
cttggttatctcagagggatcatcagctttttaagaaagttttgagagaaaagcaagtgaagaaaagcatagtcaatgctcaacatcacgggtctctcactgaacacaccacgcctggtattctctcacagcgatgtcaccatttctacctgccacgcgtcggtgaaggttgggactcgactggtgtttgatcacgatgggaaaatcatccaggaaaccccctacccccaccccagagggaccacagtcagcgtgaagcagttattttctacactacctgtgcgccataaggaatttcaaaggaatattaagaaggtacagtaaattaatcttggttttcaagagtattggttaatgcacatgagcaaaagatttactaaagatgtttat

SEQ ID NO: 64468 - DNA, 1742 bp, Homo sapiens
cattccgcacgagagaagagaaaacaaacgctgctaaggagttagaaaagttacagcacagttctgaaactgaactaacagaagccttgcaaaaacgggaagtacttgagactgaactacaaaatgctcatggagaattaaaaagtactttaagacaactccaggaattgagagatgtactacagaaggctcaattatcattagaggaaaaatacactactataaaggatctcacagctgaacttagagaatgcaagatggagattgaagacaaaaagcaggagctccttgaaatggatcaggcacttaaagagagaaattgggaactaaagcaaagagcagctcaagttacacatttggatatgactattcgtgagcacagaggagaaatggaacaaaaaataattaaattagaaggtactctggagaaatcagaattggaacttaaagaatgtaacaaacagatagaaagtctgaatgacaaattacaaaatgctaaagaacagcttcgagaaaaagagtttataatgctacaaaatgaacaggagataagtcaactgaaaaaagaaattgaaagaacacaacaaaggatgaaagaaatggagagtgttatgaaagagcaagaacagtacattgccactcagtacaaggaggccatagatttggggcaagaattgaggctgacccgggagcaggtgcagaactctcatacagaattggcagaggctcgtcatcagcaagtccaagcacagagagaaatagaaaggctctctagtgaactggaggatatgaagcaactctctaaagagaaagatgctcatggaaaccatttagctgaagaactgggggcttctaaagtacgtgaagctcatttagaagcaagaatgcaagcagaaatcaagaaattgtcagcagaagtagaatctctcaaagaagcttatcatatggagatgatttcacatcaagagaaccatgcaaagtggaagatttctgctgactctcaaaagtcttctgttcagcaactaaacgaacagttagagaaggcaaaattggaattagaagaagctcaggatactgtaagcaatttgcatcaacaagtccaagataggaatgaagtaattgaagctgcaaatgaagcattacttactaaagtaagtaaacatataaaagtaataaagcatatctatgaaaacataaatgtctgacttatttacctgtcttagtagtttatagaggactatatgaccaaatattggcctgtttgaataaaaaccatttgatttagaagatgttgaatttaggaaattattaagatgatgtacatcttattaccgtagaagatataatttataaatgttcaaatataaactcatctaatcataatgtttagagggttttatacttgatgtacctaaaaaaaggtagaaacatttttcaaaatcagcaaagttcttttaaaatcataaagtaggccgggcgtggtggctcactcctgtatttccagcacttcaggaggccgaggtgggcagatcacttgaggtcaacaagggcaaagacaattttttgagagccatgaaggcatcattatattatggctcactacaattacgttcacaacagtgaccttttttgagttttaagaaaaagttgaattaatttaatgtattcagtgtactatatttaattgtaaaagttatgtgttaaactgtcagttaaataaaatcctacttataaaaaaaaaa

SEQ ID NO: 64469 - DNA, 3230 bp, Homo sapiens
ggcacgagaggaagaagaggcccatgaagaagtgaaaggagcagaacaaagtgataatgataagaaaatgatgaagaagtcagcagaccataagaatttggaagtcattgtcactaatggctatgataaagatggctttgttcaggatatacagaatgacattcatgccagttcttccctgaatggcagaagcactgaagaagtaaagcccattgatgaaaacttggggcaaactggaaaatctgctgtttgcattcaccaagatataaatgatgatcatgttgaagatgttacaggaattcagcatttgacaagcgattcagacagtgaagtttactgtgattctatggaacaatttggacaagaagagtctttagacagctttacgtccaacaatggaccatttcagtattacttgggtggtcattccagtcaacccatggaaaattctggatttcgtgaagatattcaagtacctcctggaaatggcaacattgggaatatgcaggtggttgcagttgaaggaaaaggtgaagtcaagcatggaggagaagatggcaggaataacagcggagcaccacaccgggagaagcgaggcggagaaactgacgaattctctaatgttagaagaggaagaggacataggatgcaacacttgagcgaaggaaccaagggccggcaggtgggaagtggaggtgatggggagcgctggggctccgacagagggtcccgaggcagcctcaatgagcagatcgccctcgtgctgatgagactgcaggaggacatgcagaatgtccttcagagactgcagaaactggaaacgctgactgctttgcaggcaaaatcatcaacatcaacattgcagactgctcctcagcccacctcacagagaccatcttggtggcccttcgagatgtctcctggtgtgctaacgtttgccatcatatggccttttattgcacagtggttggtgtatttatactatcaaagaaggagaagaaaactgaactgaggaaaatggtgttttcctcaagaagactactggaactggatgacctcagaatgaactggattgtggtgttcacaagaaaatcttagtttgtgatgattacattgctttttgttgtccagtagtttagtttgtgtacatatatacacatatatattttgcactacacaaacgataacattttaaggactaatattgctgatacttgaataatcaatctctactaggttataagtagtatacacagatttaccctgcccttgaacttgaaggacattaaattattaatgatcatttggtaacatgtttacctgattatcttccatagagtaacataagctgcttttcaaaggtaccattgtgataatgagatcaaatttataagttattatttttaattttctaaattaaataaaagaaagaatgcaaaccaggagtgaatttcaaatgagatgtaatcgactttatatcttagtcacggagttgccatggcatgtagtagaaaaccacaggaagaatggtcatattcactttgtgggctgcccataatctttcttgggcattcacaactcttgagtttggtgttcaggcatcattattaaaaagtggagtcctatgtaccagactgagtttttacaaatgatttgcaggctagacataacccactgatggaaatggtgaagaatgagcttcatgtaggtttaaaagtgtattctgagcctgtagatgattaatcaggtttttattcaatcatataaatgtattcctttgtaatcatttttgtttaactgaggatatctagtgtctgcttcatagggtgctttgaaatataaaatgaaaacttatttatactgtttttacaacagtcaaaaaggaaacacgaaaatcacttttctgcaactgatgaactatatagactggactcttaacctcttagtgcctcagtttttccttcggggtatactattttagatacacctacttcacaggagtactggagggatttgcaagctaacgggccaaatgcttccataggaataaggcatgcccagctaacagaaatttaagtccctcttccccacctctctcatctagaccaaaaagaagactacaatttagatccttggagacttttcctgtatgccttccaaaacttcctgctcacttagatgtaccttgtgctttgaagatttctttgatgcagtctttgtaacaaataatttttttttttaaatggagtttctctcttgttgcccaggctggagggcaatggcgtgatcttggctcactgcaacttccacctcctgggttcaagtgattctcctgcctcactcccaagtagctgggattacaggcatgcaccaccatgcctggctaattttgtatttttagtagagacggggtttctccatgttggtaaggctgatctcaaactcccaacctcaggtgatctgcctgcctcggcctcccaaagtgctgggattagaggcgtgagccactgcacctggcctgtagcaaataatttttaagcattctcaagatgtatgatgttgggtttaacatcatatgttcacagtgttttaaataagaaataatctgtctttagtatacaggatggttctttgtttgcctgaaaagtataagaatacaatttacttttcccaaactctttttccttatttttttctttcaaataactttaattatttaatcccatactgattaaaatatgtctgtctaaagggatctactactatttgcttttaaaaaagtgttccctatttatttaggaaaaagtgaagcaagcaactgaatttatatgtaaaaataacatttagacctgtggatcaaagattattttcaaaaatgagatatcaatttggtatcagtaaaaagtgtcttttctcttagtatataaataaataaaatgcaaattaagagtgtaagcagttgtgaatcattacaagcagtctgggataactaactcctagggataaccatttctatcctgttccaaagtcttattttatagtttgaaaagcactttgcacacagttcttgtatataaaagtaaagatgtaattataggatatagtgttcctgctttgtttaataagaacctcatttaaacttgacagctatggtatttttttaatgataacttcttttctgtttattgtaaaactaagttaaaaataaaaggttaatgagaaaaaaaaaa

SEQ ID NO: 64470 - DNA, 2145 bp, Homo sapiens
aattaggaaacaaggaaaaggcccatgctgtatagcccatgaatctcatcggctttatcatgaaagtttattgtttttaatcctagtacaatcagctaccagttacatacagtaaaaaacagaaacagccacaaagcaatgatgatagagatagtctgtgacattgtacagtggaggaaatactctctgttggaatcctccagcagacccccgcctggcttcagcagttaagctatcactccctccctccccaaaacagttaaaagaaaaattaacgtcttgcttgggtacagcaagattctaatacctcttggggacactggagaactttaaaaaaaactaaagcagtagaaacaaaacaagaactgaaacgtggaagcaaggtgacacacaaagaagctccgcgaggccttggcttcagaccacctcaaagcgaaccaccttagaggaataatgactccgttcaaaaactaagtctcatatatatttggttcgattgagggctttttcagccaggtgaccactttcatctgtgatcttctcccaatcagtctgtccgaccacaaaacctatggcccttttcctatctgcatccttcttctcttccaggtctgcccatctgaccctcttcttcccaggctcagaagcacgagtatcataatcatcggggagctgaagataatcctccattctgctggcaatggcctcccagtcacgtttccttttagtaccagtcctcaagccatccaacttgtctagctttgcctcagatgtgtccatctcccatttgcttttcggaatgtaacccagttcgctttcctcttcctctgcatctttcttttcttctttctgttcttcgatatttgcatcaaaatcttccatctctacctcttcaatagcagcatcttgcagcaaagaacgaatatctagacgcatcatgtgacgaggtgcagtttcccagtgatcagccatcttatttatttctttaagctttcttccatgaatatttctcttgccacaagtctggttatctgcactcatttcagccaaatatacctcaaatcccttggtttttgctgcactccaaaactggtcaaaatgcctaactctgtcattgatggcatccaggatgatgaagggaaaaaagccatcatccagagtctttttgaaagttttgaacatgctggtgcggtaagtctcctccatctcagcttcatattcatattccattaccttctttttcactttctttccagaatctggatctttttcttctttttccacttcagtgatgaagtaatcatccaggcttagaactctgggtgcaggtcctccaaattctacctccttatctcgaataagttttgcaacatgtgtctttccactgccaggtaatcctctcattataacaacaattctctcaggtctgctctcccggcccggtggtttcaaaatatcgtccacattctttgattcaggcttcttctcgactcgtggagctggaggtggctggtggctcagtgaaggagctggcagaggcattcgctcctcaggataagtccttcgttctcctccaaacatggatggtccttcatagactggtcggtcagacttccggtcataggatggcctatcaaaaccccctcttctggatgaggaatggtcttttttgtctcgatatgactgagctctatcatctcggggtcggcgttctctgtcaaatcgatcccggtcatagtcaataacaccacgatcccggtctcgatctctatgtgtctcacgatcccttttaaaatctcgatgatctgctatgacattactttgacgatcaaaataaggctcacgatctctttctctatcataacgatcacgttggcctgcatgctctgtctcaaaagttgatctttcaggtagtggatctgggcgtagagttattctttctccataaggtatctgttcaactttattagtggatatatctcggccatggccataatcaacartctgttgtactggtggtggcttggacattggtggcatacccataggcactgggccaggagggggaatggaagagtgaacaggtgggggtggtaatactggagcagatggaattgctgcaatttctgacttaaattctgaatt

SEQ ID NO: 64471 - DNA, 1178 bp, Homo sapiens
tttttttttttttagcatttaattctgattttaatttccataaaattaactctacaaagatttctcaaagaaatctgaccgccttcaaactacatgtttgttttgtattacatgtaatagatttccacatatgaaaaaatcataaaatgaaggctacgttttccaaccgctatttaagtactgtttagaaactatcgttgaatgaatgaacctgattttgcctcatcgtgtttatctaaaagagtctttgaaagatatttattttccattttctttacacggtccctctttttcaatctgtaaataaaaattaatgagcaatttaggacacaatatcacaacacaattattctgtaattgatctgataaccaaagacacataagaataggatgatctataggatagatgtttccacacagcatttgtctgaaatcagattattttaaatgatgccttgacttttgaattcaattctagaaccaattatcctaaactaaatcagagtattacaaatgaagatattccaacacaaagacttgtaggattttgtttagattgtcaatggttgattcatccaaattttcttcattgtcatccatggtgtgccagacttcagggaaaggagacggtatcagatgcagaactggaacacctcttcttaaaaatggaatatggtcatcctgaatcacacctccataactgtaattctggaaataccgcccctccaaagagtgatccttgagcaaacccaattcatgaagttcatgttcaattgcttgaagtctttcgaaccacctggctgagtttggaaaaaaattgggaaacgttgggtttggagctccaatcaaatccaataagaccaataaatccatgccatgcagttggctggtgcctctcgctccaggtgggtgcggggtcgatgccatctttgcagctaagtgtcgagacccatagagagaatcttgaggagaccagtgaagaaaagcctcttcaccatcaaagaagatcagctggagtgacaaatctggcttggagtctgaaacagtctttaaggaaaggagtttcttgtctaaggcacgagcaagttccaacatcattgcacatggcacggctgaatcagtggctcctacaaacactctgttgttccagtgggaaaaatacttggagtcctcgtgcc

SEQ ID NO: 64472 - DNA, 1084 bp, Homo sapiens
cgattcgaattcggcacgaggtgcagagctgctgtcatggcggccgctctgtggggcttctttcccgtcctgctgctgctgctgctatcgggggatgtccagagctcggaggtgcccggggctgctgctgagggatcgggagggagtggggtcggcataggagatcgcttcaagattgaggggcgtgcagttgttccaggggtgaagcctcaggactggatctcggcggcccgagtgctggtagacggagaagagcacgtcggtttccttaagacagatgggagttttgtggttcatgatataccttctggatcttatgtagtggaagttgtatctccagcttacagatttgatcccgttcgagtggatatcacttcgaaaggaaaaatgagagcaagatatgtgaattacatcaaaacatcagaggttgtcagactgccctatcctctccaaatgaaatcttcaggtccaccttcttactttattaaaagggaatcgtggggctggacagactttctaatgaacccaatggttatgatgatggttcttcctttattgatatttgtgcttctgcctaaagtggtcaacacaagtgatcctgacatgagacgggaaatggagcagtcaatgaatatgctgaattccaaccatgagttgcctgatgtttctgagttcatgacaagactcttctcttcaaaatcatctggcaaatctagcagcggcagcagtaaaacaggcaaaagtggggctggcaaaaggaggtagtcaggccgtccagagctggcatttgcacaaacacggcaacactgggtggcatccaagtcttggaaaaccgtgtgaagcaactactataaacttgagtcatcccgacgttgatctcttacaactgtgtatgttaactttttagcacatgttttgtacttggtacacgagaaaacccagctttcatcttttgtctgtatgaggtcaatattgatgtcactgaattaattacagtgtcctatagaaaatgccattaataaattatatgaactactatacattatgtatattaattaaaacatcttaatccagaaaaaaaaaa

SEQ ID NO: 64473 - DNA, 3029 bp, Homo sapiens
aattcggcacgagggacggtccagctttagctctctgctcgccgccgccgctgtcgccgccacctcctctgatctacgaaagtcatgttacccaacaccgggaggctggcaggatgtacagtttttatcacaggtgcaagccgtggcattggcaaagctattgcattgaaagcagcaaaggatggagcaaatattgttattgctgcaaagaccgcccagccacatccaaaacttctaggcacaatctatactgctgctgaagaaattgaagcagttggaggaaaggccttgccatgtattgttgatgtgagagatgaacagcagatcagtgctgcagtggagaaagccatcaagaaatttggaggaattgatattctggtaaataatgccagtgccattagtttgaccaatacattggacacacctaccaagagattggatctgatgatgaacgtgaacaccagaggcacctaccttgcatctaaagcatgtattccttatttgaaaaagagcaaagttgctcatatccccaatatcagtccaccactgaacctaaatccagtttggttcaaacagcactgtgcttataccattgctaagtatggtatgtctatgtatgtgcttggaatggcagaagaatttaaaggtgaaattgcagtcaatgcattatggcctaaaacagccatacacactgctgctatggatatgctgggaggacctggtatcgaaagccagtgtagaaaagttgatatcattgcagatgcagcatattccattttccaaaagccaaaaagttttactggcaactttgtcattgatgaaaatatcttaaaagaagaaggaatagaaaattttgacgtttatgcaattaaaccaggtcatcctttgcaaccagatttcttcttagatgaatacccagaagcagttagcaagaaagtggaatcaactggtgctgttccagaattcaaagaagagaaactgcagctgcaaccaaaaccacgttctggagctgtggaagaaacatttagaattgttaaggactctctcagtgatgatgttgttaaagccactcaagcaatctatctgtttgaactctccggtgaagatggtggcacgtggtttcttgatctgaaaagcaagggtgggaatgtcggatatggagagccttctgatcaggcagatgtggtgatgagtatgactactgatgactttgtaaaaatgttttcagggaaactaaaaccaacaatggcattcatgtcagggaaattgaagattaaaggtaacatggccctagcaatcaaattggagaagctaatgaatcagatgaatgccagactgtgaaggaaaatataaaaaaaaaagtcgactgctatgctcaaaaagtaaaaaaagctcaacagttaaaatctaatgtttgttttctttcctgttaaattataaggatatgcacgtttgttctggaaaagatagaatttgtctctaaaagacttgaaattgtaattaaaatggcaagctaatcaaacataagcttcattaagtgggattctaagacagtctgtgtttttatatttcaagggtttaaccctttgagccttacatctcattcactgtctttctccaagaaaagtattttgggcggacagtcagatcaagcagtaaaattagctctttcaaatcttcttgtcatgtaaaatgaagctagtctgttttaaaatttttagttttggattgtatactaatgaaaatcttaatgatgtttttgatttttatatacttattttaaagaaaatcttatatagtacattttacaaaaattataaaaaatgaattagtactggcgaggactaaatgaaacaataatttttcattttgataactagctttccaggtggacttagccataggaaaatattactaatgtaatttaacaaattgctgcatgtattccatttaaaaatatgtttaaattgtcctaaaacaaaataattttctccctaggagtatgcatttggctacagtgttttgaaacagaaaccttagaataggtcattggtatgggctgaactgtgtatcccccaattcatttgttgaggtcctaactcccatttcttttgaatgtgactgttcggagatgaggcctttaaagaggtgacttaagttcaaaggaggctgttagtctaatccaacatggtgtcctttggacataagagataccagcaatgtgtgcacagaacaaagaccaggagaggacacagtgagaaggcagttatctgcaagcaaagagagaggcttcagaagaaacaaaatcaccagcaccttgatctttgacttctaatctccagaatagtgagaaataaatttctgttgttaagccgtccactgtgggaggccgacgcaggaggattgcttgaggccaggagttcaaggccagcctggacaacatagtaagaccctatctctacccccctaataaattaatttaaaaagccccccaatctgtggtattttattatggcagccctagcaagctaatacagtggtttgagaggctgggagggttgaggggaagataaacttttaaaaagctcttatctttcatttcaatcagttaaaaatacttgctcagtgtaacaattttgcttctcagcttccactctaatattgttgtgccattaagcaatttagctaatcctgacatttcttagattcataatgttaggagcatttaatctgtattttacaagttaggaagcagaggatcagagatgggaaaggactagcccaaggccaacattaacaagccctctaacaaaaactttacaatacatttatgttgaatggaactccaagatctcacctctccatccaggaatggagtccatgtaatcaaagtgaacttaaaaataggacagtttcaacaagtcaggagattcacagcaactgatcaaagggagtccagtcaacgtgagcaagccgtgattatgatgaggaagccccccctgctttaattccacacagggaacgtaacc

SEQ ID NO: 64474 - DNA, 3165 bp, Homo sapiens
ttttttcagagtttttcagggttcatttcattttgtaagcaataggatgtaaccagagatacttctattggaatacttcagtttatacactacaaatcataatgttagcacacaacaaactttacatagtttctacaactgtcatttgcgattaattcatcctccatcatactacagataggtaacttcaaaataagagatgagtttattttccaaatgtgaaatcatgtcaacattttaatccaaactcaatatatttaacacacatatttaagaggcttactacatcatgcaattggattagaacacctttacaatcctatgaagagagtacagtgcagaaaagtcatatctttacattaaccaacaaaatcttagcaattatattttagtcttacatcactacagggtttaaaagtgatcgctgcaaaatcagattttaaaaatatcttccacaatcatgatttttgtccttcactgttcaagtaaaatcttgtgtcatccagttgcaaaatcttattattgataacacgtatatgtgtatacaaaccacactgcaaattaacaaaagaattgtacccagtcaggctgacaaagtttaataaagggacacttctaatctaatcatttcatcttgtaagtaatattgttattctctacatctattcatttgccatgttttaggaaagagcacattcatactttcaaacatgcaaaacatgataaactagaataaatggcacttgaaaaaccattataaaagagacttgcctgaagtcgtttcatttgacaaaaattaactaaaaaaaaggctaattgtaaaaaataaaataaaataatccattatagagaatattaagttgaacttcatttgccgttttgtagaactacaccacttctgcaaataagtatgttaattggtctgttctttggtgaaaacagagctatgatttcatagttatgttgagggagcagttagcaggtgtgctccacaacaaaaagaaatcagacaatctaaaggacattggctactggttgcctttattctcagcaccaggaatggagaaatcttcagcaaaacaagctcctaacaccagatattctctttatttaaaattgttcaacatgacagaatgcctgttgcgtaacctggcttttttttttaaaacacacagctttttgctctttcttcttttacaaaaagtggtttactacatatatatatatacatatatagtagcttacaccagtggtgacactgcaaagtcaatttcctgggcatttgatggcatcaaaataccattttgaaatatacagaacaatacgaaatgcagttcatcacttgcagttactactgttccacagaagtcaggtcagctctttggttttggtgcagtacttaaaaaattaaggcaaaactcctcctaaaatgtatttccctccaagcccttatttgcttatgtttacaaaataactgtcaacaaaatgctaccttttttaaaaaaagccagttgattaccaataatgtcaatgccaatgatgtgggtgataaagttattctgtatttccaagtacatacagatattctgtaacctgtttagtttatttcaccaaatccgacaactgattaaaaacagtttattagaaatgttcctataagtgatccaatttatcaaaatagtgttttctttctcatggaagcttcaattattttgctatttattatgaaggtttgtattaaaaccccttctttattttttacaaataacttgtcttgatatgaaaggagttctgagtgtttacagctcaagggatggatctgttgggttttctcatctggggttgaatatggcttcattcttgtaagagattattgccgtctgccctgaagtggactgttgcctcagttcactacaacaagaagtgagtgtaaccttctgcccccgtaactataacatccatccagatccgcatggcttctggcgatggggctaccatataatagattctgtcatgagtcttgacgctaaaggtgagtaacggattaggactcttattagcattcttgaggtgatcataatagacttcttcaatggcttgaaagtatattactcctttcaatttagtttcatgcttgtctgcataataagagaatgttcgcttgttccgatcaaaaacaaaccaacgttttttccacgttttaattttcccacccattttgatgaggaatcctcggcaggtcttctctgtgattgatacatggtaacaggtgtcaatattgtggccagcagtctctacatggctccgcaaatcaaagtcttccttccggacaggcaggtagcgtgtcaaaggacgagcctgtgccctttgtctctcccttatttttacttccttttctattaacttctgcctctggctagtttcttcctgtaatcgtttttccaggatttcccggcgtcgtttttcttcttccagggctcgttttttggcttccatttcccgttccctggattcgagcagccgcgtcttttctgcatgagcctgcttcaaaagtctctccatttcttctattctagcaatatttgaagtgctggcactagagatgttgtctggtgagcaagcagagatgctggtctccatgctatcagagctatcgaggctcagagtatcaaaggcctggtccttgtagctgtgatctggataatggaaactattcaagtagacatttgattcagatgctgtgcggttataaaattcagatttctgcctgtgtccttcactcatctgttggtgattataacctctgagcatcctccgagattctgagtctttggccatggctgccagtgaggaagggagcacacttccacagctgttactctgtcctaggggcagatgggcctttggggtgatgcttctccccatagtagcactgctgaaatgtggggagatggaagatgtggttttctttcgaggcaaagtatcactcagatagaggccttctttatgctgttttttcctttcttccagacttctaaagtgctctttactctgtggctggctcgccagcacagctgtggcaggctcagtggcaacagcatcagcatcagcaggaaactgagtggaaggggatagattcgtggaattgccacacggctcattaat

SEQ ID NO: 64475 - DNA, 2659 bp, Homo sapiens
gaaaaaaggaacaatttttcagaagtccttattggtgtttggtcttaaaatgaagtataaacattttaactaacttacagatttccattcagagaaaacagtgccatttggtttttgcccttcctttgaaaaaaatgcatttggtaatcgttggtttaaaatgaactttattacttcataggatgaaaggttaatttaggacataaacaaacaaacagtagatataatgggggttggtagagcctgaataaaacttagtgagtgattttccttctcagataaaaggtatagttgatttgattttccttctagataaaaggtatagttaacatacttgatgaaccattcagaaataacaaacaaaaactcaatcttaaaaaaaaactacatctctttattgcagaatttatacttgtttgaaaaatacaaaatgtagcgttgataagattgaagcatgttgaaaggtaagtacagggaaaggtcctttcagaatgactgcaacagtgcagcaaggattcccattccccgcctaaaggacaatacctttttaatagaaataaatgagttagttagttagatttttattacagattgaattaaacagttagttacaaagacattctctgatacattcattcatagaggtcttaacgtataaatacatagtaaatatcctataaaatggtaggcaatctcattgtgcattatctttttgtgctcagacttgacttcacattcagtctctacatacagcttgattagaatcataaaaacaatatgaagacgattgcataaagggatagtttgacaaagcatattcagatattgtaacatttatggtgggtaaaaatgtatcttttgaaacaatatattagactccatttttagctgaaatgaaatttactgattcaatctttttaagaatttgtggatgtttaaaggaaatgtatattagcatgaatgtgtaactattaaactcctccgcaaagctattcagctgttgctaaaaaattgaagtttaaatataaaaaattgaagtttaaatataaatgtgaaaattcggaccttttttccccagatatacatgctgaagataatttgatccaataagttaaactaagtagagatttatggaattaactcatcaataggaagagtacacatcaataaaagtaaattttttttaaaaagtatatacctttttgatgttaattttgttataaaagtatctcaaaacatcattacaacagtgtgataaataatatacaaatgatctcttaaaataccatgaatagggagccagcttccccaaaaatgttattctgttaacatcagtatcttgctttcttaaaatgactttgtaaaacctgataaatactctcagcaatcttttctaataataaacatctagtattgctattaattagattgtagacttttatacatagtaaacaaaatagctttaaatgaatgcggcatagtattttcaatgatttttgtttgcaatgatgaaacagaaggtaactttgtgcagcatctaccattttccaggaattgtagtcccacattcataccactgaacataattgatttgggtgtgaccacctatttctccaaattggacaggttcctggcgaactgctctgaaataaccttctttgattggtaactggtcagaagtgagttgctgcccagtgcgtccatctaaaaatgaatccacaaactggcagtgatcttctccatggcccctctgatcacctatgttataaaattttcctgtgagggagtcgctcaagtaaatcttgtatctgagagagttgcacagctgcactcctacaaattttttataccatgtccttttgacatattgtttgcccttacactctgagtaagagtctgaattaaagggtctttcagtccagatggcatctcttcctgcagaaactggctcactcactcttgggtccgctgattcagtactgaatgccactgtgttgctgaccgggccttcaccaagcgggtttttgggtttcacctggaattcataactcgtgtttggtttcagattttctactgtggaaaatgtctgatttgtcatttgaatggacttgttcttcccactgaatgacccattttctctggatataacttcatattcagtgacagtgtcatttagtggcttttcccagtccaagatgacaaatgaggggcacccttccacggtgaccacagtgaggttggtgggtgggttctgtggtgggctggtggcattcccctctgtggcctcctctttggggaaccgtttgacagagtcagtaatggagcagggactgttgtcaggcttttggatgtatcgcacatgaggtcctttgaatcttggcttcccaagaggatcagtttctcttgttgggcttgagctaaagtcagttatattttccagttcttctccagaggcaggaactgttggttgctttatatctgtctctattctctccaagggagttccagtaggcctgggtgttgacctcaggggtggtgtagttattgggcctgatgaaatgattcctgcacttcctggctttccagtgacattatttggtggtaaaggttttcttcgtgggtgtgtaggtctgggtggcaagggtgggcggccgacgcg

SEQ ID NO: 64476 - DNA, 1214 bp, Homo sapiens
acatatgcatcgcatcaacagcctgactggagccaatataacggtataccatacttttcacgatgaggtggatgagtatcggcgacactggtggcgctgcaatgggccgtgccagcacaggccaccgtattacggctatgtcaaacgagctactaacagggaaccctctgctcatgactattggtgggctgagcaccagaaaacctgtggaggcacttacataaaaatcaaggaaccagagaattactcaaaaaaaggcaaaggaaaggcaaaactaggaaaggaaccagtattggccgcagagaataaagataaacccaacagaggtgaggcccagctagtaatcccttttagtgggaaaggatatgttctaggagaaacaagcaatttaccttcacctgggaaactgatcacttcacatgccattaataaaacccaagatcttttaaatcaaaaccattcagcaaatgctgtaagacttaattctaaaatcaaggtgaaatttgaacagaatggttcaagtaaaaattctcatctggtctcccctgctgttagtaacagtcaccaaaatgttctaagcaactactttcctagagtatcatttgccaaccaaaaggctttcagaggtgtgaatggatctccaaggataagtgtaacagttggcaacatccctaaaaactcagtctcttctagttctcagagaaggggttcatcttctaagatatccctaagaaattcttcaaaagtaacggaatcagcatctgtgatgccatcccaggatgtgagtgggtctgaagatacattcccaaataaacgacctaggctagaagataagactgtttttgacaatttttttatcaagaaagagcaaataaaaagcagtggtaatgatccaaagtatagtacaaccacagctcagaattccagcagttcatccagtcagagcaaaatggttaattgcccagtttgtcagaatgaagttctggagtctcagattaatgagcacttggactggtgccttgaaggtgacagcatcaaagtcaaaagcgaagaaagtctttgaaaaaggtttcaaagtctcaagtaccacctgtattatctcactaatgtgctatgtcagccagtcaggaagttctggttaatactaagatttgtaggttataatctagttcacataaccaatagaaagtgtctattttatatatacgcatata

SEQ ID NO: 64477 - DNA, 2267 bp, Homo sapiens
ttttttttttttagaatgttagaattcctaaaatattttattgagaattagaagtcacgctaattttctaatacaatttaaatcaaatgataatttatatctaaagggtttttacaaaatacgaaaattttacatacataagaagaacagtataactgagcaacttacattctaattaaaactttgttgcaaaacatgtttgtgactactcgagatgctgctttcatatagtaaagttataagaaaaacaatcatatatatgcagggttttaaaaaaataaactcataaaaatacaggcttgagacctattttagaattaagtcaaaacaagccaacaactgaattgtacctatggccagtgggtggcactaaaatacatttgaggcttgttttaactgtttgttttctcaaggcagaaaaacaccagtagtttcagtctcattgccctaatatggaattccatattttattagagattacagagtaaatagtttcttaaggtccattttttttttttatcatcactgatgtctgtctccattccctgctccactttgagtatctttctgcgactttttcccacaacctacaaaggtcctgcaagggtaccagaccctcttaactgtggcacagaattgtggtgtgaaacacatgatggcaaacaagaacattttgcttcttaacaataccccatgtttaatgctctggggcagctttttctttgaagcagcagcagaaattcaattttcctagcttgttcaaatatcttatttaatattagagtcacaaattacacattttgttatatttaaatcccttgggccttgtaatcaaagaagcacatgcagattgacttttacatgctgtgtagtattccttaggtgcaatagatagaaagtgaggatatttgtccacctactcagattttcaagatcagattccaccggtttagtagttttcagtggaggagccagtggaatttgggctcatttggaaatcttggcaatcaaaagcattctgagaggcagtgttgcttcaatccaagtattgggggagtttaccatcttctcccagagagcaacttcctctgaagtagagtccatccagtccacttcagtcccataacttttacctgttccaaagccaatacgaagacctcccaaaaattggttggttaatttgtaatggtcccagacagtaagctctacacaggcttccatcagatcttcaggcctgaacccatcatacaccatagtgtggttgaagatagggttggtggttttccctacagctcttgtcttctggcgacttttcctacttgtatctggaaggatggtacatttaacaaaagaatttagatgacttccccttagcagtggtagatcaaggcattccttcacccagatgtgcacttctccagttgtaggaagctttttaccagggactggctctgggacatactggagagctagtttcatttcacctctgttttctgcttcaagggcaactggtgctgtcttccgcttcagagggtaccatctcaattgtttattctgtttgttatcccagtcccatgtttccaaatcaagttccacctcccctaggaaactattgcgcttaaatgtatcccgatgccaaatggacaggttcaatttctgtgtctttaagatttgtttttcaattttataccgcagtatttcgttatacacaggattcaaggttttcttcactacgagtgttttcttcttgcccattttgcctttgtctggtagcaaataggcctttacatatgggtctgaacgctgtttttttacatccgctgctgctaagtccttacactgggccacaaaaacatgcaactccttcagtgactccacatattcaattgcaaactgaatatttcctttaacttccagattgccaaagtctccactataaacactcatcacactgccactcacagaagacaaggacgtcatgccagaggagctgctaagattggttaaagagctcgggctcttcttgtgtctgctgagctggtaactgctttctgatgctgtatctgtttctctgtcatcactctcatcttggagaaatgctggaacagacttgctcatccttttgagtttgtcagggtgagaaaatggattatcaggttgtgtaggcactgtggaaacatcttcagcactacgcactaatttttctggctgattatctacttttgcttgatctgttcagaagaaattaacaaatggttaacatggct

SEQ ID NO: 64478 - DNA, 1137 bp, Homo sapiens
tggagagaaaccatttaaatgtgaggaatgtgggaaagaattcagttggagtgctggtctcagtgcccatcagagggtccacacaggagagaaaccctatacgtgtcagcagtgtgggaagggcttcagtcaggcctcacattttcacacacaccagagagtccacactggagagaggccttacatatgtgatgtctgttgtaagggcttcagtcagaggtcacatctcatctaccatcagagagtccacactggagggaatctgtagaaatgagaggtgtggttcagccttcagttagagctcacatctttgtctccgttgggaagtccatgctgatgattgtgaaaagttcctttaaaactagaagcttcaaagaatcttgacaggaaagaagtctctcaaatgctgtgttttagacttggttaggacatgaattctttacaaacgtcatatttcacagatgcgagaaaactttgttctgtaaatatgatcagtgtttatatcagagtaccaggtgtcccggttctcaagatgtaacacagcagaaaagtcttgtcggagtctgcacaggagagaggccttcctttaacaaaagtatgattgacagaaaaaatggatgtcaactaaaatgtaacctctatgtaaggaggtgtttttcaccactctatctctaccatgtagaattgtgcttggctcataatagggcccagcaattactgaagaaagtgaagaaaatacctataattaggacaaatacttgaaaattctagtctgttttctactctaaatttatattaatttatattcaaaaggaatcctgcaagtagccttaatgacgttagtttcagtaagtactgaaaagtatataatactgccatccatactaacacaaatttggaaaaaagacatgaatggctcccatccttcagccttagttctttgtacagtgtatcatcagttgtgtacagtatgatttttagtgtcagtttatagactgaacaatactgtttttatctaatgtgaccctgcaatttacatgattagaatttttggcccctaagctgtactgtaactctgaaagtgttaaaagtagttactgatgacaaaaagtttcttagtaaacttgaattgttaaa

SEQ ID NO: 64479 - DNA, 1839 bp, Homo sapiens
  misc_feature (1)...(1839): n = a,t,c or g
gagattgcaaacctcatcttggctgagaactgcgaggctgccctggctcttcatctctataggggaggcaggcttttgcaaggccaccgaatcccttttggagtcatctttggtggaactgatgtaaatgaagatgccaaccaggcggaaaaaaacacagtcatgggcagagttcttgaggaagccagatttgctgtcgctttcacagagtcaatgaaggaaatggcacaagcgcagtgggtcgatccagtgtttacaagggaagtgaaagccaaagtgaaaagagccgctggggtacgattgattggagagatgcctcaagaagatctgcacgcggtggtgaagaattgcttcgcggtggtgaatagctctgtctctgaaggcatgtcagctgcaattttggaggcaatggatttagaagtaccggtattggccaggaacatccccgggaatgctgccgtggtgaagcatgaagtcacagggctactgttttccaatcctcaggagtttgttcatctggcaaagagactggttagtgatcctgcattagaaaaggaaatcgtagtgaacggaagggaatacgtgagaatgtatcattcatggcaggtggaaagagacacctaccaacagctcatcaggaagctggaaggaagcactgaagattgagggccccgcctcatcagacacctgctctctgacacacagctctgggtgcacactcagagacagagttctggatcacgtgggcccagtgcagttcaaataaaaccagcctcagcggaatcctagaaaatgttagtcgtgagtccccagagccactgcattcatcccatatccttctgtgcgttcagatgctgtcccaggcgtgttcaccagccagtcctgatggaggtgcatgagtgactgggttgactgggacagggaaaggggaactggttttcagggaatttgggagagaatttgattacctgccttagggctttggtgtggacaatagaggcttattttcaagcagtcatggttcagactcctcccgcctgccttctgaccaacctctccccatcgttgccagtttgaaaggcaaaagcaaaacagacgtgtcagctgagccgagtcctcgcaggatttttgttgtgatctcaggactctgacaggcacgtgggtgacccgaggcttctctgaacactagaaagcgctgtgagtgagctcacgcccggcacagctcacttttcaatggtggaattgaaagttgtgctttttagaaaagtggccaggctgcccgcaggccccgcccacctcttggctgaatttgagtggaaaaccaggaaggaacaagcgccacgtcacgcatagcctgcaaatcgcccgcgtgaccctgagatggaggcctgaggctttgggtccagggtgggctcttccccttcccacatcagggacccggggatggatgtcggaagggtcaccagcctccagcctttggcaggatggagcttgggtctgcagggctttgcagccacacagcgaggtcagtccggggccagccgcgccatcatggtaatggtggcctcgccccatccatgtcatccatgtcacatgaggacgtgcagtctttccttgttccttttccttagtgggaattttgcctggggagaacctccacttgaataattgaaatttttttgcattgcctgttgggatttcctttacggacaatggggggaacgcggtgtttcccacctcttgtgggtagaaagcagtctgctttgaggaggcgagaaggcaaagcanggggcaggggctttgctgtgggaagcgttcggtgaaagcgggtttcgacgc

SEQ ID NO: 64480 - DNA, 459 bp, Homo sapiens
gggttcaagacccacttcttggtctgtgggcctggggaggggtgctggtcaaggagcatgggtggtgacagaggtgtctgggggcagtgtgagatgaatcagatgagcggagaacctctggacaagctgaacttcgaggccatcaacttctgtcggggtctgggcagccaggcatccaccgtgactgagattgtgaagcagcaagaccccctggtctacaaggccatccagcaaggcatcaatgctgtgaaccaggaagccatgaacaatgcacagaggattgaaaagtgggtcatcttggagaaggacttttccatctatggtggagagctaggtccaatgatgaaacttaagagacattttgtagcccagaaatacaaaaaacaaattgatcacatgtaccactgactgctttgatggagctgctctcagctgttctgatgccttcagcaggaagac

SEQ ID NO: 64481 - DNA, 774 bp, Homo sapiens
cactataatgattggtattaaagctgtttttttttctttttttaaaaatacatgtcaaaattttcttggactcccctggcaagcaggtatacttcaagagcacgggagcttttctttcaagagtccacatttccaggaaggctggtgagagcaaacgagggactttcagtaacctggcaaggcagaataaagtgaccaagctggaacgaatccccctgtgccctggcttcatcgggactacctgcaggctgatcaggggtggccagccacaaacacctcgagggccttccatttcacttcacactggcaggcacttactcagccctgttaaacacacggttagtgccatatgcttgagctgagatcactaggaggggcagcgctgggtaactctttgggacttcacatttccagagggaggcatcttgtttttcccctcagctgtggaaattctttttggaaagcttaagagcaaggctgccctttgcacacaaggacatgctgaccgttatacctgctgtagatgcctgtctccgttctcattggcaggactactctccgacccattactgcttcctgattgctctttttcattcaacaaagctgtggcatacgctaacgtgtcctgcagaagattcaaacacaagacgacaaagttagggcccattcagtggcagcagcaaccgccagggaagactacctttcatctgaccttcagtgggaccggaggcctgagagtgaggccttcatcacagtcaccagaaccccctcaac

SEQ ID NO: 64482 - DNA, 843 bp, Homo sapiens
  misc_feature (1)...(843): n = a,t,c or g
ttttttttttttttgtaggtcagagacagctggatcagctccagcccacatttattacaaaatagtgaccgcagttctggtatagaaaagatccctgacagcccagtacacctgcaacggcccccaccccacagagttcctctctcaggtgcctcaggtgtggaagttctcagattcgaaggtttcctgccaggagggcgctgtaccgggcagttgtgaggggcaggtaggcacctacagcctggtccagaacgtacagtgggtcagacagggtgctggggtcgaagccctcatttgccatccgaactttctgctgtttgaaggtctctgtggtggccaaagactcctggagcctgaggaatcggggccgggcataaggtggcaagttctcagacacgtgggtgtagagctgcataaggtccaaagcgtgggggggacgcagaactagggctgccattccagccctgccttcatgccctggcacagtgactccatagacgttcacctcctgaagaaaatctagggcctcgaagacctctgccacctcggttgtggccacattctcccccttccacctgaaggtgtctccagtacgatcatggaagcggagaaaaccttggtcatcgcagaccagcaggtccccagtgttgaagaaaacatccccaggccggaagacatcctttagcaacttcccctgggccagctctggcccgccagcatagcccaggaatggggactgctggcttaccggggccaccagcagccctggctcacctggcagagtctccagggtcaggagtggtgtgcctaggggctacaaccagtgtctcaaantngcccact

SEQ ID NO: 64483 - DNA, 851 bp, Homo sapiens
gtgactgtttctttttttgccatcacaaaataatattttagtcaaatttttaaaatcttattcagaggactttacctcattttttccttttttcagaactgtgacaattgagaagtgcaggaatagcatctttgtcttgggccctgtagggactacacttcacctccacagttgtgacaatgttaaagtcattgctgtttgccatcgtttgtccatctcttctacaacaggttgcatctttcacgttcttacgcctacacgcccacttattctctctgggaaccagacagtaacttttgccccttttcatacacattacccaatgctagaggaccatatggccaggactggccttgctacagtgcctaactattgggataatccaatggttgtgtgcagagagaacagcgacacaagagtcttccagcttttaccaccttgtgaattctatgtatttattattccctttgaaatggaaggggacacaacagagatacccgggggtcttccatctgtatatcagaaagcactgggtcaaagagaacagaagatacagatctggcagaaaactgtgaaggaggctcatttgacaaaggatcaaaggaagcagttccaggtactggtagagaacaagttttatgaatggttgattaatacaggacatcgccaacagctggacagccttgtaccccctgcagcaggctccaaacaagcagctggataaggatcttacatgcagacactgggccctggaaatacaaggataaatggaggatggtgctcatcttgaaacttgaaactaaattgggaaggtgctattgctgcttaagagacattgggacttttctgtc

SEQ ID NO: 64484 - DNA, 662 bp, Homo sapiens
gaagatacaagtcacggttgatgatcctgtcacaaagccagtggtgcagattcatcctccctctggggctgtggagtatgtggggaacatgaccctgacatgccatgtggaagggggcactcggctagcttaccaatggctaaaaaatgggagacctgtccacaccagctccacctactccttttctccccaaaacaatacccttcatattgctccagtaaccaaggaagacattgggaattacagctgcctggtgaggaaccctgtcagtgaaatggaaagtgatatcattatgcccatcatatattatggaccttatggacttcaagtgaattctgataaagggctaaaagtaggggaagtgtttactgttgaccttggagaggccatcctatttgattgttctgctgattctcatccccccaacacctactcctggattaggaggactgacaatactacatatatcattaagcatgggcctcgcttagaagttgcatctgagaaagtagcccagaagacaatggactatgtgtgctgtgcttacaacaacataaccggcaggcaagatgaaactcatttcacagttatcatcacttccgtaggtatgtgtgacatacaaggaagggatcctaataaaacatgaatgcatgcaaaaaaaa

SEQ ID NO: 64485 - DNA, 1386 bp, Homo sapiens
ggcacgagagcgcacttccctccggagacgttagaaagtgcattttggcgtcacttaagggacggtgtagtgagttccggcttcactggttccaattctgtcccattgttcgttgcatgtgaacttttctggatttcagttctttcatccggggcctgccggtgccgtaaacggccattcaaagggaaaaacgaacacgcacaccaaagcgctagcttgcgttcctgcgcatgcgcagtgacccgagcggagaggccgaggcgtagcctaagcgtgggattccgcgcgtgcgctcggctccgcctggtgcggccgcggccgggagggactggattatgtcggccccgtttgaggagcggagtggggtggtaccgtgcgggaccccgtggggccagtggtaccagaccttggaggaggtgttcattgaagttcaggtgccgccaggcacgcgcgcccaggatatccagtgcggcctccagagccggcatgtggcgctgtcggtgggcggccgcgagatcctcaagggcaaactctttgattctacaatagctgatgagggaacatggactttggaggacagaaaaatggttcgtattgttcttacaaagacaaagagagatgcagcaaattgttggacttctctactagaatctgaatatgcagcggatccttgggtgcaagaccaaatgcagagaaagcttacattagagagattccaaaaagaaaatcctggttttgacttcagtggagcagaaatctcaggaaactacactaaaggtggaccagatttctcaaaccttgagaaataactgctttttttcctgcattctgtggatcctagcagatattgccaacttaatcagataaacagattatgtaatggaagaaaaatgcggatgcctacagttaacagattgcaaaatgtatcttaaaatggttctaaaaattgcattcaaacataatttacataggaaatgtactgtgggaactattctatggatatatggtaaagttgttttggacttgtttttgctcagcatgaagttttatatgctgcattttactaattccatatttaaccatatttttaatacaaaagaacattagagtatagatcatgtgaaatgaagggtgcctttggggaaaattaactttttcttttgataagtatgatattcaataaaattttctaaataggaattgtgtacccctttgtctaagtataacaattcacacaaaattatagtgctgaaaacaattttaataaaggaaaaagttaattttccccaaaggcacccttcatttcacatgatctatactctaatgttcttttgtattaaaaatatggttaaatatggaattagtaaaatgcagcgtcgacgcggg

SEQ ID NO: 64486 - DNA, 1978 bp, Homo sapiens
aggcgtgaattcctactcatgtcctgcactgaaatctaggatcggaaagaatccgtttttatttgaaaattccttttcagaaaatcaggcatttgcttctcttaagacggttttagagtctttgccagaagacgtacggtttaacattgaaataaaatggatctgccagcccagggatggaatgtgggatggtaacttatcaacatattttgacatgaatctgtttttggatataattttaaaaactgttttagaaaattctgggaagaggagaatagtgttttcttcatttgatgcagatatttgcacaatggttcggcaaaagcagaacaaatatccgatactatttttaactcaaggaaaatctgagatttatcctgaactcatggacctcagatctcggacaacccccattgcaatgagctttgcacagtttgaaaatctactggggataaatgtacatactgaagacttgctcagaaacccatcctatattcaagaggcaaaagctaagggactagtcatattctgctggggtgatgataccaatgatcctgaaaacagaaggaaattgaaggaacttggagttaatggtctaatttatgataggatatatgattggatgcctgaacaaccaaatatattccaagtggagcaattggaacgcctgaagcaggaattgccagagcttaagagctgtttgtgtcccactgttagccgctttgttccctcatctttgtgtggggagtctgatatccatgtggatgccaacggcattgataacgtggagaatgcttagtttttattgcacagaggtcattttgggggcgtgcaccgctgttctgggtattcatttttcatcactgagcattgttgatctatgccttttgggcttctcagttcaatgaagcaataatgaagtatttaactctttcactacagttcttgcaagtatgctatttaaattacttggccaggtataattgccagtcagtctctttatagtgagaaaatttattggttagtaatataaatattttaaactaaatatataaatctataatgttaaacatatgttcattaaaagcatagcactttgaaattaactatataaatagctcatatttacacttacagcttttcatttgatcaggtctgaaatctttagcacttaaggaaaatgactatgcataattatacctgaccatgaaaaaaataagtacctcaaatgcatgcatttgcactggtgattccaactgcacaaatctttgtgccatcttgtatataggtattttttacatgggttgacatgcacacaacaccattttcattcagtatgaaccttgaggctgctgccatttttccacttaaccaaaccagcctgaaggtgaacctcgaaacttgtttcataaatctttcaaaagttgttttacatcaatgttaaaatttcaaaatgctgcagggtaatttaatgtataaaatattagtaagaaaaagtatgtattgcatacttagtagaatagatcacaacatacaaattcaattcagtgcatgctttaggtgttaagcatgagattgtacatgtttactgttaggtccttgcatctgtggtgctaggtgagtatgagaagatgtcaaggactggacgtattttgttgcctaaaaaaaaaaaggctgtttgtaggcgttttaaatatgcttattttgtgtgtctctcactacctattacacactgttgctttgtgggtttgttttgtatgtgcgtgtgttatacagtagttaaatttccatgcagaaaaataaatgtcctgaattctcatattagtattctttattgtatatcatgcatgtaatttatttagaaatgtaggtcttactaaatgtatatgcatgtatttcagattatactaggatttcttggattagaagcagattgtgttaacgtgtaacttaaagaatgaatgttaaataaaatgat

SEQ ID NO: 64487 - DNA, 1594 bp, Homo sapiens
atgaccacaggcaccgagatcacagtcatgggcgaggtgagaggcatcggtccctggatcggcgggagcgaggccgcagtcccgacaggagaagacaagacagccggtacagatctgattatgaccgagggagaacaccatctcgccaccgcagctacgaacggagcagagagcgagaacgggagagacacaggcatcgagacaaccgaagatcaccatctctggaaaggtcctacaaaaaagagtataagagatctggaagtcgctccccaagtagggagaagaagagagctcgttgggaggaagaaaaagaccgttggagtgacaaccagagttctggcaaagacaagaactatacctcaatcaaggaaaaagagcccgaggagaccatgcctgacaagaatgaggaggaagaagaagaacttcttaagcctgtgtgggttcgatgcactcattcagaaaactactactccagtgaccccatggatcaggtgggagattctacagtggttggaacgagtaggcttcgtgacttatatgacaaatttgaggaggagttggggagcaggcaagaaaaggccaaagctgctcggcctccgtgggaacctccaaagacgaagctcgatgaagatttagagagttccagtgaatccgagtgtgagtctgatgaggacagcacctgttctagcagctcagactctgaagtttttgacgttattgcagaaatcaaacgcaaaaaggcccaccctgaccgacttcatgatgaactttggtacaacgatccaggccagatgaatgatggaccactctgcaaatgcagcgcaaaggcaagacgcacaggaattaggcacagcatttatcctggagaagaggccatcaagccctgtcgtcctatgaccaacaatgctggcagacttttccactaccggatcacagtctccccgcctacgaactttttaactgacaggccaactgttatagaatacgatgatcacgagtatatctttgaaggattttctatgtttgcacatgcccccctgaccaatattccactgtgtaaagtaattagattcaacatagactacacgattcatttcattgaagagatgatgccggagaatttttgtgtgaaagggcttgaactcttttcactgttcctattcagagatattttggaattatatgactggaatcttaaaggtcctttgtttgaagacagccctccctgctgcccaagatttcatttcatgccacgttttgtaagatttcttccagatggaggaaaggaagtgctgtccatgcaccagattctcctgtacttgttaaggtgcagcaaagccctggtgcctgaggaggagattgccaatatgcttcagtgggaggagctggagtggcagaaatatgcagaagaatgcaaaggcatgattgttaccaaccctgggacgaaaccaagctctgtccgtatcgatcaactggatcgtgaacagttcaaccccgatgtgattacttttccgattatcgtccactttgggatacgccctgcacagtaccaaaaactgtggaagagttatgtgaaacttcgccacctcctagc

SEQ ID NO: 64488 - DNA, 1077 bp, Homo sapiens
ccacagctatttacaggaattctttctccctggaaaggactactgctgtacggccctccaggtacaggaaagactttactggccaaagctgtggccactgaatgtaaaacaaccttctttaacatttctgcatccaccattgtcagcaaatggagaggggattcagaaaaactcgttcgggtgttatttgagcttgcccgctaccacgccccatccacgatcttcctggacgagctggagtcggtgatgagtcagagaggcacagcttctgggggagaacatgaaggaagcctgcggatgaagacagagttactggtgcagatggatgggctggcacgctcagaagatctcgtatttgtcttagcagcttctaacctgccgtgggagctggactgtgccatgttacgccgcctggagaagaggattctggtcgatctccccagccgggaggccaggcaggccatgatctaccactggctgcctcctgtgagcaagagcagggccttggagctgcacacagagctggagtacagtgtgctgagccaggagactgagggctactcaggctcagatattaagctcgtctgcagggaagcagccatgcggcccgtgaggaagatctttgatgcacttgaaaatcaccagtcagaaagcagcgacttacccaggatccagttggatatagtaaccactgccgactttctggatgtgctaactcacaccaagccctccgcaaagaatctggctcagagatactcagactggcaaagagagttcgagtctgtctgaaaccacatttaccctgacctggccacaaaggcaaccacaaagacctcctagtttattaatgtccgtgggagaacaaaatgattggaatggaaaagagaaaattatttttgaagactggattaacttgagccactgtattgttttggatagctgagatatatttattaacttaccattatcgatgtcagcaaaatattgagagtttcagttacatacatatatgtgctattgggtcatacaatggagatttttctgacaattagactccataaaattttaatgaacaaa

SEQ ID NO: 64489 - DNA, 375 bp, Homo sapiens
  misc_feature (1)...(375): n = a,t,c or g
ttcgagcttttacatcatagagtctggcgaagtgagcatcttgattagaagcaggactaaatcaaacaaggatggtgggaaccaggaggtcgagattgcccgctgccataaggggcagtactttggagagctagccctggtcaccaacaaacccagagctgcctcagcttatgcagttggagatgtcaaatgcttagttatggatgtacaagcattcgagaggcttctggggccctgnnnnnnnnnnnnnnnnnnnnnnnnnnnnnactatgaggaacagctggtgaagatgtttggctccagcgtggatctgggcaacctcgggcacatggggaatcaaaggtggcatgccaagttcaactcagggctgaggag

SEQ ID NO: 64490 - DNA, 1538 bp, Homo sapiens
tgcacctctgtgcggagaccaaggatgatgccctagcatggaagacagcactgctggaggcaaactccaccccggtgcgcgtctacagcccgtaccaagactactacgaggtggtgccccccaatgcacacgaggccacgtatgtccgcagctactacggaccgccctacgcaggccctggcgtgacgcacgtgatagtgcgggaggatccctgctacagcgccggcgcccctctggccatgggcatgcttgcgggagccgccactggggcggcgctgggctcgctcatgtggtcgccctgctggttctgagccctgggactcggagcactgacccctgcgcttggattgctagactcctcttcctcctggaccccatcctctaccatccaagccctgtcccactttggccctatcctctccattagctccttccgggtttggaccattccccccactccctacccttaatccccacatgggaagaagctatcatcacaggtacaaacatcgcttgaagtcttcacatctaccactagacacccccaaaatctgttatagacatttatggatacatttcctctaaacacaacagggcacagcaaatacgacttcatttggcttcgagttccccaggcgctgtagacacaacatgaatcgggctctctgctctctccttagggagctcgagtcctggtggggagaacaggagtaaacaaggacttgacaaagctgaagagttatcagtcctttgacaaggacaggtggggcagggagcaagacaggtaggctggaagaacagttattggcaagtatgcagagccgtgaacgtcatggcatgtccaaggaattaaatgggagttcatttgggctggggtggaggctgggatcagaccgtggtgggccttcaagctaaggagcttcctaggtgaaaggggagatgtgagccttctctggagggaagtttcatgattgcatctataatgaatatattgcctgttttgtgaatactgacacatgtccatacctaaaacactcctgagttaagtcccatccttcccacaaacagcttcctggctggtacccatgataacaattgagctgaacctggggacccctggttggggaacaggtgagttctatttgagacttccagccctagaaagctgcctccgtccagaaatgcctctcacaccaggagctcggccctctctttgtagctgtgactgtcaccctctcaggctttgtctcatccttcattctgaataagatggcagtgttctcctctggggcctgatccacctctacaccagcccaggaagccccatctgtgcctgccctcaggtggtccaccagtctccccctttggttcccttccagtctcttccccctttctatcccaatcaccaatagaaatgctaacatccctgcctggtagccagactagcccactaaagctcccctgtaaatgggggctccattagttctgctgccgagactaataaagatttggttggctctagccgtacaaaaaaaaaa

SEQ ID NO: 64491 - DNA, 426 bp, Homo sapiens
tttcgtgtttcagaggcccctcggtttgagtccatcatggaggacgtggaggtgggggctggggaaactgctcgctttgcggtggtggtcgagggaaaaccactgccggacatcatgtggtacaaggacgaggtgctgctgaccgagagcagccatgtgagcttcgtgtacgaggagaatgagtgctccctggtggtgctcagcacgggggcccaggatggaggcgtctacacctgcaccgcccagaacctggcgggtgaggtctcctgcaaagcagagttggctgtgcattcagctcaaacagctatggaggtcgagggggtcggggaggatgaggaccatcgaggaaggagactcagcgacttttatgacatccaccaggagatcggcaggggtgctttctcctacttgcggcgcatagtggag

SEQ ID NO: 64492 - DNA, 5205 bp, Homo sapiens
ggaacctcaacccggtgtgggaggagaatttccactttgaatgtcacaattcctccgaccgcatcaaggtgcgcgtctgggacgaggatgacgacatcaaatcccgcgtgaaacagaggttcaagagggaatctgacgatttcctggggcagacgatcattgaggtgcggacgctcagcggcgagatggacgtgtggtacaacctggacaagcgaactgacaaatctgccgtgtcgggtgccatccggctccacatcagtgtggagatcaaaggcgaggagaaggtggccccgtaccatgtccagtacacctgtctgcatgagaacctgttccacttcgtgaccgacgtgcagaacaatggggtcgtgaagatcccagatgccaagggtgacgatgcctggaaggtttactacgatgagacagcccaggagattgtggacgagtttgccatgcgctacggcgtcgagtccatctaccaagccatgacccactttgcctgcctctcctccaagtatatgtgcccaggggtgcctgccgtcatgagcaccctgctcgccaacatcaatgcctactacgcacacaccaccgcctccaccaacgtgtctgcctccgaccgcttcgccgcctccaactttgggaaagagcgcttcgtgaaactcctggaccagctgcataactccctgcggattgacctctccatgtaccggaataacttcccagccagcagcccggagagactccaggacctcaaatccactgtggaccttctcaccagcatcaccttctttcggatgaaggtacaagaactccagagcccgccccgagccagccaggtggtaaaggactgtgtgaaagcctgccttaattctacctacgagtacatcttcaataactgccatgaactgtacagccgggagtaccagacagacccggccaagaagggggaagttcccccagaggaacaggggcccagcatcaagaacctcgacttctggtccaagctgattaccctcatagtgtccatcattgaggaagacaagaattcctacactccctgcctcaaccagtttccccaggagctgaatgtgggtaaaatcagcgctgaagtgatgtggaatctgtttgcccaagacatgaagtacgccatggaggagcacgacaagcatcgtctatgcaagagtgccgactacatgaacctccacttcaaggtgaaatggctctacaatgagtatgtgacggaacttccctccttcaaggaccgcgtgcctgagtaccctgcatggtttgaacccttcgtcatccagtggctggatgagaatgaggaggtgtcccgggatttcctgcacggtgccctggagcgagacaagaaggatgggttccagcagacctcagagcatgccctattctcctgctccgtggtggatgttttctcccaactcaaccagagctttgaaatcatcaagaaactcgagtgtcccgaccctcagatcgtggggcactacatgaggcgctttgccaagaccatcagtaatgtgctcctccagtatgcagacatcatctccaaggactttgcctcctactgctccaaggagaaggagaaagtgccctgcattctcatgaataacactcaacagctacgagttcagctggagaagatgttcgaagccatgggaggaaaggagctggatgctgaagccagtgacatcctgaaggagcttcaggtgaaactcaataacgtcttggatgagctcagccgggtgtttgctaccagcttccagccgcacattgaagagtgtgtcaaacagatgggtgacatccttagccaggttaagggcacaggcaatgtgccagccagtgcctgcagcagcgtggcccaggacgcggacaatgtgttgcagcccatcatggacctgctggacagcaacctgaccctctttgccaaaatctgtgagaagactgtgctgaagcgagtgctgaaggagctgtggaagctggttatgaacaccatggagaaaaccatcgtcctgccgcccctcactgaccagacgatgatcgggaacctcttgagaaaacatggcaagggattagaaaagggcagggtgaaattgccaagccactcagacggaacccagatgatcttcaatgcagccaaggagctgggtcagctgtccaaactcaaggatcacatggtacgagaagaagccaagagcttgaccccaaagcagtgcgcggttgttgagttggccctggacaccatcaagcaatatttccacgcgggtggcgtgggcctcaagaagaccttcctggagaagagcccggacctgcaatccttgcgctatgccctgtcactctacacgcaggccaccgacctgctaatcaagacctttgtacagacgcaatcggcccagggcttgggtgtagaagaccctgtgggtgaagtctctgtccatgttgagctgttcactcatccaggaactggggaacacaaggtcacagtgaaagtggtggctgccaatgacctcaagtggcagacttctggcatcttccggccgttcatcgaggtcaacatcattgggccccagctcagcgacaagaaacgcaagtttgcgaccaaatccaagaacaatagctgggctcccaagtacaatgagagcttccagttcacgctgagcgccgacgcgggtcccgagtgctatgagctgcaggtgtgcgtcaaggactactgcttcgcgcgcgaggaccgcacggtggggctggccgtgctgcagctgcgtgagctggcccagcgcgggagcgccgcctgctggctgccgctcggccgccgcatccacatggacgacacgggcctcacggtgctgcgaatcctctcgcagcgcagcaacgacgaggtggccaaggagttcgtgaagctcaagtcggacacgcgctccgccgaggagggcggtgccgcgcctgcgccttagcgcgggcggtcggccgagcggcactgcgcctgcgcggagggcgctgggcggggagggacggggcttgcgccttggtgggacctccccaggggcggggctcggggggctccacgccaagggtgggctgcgcctacgcccttgactcagctttcccttttggggaattaggaatggaggatgccccgccctctcgggaggccacgcccaagggcgcgacgaaggaaggagccacatccccaacttgaggccacgcccccagcacctagggggcattttgagccgggatgggggaaacctcgtccctatggaggaggccacatcccggggctctggtaccgggaggcaccacctcatgtcccctggaaaagccataagatgggacccagacccctgggaccccagaccaattgccaagtatggaaatctcagctccctcgagggggggccctgggcaaggggtagggctctctggagcgcccctctaggtggcctggggactggagggaccaggatgctggttggagggtcccggaataccggagtccctttagatatttgtgcaaaaaataaatggggggaggggggaggatgggatttcaaaagcacatgcgcccttgggcgcccaaaccctgggggccgaggggacggctctggttccccacgctgcccctacttccctttgggagtttgcctctccctctcccccaacaaacccagtcctcatatcatagagttcaacacacccatttgacagatggcaaaactgaggcttaaagagctgcttgagacttggccaaggttccaggtgccataccctctgtgcccctcccttaggcctgtgtgccccatggaagggtgggctgagatcgggatgacctgacacagctccctattgctgctaattccccctcggcctcctccaaggggtgggaattccaggccaagacccctacttcgcctttccttctccggctgccaagcaggacctttgccctcagccctttctcctgggatctccatgggggatgccatgagggcctcccaccacaaaagagaatttgggatcccctggtcccaggtttctccatcccttcttccttttccagaattttccaaataggaaagaacagaaggagaccagaaactctaggggggagaaagagaatgagagaaagagaatgagagagagagaaacacaaacacagtgacacagtgagagcttagtctccaagagcctattcattgattcaaacacccaagccacaggatacctcagatggccctcttgccagctggaagctctttctccaatgagcaaagttacagtgacctggctggagttacctggtgcacataggaccttaggggaaagttcagcgtggactacacttgctctgggatctgcttttccacatgtgtgtatggcacgcctttttctgctggattgggaaggacaagattttgctgtgctagggagaaatgaaaacggggtgagctgagtagctgggtttctggaggatagaacatcagatggggaggctttccgaggtgaagaatgagagggaaccacttactagagagaaaagagctccaggcctggggaacagcacgtgcgaaggccaggagagaagaactgttgaaacaacgagaagggtggcacggctggagctgagccagcaagggggatcgtgaggagccttggggttggggagatctgcagaagcatcagaccaggcagggcctcgtacgcagtcctgaggagttttacttttattctaagacagttggggagctccaggagctgttttaagttggggagagactggattccagcctgcaaaagctgttttgtgaagactaaaaccagtgaggagaggtggaggtgctttggggacactgaaatggattcttggaaagattctgaaggctgtgttgaaaagacacctatagctgtggggacatgactataatcccagcatttggggagaccgaggctggcagatcacttaaggtcaggagtttgagaccagcctggccaacatggcgaaaccccatctctgctaaaaatacaaaaattagctgggtgcagtggtgcatgcctgtagtcccagctactcaggagactgaggcgggagaattgtttgaaccctggaggcagaggttgtagtgagtcgtgatcacacaactgcactccagcctgggcaacagaacaatactccattccctcccctctaccccacca

SEQ ID NO: 64493 - DNA, 2494 bp, Homo sapiens
gcctgagatctccagggagcaggccatcgcgctcctcaaggaccaggagccgggggccttcatcatccgcgacagtcactccttccgaggcgcgtacgggctggccatgaaggtgtcttcgccacctccaaccatcatgcagcagaataaaaaaggagacatgacccatgagctggtcaggcattttctgatagagactggccccagaggagtcaagctcaagggctgccccaatgagccaaacttcggatcgctgtctgccctggtctaccagcactccatcatcccattggccctgccttgcaagctggtcattccaaaccgagaccccacagatgaatcgaaagatagctccggccctgccaactcaactgcagacctgctgaaacaaggggcagcctgcaatgtgctcttcgtcaactctgtggacatggagtcactcactgggccacaggccatctctaaagccacatctgagacgttggctgcagaccccacgccagctgccaccatcgttcacttcaaagtctctgcccagggaatcactctgactgacaaccagagaaagctctttttcagacgccactaccctctcaacactgtcaccttctgtgacctggatccacaggaaagaaagtggatgaaaacagagggtggtgcccctgctaagctcttcggcttcgtggcccggaagcagggcagcaccacggacaacgcctgccacctctttgctgagcttgaccccaaccagccggcctctgccatcgtcaacttcgtctccaaggtcatgctgaatgccggccaaaagagatgaaccctgccccttgcccagggccagtgccatggggaaggggcttgtggggaggggacccatgaatcctgaccactcttgaacccagaaggaggactttgggccaatttcggaggagagaagaaagtgcaacgtggggagagggaagtgaattgcagaggggagggggaaaagagagagagagagagagagagagagagagagaaagatgggggagaagaacttggattcccctgggtagatggaaactgcaaaaacccaaagcctccaaaactaaccaggtccacctaacaccccctccctcccctaagaagatggatgtcctcaaaagagaaggaacaaacctccttgggaatccacattttttgggggaatggaaaagctctgtctccctaactcaactgctttgcaaggggaaatcaagctgggagaatctttttctggccacctgtagggtaggttgtcaaaccaaacagagccaccgtgggacatcaagtggaagaacttgtttgcttgaaagtatctcagacccaaggcacctcaggtctctttgctgtgcctccactatattgtcgtgtgggtgtgtgtctgcacccacatcctcacacattgatctagatctgcctttatccactcgaattataaacagctcggcttgtccttgtcccatgtgtttgtagacacacatgcatactgtccaaagattagggttggtggtggcagtgcagcaggggagggacaaacaaccaagctatgggtgacagaggctctctcctggtgcctgcacctgcactctagtgaccctgggtgccgccagacccttctcttctacaaagaccccagcaggagtgggagggtctgcaatggcatcgccctgtcctgccttggccagaagcctggagctttggtttgaggaggtagagatatgtgtatccataggaagagatctgtcagaacaggcagctgttgagctcggggtgtcttccccaaggcatgtggctcagcagcaagaaaggcaagttgctcctgctggggccctggactctgccttagctcccacctctcagccttgttattgggtttcatgcccctggaccagccttatctcagacctgcttacctgcatgatgcctttttgggggctggggattgagtcttgctgctctgcccagccctgttctattctgcagggtccctgtgttggaattctccctggggaacctactttctgctcagtgaggctccggccagaaacctggagtccttatcctcccctctgtaagtgttttagggtctggcttttgcaggcaccctctgacctcagcagagctcctgggcctgctgcctgcacaccacatcgcctacctacaatgccaaagcctcactgtcaccctttctgccttggtttccctagctgagccacgctgcccatgcagcagagggcagaaggcttgcacttgggccaaagggcctaaggtccactggacagttgggaaaacacctgaccaccatttaaggactctaagccagaatggaaaattcaccaggactccattcttaagcctatgcgagtcccctagagagaggcattgtactgatatataaatattatataatatatacatgagacatactgacagaatctgtaagctaataaaatgtaagaaaaggttaaaaaaaaaa

SEQ ID NO: 64494 - DNA, 683 bp, Homo sapiens
gtatggggtccacacaggaaagaaaccaaactgttttggggaatatggaaaaggcttcattccgaggctggatttgtgtaagcatgggacgatccacacaggagagaaaccatataattgtaaagaatgtgggaagagcttcagacggtcctcctatcttttgatccatcagcgagtccacactggagaaaagccatacaaatgtgacaagtgtgggaagagctacattactaagtcaggtcttgacttgcaccacagagcccacacaggagagagaccttataactgtgatgactgtgggaagagctttagacaggcctcaagtattttgaatcataagagactccattgccgaaaaaaaccattcaaatgtgaggattgtggaaagaagcttgtataccggtcataccgtaaagaccaacaaaaaaaccacagtggagaaaatccatccaaatgtgaagactgtgggaagcgctacaagaggcgcttgaatcttgatataattttatcattatttttaaatgacacgtaagtgttgtacatatttatggggtacagtgtgatatttaaatatatgtatatgatgtataatgatcaaatcagtgtaattagcacatttatcacctcaattatctcttttttgtgttgagaaaattaaaaattcattgttccaaaaaaaaaaa

SEQ ID NO: 64495 - DNA, 393 bp, Homo sapiens
aagcattgtggaattgtgggtgttaagttttgtttgtttgttttttaataggcttattatgcccgtgatgctctggctaaaaacctctacagcaggttgttttcatggttggtaaatcgaatcaatgaaagcattaaggtactgaatttctatgagcaaaatcagttgtaataaatggtattcacagtataaacattaagttgaagaaagtttaaatttataatcaaataattgattgccacttacaaagattattccttaaaaagagtgtaccatgtataagattgaaatttgtcagggattttgtttattttgttttgccatgtgtgttgcttctgactggtgaatagtctgatggtctttgtggagttactctgggagtcggcgtcccag

SEQ ID NO: 64496 - DNA, 1838 bp, Homo sapiens
tcaggtttatgatgggttttcattcattggcaacactggaccttacgaggtttctaagaagctgtataccttgaaacaaagtttggccaaagtggagaatgcttgttatgccttgaaagtcagagggtcagaaattccaaaacatatgttggcagatgtgttttcagttaaaacagaaatgatagatcaagaagagggcatttcttagaatctaacgttactcagttactaattcttttgagaactcctaagagaccaatttgtaagacttatttagtatttcatttaactttattgtggcttttacatagaaacatattcagttgtacttgttttaaattgtatacaagctgtacataaaattagccaaatgaatcatttcttatatcttattcatgaaagtttgcatacagatgtttgcatatatgcctttttgaatttttgctggttaacctttatcatttatctttgtaatgtgaacatgcttcagagtgtaccttttgccataacctattttaatttactttttctgaagtttggagtgataatttttagtggaagcaatttgtaatttaagttggtagttatattatatatagaaaagattttttagttaaacttctggacatgagcgtcctgtttaaatttcttgttaatatcgtgccaagcctcaaaaataggcttattccatggaacaagaattaaaaatgaataagctatcaatatataatttaagtacaagtttaggctgggcgtggtggctcacgcctgtaatcccagcactttgggaggccgaggtaggcagatcacgaggtcaagagatcaagaccagcctgaccaacgtggcgaaacctcgtctctactagaaatacaaaaattagctggatatggtggtatgtgcctgtaatcccagctacttgggaggctgaggcaggagactcgcttgaacctgggaggcagaggttgcagtgagccgagattgcgccactgcactccagcctgggtaacagagcaagactccatctcaaaaaaaagaaagaaagaaaaaaagaaagtacaagtttataaagtattatagtgaaaaattcgcattctggctgattttaagccatttaaaatttatataaaacaaccttccataaaaatttgacaggtgcccagatgttgctttctccatttattttttgtttttttttaatcacagtaggtctgatagagaattggagctaaattataatatttttgttggtaaagttgagttatatacttgtacatacaatggaaatgcttttagtagtgattatttagcaatttttgtttttgttatattaggcatgtttggaggctttcctattctagcatttaaatttaaattttattaaaattaaataatttaaatctagcatttaaatttaaataatttaagtctagcatttacttttaaataattataatgaagttttgaaatactaagttaatccagacctttagttgtcccatggtgttaataaagttgccaaagaagatgtattatgaacaattcagcaataagacaattgtcaacacagttgagaataacaatggtaatcgttagtaatatttagaattggaatttgcctactgaaatagttatagatgattacttgtgatgtgaaactgaattgagcatgacaaccagacatttccagttggttttgtaagttttgagaatctagatactgggttttattttttgaaagattagctctgtttgtaagggctgattccttgaaaatgtaattttccagaaaaacacctaaagaaaataaaacatggacatgcctagtaaaaaaaaaaaa

SEQ ID NO: 64497 - DNA, 1646 bp, Homo sapiens
taccgggccggaatctcccgcgtccgcccacgcgtccgcttcatctatcacctgcctcaggagtttggtgatgcggaactcatacagacattcctgccctttggagccgttgtctctgctaaagtctttgtggatcgagccaccaaccagagcaagtgttttgggtttgttagttttgacaatccaactagtgcccagactgctattcaggcgatgaatggctttcaaattggcatgaagaggctcaaggtccagctaaagcggcccaaggatgccaaccggccttactgacctgctttcactgaccagccacagaaagaaacagaagagtgagaagaaaggagaggaaaagcacagaaacgcttgagcagccctttcccgaaggagcagctgcggacggaggtggatcggacccaaggctggtgcctggggctaaggccactctaaggattgtttttatcaagtgggttgttctgtgcctgcagcatagagcgcaggctggcagagcaaatagggctggtgaggagtgactgtccaggggaaccagcagagggcgttgggggtgccaagggcttctccgcaagggaagcccagatttacttctttcaaaatcatatcattccttagagtttagggaccaaaggactattgcttttttaagaatatatatatctatataaattaaaacaaagaaacaaacaaacaaaaaacaagacaaacaactacaaaaaaagacagtatagagtctcataaaagctgcctttaaatatccctaggagacagggtgaaggagacccttgacagccccagcctaggcagatgggggctgtggaaagattgttctgtgtctcattccctcttaagccactcccccaccctgcccttttaaaaataattaaggatttgaggtctaggctcacatgcaggtaattagaacgttatggaagcagtgaacccacaatccacaatccccaaactcagagtgcatcccagaagaggccccaggcagagctcaggttggccctggcctttgccatcccgggaggccccctagccagcaagagtgggattgcctttcctgtggaaccactgcttccccaggcgggaagaaagagggagttctggccacctgagcctttcccttgccaatccaggkagacagaggccctgcctttggctgagctgagacacctcctgtttcccttccccttgaaccagtcccagtgtccccttgctccaggctaccttctgtctcttagtctaagtttgcccacctgtaaagtagattcaggatatctgtagagggctgtgacaacagacttggaaggtttgctactgtatatactgccattgagaaggggaaatttttcaatatgtagaagcttcagaattagaggtccctctttaccccagacctgggagggaagtagatgttttgccaaaatacttcttcattcctttaaaaactacatctttcctatgcaagagtgtctcacatgtgcttaaccgaggtgcttctagttggtgagcagtgttgagcttaaaagtggggtgtgctctgtctgtctgtctttgtctgtctgttgtatacagtgggtgccatataaagctgatcaatggtggtgcttcctgcctggcttctgtgg

SEQ ID NO: 64498 - DNA, 1747 bp, Homo sapiens
gcggccgcctactggagacactccctcccgcctcccgggtctcctggcggcggcggagtgaggctgacagctggggaaccctggagagacccctccgccctccccgcggtggcagcggccgatccccggctccggcgcgagacgacggccgcgatgcgctcggcctgaggttacccgggcccgcccctttcctcgcttccctcgactattccactgcgtctccgcgccccggcgtcatcctgcgagtccctctgacgggagggaagatggctgcacggagctggcaggacgagctggcccagcaggccgatggagggctcggccggacatgcgggaaatgctctcggtcggcctaggctttctgcgcaccgagctggggcctcgaccttggggctggagccgaaacggtaccccggctgggtgatcctggtgggcactggcgcgctcgggctgctgctgctgtttctgctgggctacggctgggccgcggcttgcgccggcgcccgcaaaaagcggaggagcccgccccgcaagcgggaggaggcggcggccgtgccggccgcggcccccgacgacctggccttgctgaagaatctccggagcgaggaacagaagaagaagaaccggaagaaactgtccgagaagcccaaaccaaatgggcggactgttgaagtggctgagggtgaagctgttcgaacacctcaaagtgtaacagcaaagcagccaccagagattgacaagaaaaatgaaaagtcaaagaaaaataagaagaaatcaaagtcagatgctaaagcagtgcaaaacagttcacgccatgatggaaaggaagttgatgaaggagcctgggaaactaaaattagtcacagagagaaacgacagcagcgtaaacgtgataaggtgctgactgattctggttcattggattcaactatccctgggatagaaaataccatcacagttaccaccgagcaacttacaaccgcatcatttcctgttggttccaagaagaataaaggtgattctcatctaaatgttcaagttagcaactttaaatctggaaaaggagattctacacttcaggtttcttcaggattgaatgaaaacctcactgtcaatggaggaggctggaatgaaaagtctgtaaaactctcctcacagatcagtgcaggtgaggagaagtggaactccgtttcacctgcttctgcaggaaagaggaaaactgagccatctgcctggagtcaagacactggagatgctaatacaaatggaaaagactggggaaggagttggagtgaccgttcaatattttctggcattgggtctactgctgagccagtttctcagtctaccacttctgattatcagtgggatgttagccgtaatcaaccctatatcgatgatgaatggtctgggttaaatggtctgtcttctgctgatcccaactctgattggaatgcaccagcagaagagtggggcaattgggtagacgaagaaagagcttcacttctaaagtcccaggaaccaattcctgatgatcaaaaggtctcagatgatgataaagaaaagggagagggagctcttccaactgggaaatccaaaaagaaaaaaaaagaaaaagaagaagcagggtgaagataactctactgcacaggacacagaagaattagaaaaagagattagagaagaccttccagtgaatacctctaaaacccgtccaaaacaggaaaaagctttttccttgaagacc

SEQ ID NO: 64499 - DNA, 3172 bp, Homo sapiens
gttatgaagcaccacaaactgttgcggttgaacctccacctatcaagtcagcagtacagacgatgtgtcccatacctgcccattctttggctgcttttggattatttcttcgtcttccgggctatgcggaagtgctactgaaagagagaaaacatgcccagtgccttcttcgattggtattgggagtgacagatgatggagaaggaagtcatattcttcaatctccatcagccaatgtgcttccaacccttcctttccacgtccttcgtagcttgtttagcactacacctttgacaactgatgatggtgtacttctaaggcggatggcattggaaattggagccttacacctcattcttgtctgtctctctgctttgagccaccattccccacgagttccaaactctagcgtgaatcaaactgagccacaggtgtcaagctctcataaccctacatcaacagaagaacaacagttatattgggccaaagggactggctttggaacaggctctacagcttctgggtgggatgtggaacaagccttaactaagcaaaggctggaagaggaacatgttacctgccttctgcaggttcttgccagttacataaatcccgtcagtagtgcggtaaatggagaagctcagtcatctcatgagactagagggcagaacagtaatgcccttccttctgtacttctcgagcttctcagtcagtcctgcctcatcccagccatgtcatcttatctacgaaatgattcagttctggacatggcaagacatgtgccactctatcgggcactgctggaattgcttcgggccattgcttcttgtgctgccatggtgcccctattgttgcccctttctacagagaacggtgaagaggaagaagaacagtcagaatgtcaaacttctgttggtacattgttagccaaaatgaagacctgtgttgatacctataccaaccgtttaagatctaaaagggaaaatgttaaaacaggagtaaaaccagatgcgtctgatcaagaaccagaaggacttactcttttggtaccagacatccaaaagactgctgagatagtttatgcagccaccaccagtttgcggcaagcaaatcaggaaaaaaaactgggtgaatactccaagaaggcggctatgaaacccaaacctttgtcagtattaaagtcacttgaagaaaaatatgtggctgttatgaagaaattacagtttgatacgtttgaaatggtttctgaagatgaagatgggaaattgggatttaaagtaaattaccactacatgtctcaggtgaaaaatgctaatgatgcgaacagtgctgccagagctcgccgccttgcccaggaagctgtgacgctttcaacctcactgcctctgtcttcatcctctagtgtgtttgtacgctgtgatgaggagcgacttgatatcatgaaggttctaataactggtccagcggacaccccttatgcaaatggctgctttgagtttgatgtgtattttcctcaagattatcccagttcaccccctcttgtgaatctagagacaactggtggtcatagcgtgcgattcaatccaaacctttataatgatggcaaggtttgtttaagcatcttaaacacgtggcatggaagaccagaagagaagtggaatcctcagacctcaagctttttgcaagtgttggtgtctgtccagtcccttatattagtagctgagccttattttaatgaaccgggatatgaacggtctagaggcactcccagtggcacacagagttctcgagaatatgatggaaacattcgacaagcaacagttaagtgggcaatgctagaacaaatcagaaacccttcaccatgttttaaagaggtaatacacaaacatttttacttgaaaagagttgagataatggcccaatgtgaggagtggattgcggatatccagcagtacagcagtgataagcgggtaggcaggactatgtctcaccatgcagcagctctcaagcgtcacactgctcagctccgcgaagagttgctgaaacttccctgccctgaaggcttggatcctgacactgacgatgccccagaggtgtgcagagccacaacaggtgctgaggagactctaatgcatgatcaggttaaacccagcagcagcaaagaactccccagtgacttccagttatgagctgcattgatgtggacttcatagacacaaaggcttcgaagcacaagccaaatatgtcaatatttgtatgtaagaaactaattatgtaataggtaatgaaactgaaactatactatgcccttaaggagatccagtttaattcaaggtgatcttttatttacctgtacaggagtgtaaacttttttgtgcttttatttttcaattgtgagaaccactgattggtatgttcaacaaatttgtgtatacaaagaaatggataaatcactgctatataagggaaactaccttaggaaagaatgtttactgaatgtttattttattttattttttttttactatagagtgaggggttgttaacaaagaatatatattggtcattcttacaactactatttaaagtcagcaacttttcactgaatttgatagattttatgtttggccatatcttcatgctcacatttgatttctgaagacctcctacatacacttcaataaaagttaaatggacatactccctcttttttgatttactggtacatttttaaaataataaatctgccataaaatgcattatatctggagacttgcacttgtatggatgaatttattacattcaacatatttaattttatgccttctaattctaagatgcagaaaaaaataaatgaacatgattttattctatgcccaacatttgggcctctgaatgtatctgttatttgaatttaagtatttgaaaaggaatggtcaatttgaaagtcattctaaactgattttttttttcctaaagggctccttttttcctggactatgtggttttatgactaaagtcacatgtatgtattaaacattgaggctctgtagaggagagaggatgtacctctctggtgctgttacagtacattctgtacctgccatacaggctcattttcatgcaaattcttcctagagccaaataaataaagacttaggtgaaaaaaaaa

SEQ ID NO: 64500 - DNA, 5618 bp, Homo sapiens
ttttttttttttcataaagaaagaaacggcaatgcaatttaaaaactggtaggccgtttaaaagagccggtttgacctctgacaaacccagccaagacaaggccccttggcccggctcgcgagtctttgtagagagcagagcttaccctgacgacgatggcgttttgtggttaaagtgacttgggcgcacccccaggacagggtctggtcccacacgttcacaccaggggggcgggaggggggacatcaaaaacagaccacatcctctgccagacgggctccagggagtagcggtttggacgagggacatttacaaagcacagagtgcacaaataagttttggttaatttaccaaattacacagcagtccttcaagtttttcaagtttcataaaaaggaggaggggaggagaaagggggaaaaaaacaaaaacaaaaacaaaccgacgaaccaaacaaaaagaaaaagaaaaaccaaacactgaagaaaaataataaaccagattaacaacacaactgtatcgctccaaagacggacagagaagttgacaggttcacacacggtttgcggtatgtacatcaatttacagaggttgcgacgcaggggagagaggttcacactcgtgttttcgctttgttagaggcgctcggccacacccagcacccatgtgtgcccagcgcacacgtgcacacgcaccccacgcacggccacacgcgcacccacgctcgcttgcacacacgcccacacgcacagacacgcctgcgggcagcaggcgcaggggagcgcgtatcaccagtccgcgtcctcctctatgtaataatcaggggcggtaccatcaaagaggccggggtcgagggacttccgctgcttccctctggcgaagacgcgggagatggagccgaatcccatcttctctttcttctttttccgtttttggtcttcaagatcctctagtgactgtacaatagggttgtgcaggttcttctgaactgggccgggactgtcgccctgtagccagaggagaagaggaagatgaaacagcagagacaggtgacacaggagagcagaggcggcccgtgcggtgtggggccttccgtggaaggatgccatctctcaggggccaccctgcctctgcagtggggagcccaccccccatctcctgaagcagatacccccagatggcttattgatggggcctggagtttccctagagttcctggggtcctctcctgcccagtctggcctctcaacccccagcatcttctgaccaacaaattagccactccagggcgtctaagttcctgtcccagtctgtcctctgagttagagctagagcttggttagacttggtgctttccataaagaaatgtacttttatagaaaaagcacaaaatagagaattttgggacagaaacaaacttgggagaccacgtagcctctagcttcccccacaaccgacacaatgaatctcttagtttgcgcaggggcaggcaggactcgttagccctattcacagatatcaagagaggcagcagacagtccactaccgtggagctaattggatgcagagctacagctccaattgggggctgtcagattcctcctggcacagtgctccttccaggcaggagctccagggtaactgcatacttggtcctgagctttgggctgccccaggaggggtctgaactccttccctttttcctagggagcctcagacgacaggtccctaggatgggcaggtaggacatttccattgtgttgccagccctgccttacgtgggtgtggagggaacccttaatagcctacaggtgtacaaaagccttcactacatcccagaatcagtctgccctgtctggagcccacagatcctttggatcaaaacagtcattactagggagactcctggtggttatttctggaattgcaagcataatgccaaggtccgtcaaccttctccaacctctctatgctgagttcctacttttgctctaaattagtggccagagtgtgagaggatgaggcagtcattagtccaggctgcactattcttgctggtggacgtcagatgcccaaggcaaagggttacctgtagctatttttgggctcttcctggcttacctgcatgcacacctgttgagatggggggataaaaagggttgaggaagtgagggaattaatgaatggtagtttagtctttagtctcaaggtttgcaaacagaatccattctgaaggcagctaagatagttccactctggataggaacatctttgccaaatctatgggtaaagagaatggggcctgctcactgaaacgcctgtatgcagacaactggcttatcaaagcacccatttcctggcagcaggaatgtgccaaggctatggtgggcaaaagactagggctgggtcaaatgcaattcaagaggcctttggagaactccttctgcagaatggggtttttccagcagcatttctgctgccagagtccccatgggcccaccacgagaagacaaaatatggccgtggggggaaggtattctcaactgggatgagaatggtgcagggacactgctggctgtaggtataactccacagtggtccttcaggatcagggaatggatgtcagagacccctccagtggcccaccttccttgccttggttctgttagtcaagatagactttgtcactaggattctcttctggggacaagagaagaacatactgcttcctcaaagcaccagtataaaacagagaatcccgccaggtgcagtggctcatgtctataatcccagcactttgggagactgaggtgggcagatcgcctgaggtcaggagttgaagaccagcctggccaacatggtgaaatctcatctctactaaaaatacaaaaattagccgggtgtgatggcaggcatctgtaatgccagctgctcgggaggctgaggcaggagaattgtttgagcctggaaggtgttggttgcagtgagctgagactgcgtcactgcactccatcctgggtgacaagagtgaaactccatcacacacacatacaaataaataaaataaaacaataaaaaagagaatcccaggcctgagcagggccccaggctgcaaatgaccttcctactctgaggaggccatctaaagtccccgggccagcaatctctgccgcccacctgagcagactgaggcagcttctctgaagtttactcttagctatttttataagcacttttcattattgtggattgaaaaaaatggttccataattacgactcatctataggaaagtgattgatttttacacactgatttccaagcaacactgttatgtacatgcttattattcattctaatagcttttcaagttattctcttgagttctccaggtagagaatcatgtcactggcaagtaatggttttgtccaatgtgttcacctcatttcttttttattatctatttcgctggttaataaagtgacattaactgagttttggaaaaagccgtctcgtgcatttgaggatctaaccctatgatgtctgtcttcaggatatggcagaggggagcctctgcattaccaactgtgtgataaaacaaaaattcaaggtggtccccacacccagaccccaatatttcatgttagagcctcgacatggcttccaactgtcctcagaagctcaacccaccttcaatttactcccacactgttgcagagcccatctgtctgccccactagtcatcaagagctaggcagctagggcctttgcctcctgggagctggtgcccagtatgcaatcaaaaagtgtttgatgaaataaacaaaggaaacaaacttagaccatattcacaagcctctccagaggcaattcatgccaagactcctgggtcaggatagagagctggctctaaagggaaatgaggaggtgctggggaggccctgagctctggaaggtaatgtgtgggaggagaagcccacggtcccagacagggcccactggggcagagttccaggctgtgcctgcggccgacccaggcccgcttcctctggattctcctcaccctcccggacacaaggagcaaacgggcctcattcctttttctccccacatccatcgcttcttgcaaaaggaaagaacagaacaggaaatgcattcgccagagtgctccctgggtggacgagaggaaacagcgagtatggcttcaccccgccacccccgcccctgcagtttctgggcagggcccaggggcccaggccccgctgctgctggccttacgttgcagagggagtgtgtccggtgtcgaggggagttgatgtcgctcggtgtggacgaccggtcgccttcggcggcagatgcgtcggagatgacagagggctgccgggagtggcaggggctcaccctgaccgcttgccggtccgcagggtgaggggggtgtgagtggtagagagtctgttgactctgccggatggctgcggtcagcgggaggtccgcctgcaccacccactcctggttgccattgagcaccgtctcgcccggcatggcgagggaatgccgcttggggacgtccttggtcagcgtagctaaggactgtttggccatggccagctcggcctccagctccttcatccggttgtccttgaggtccagctgggagcgcagtgccgtggcgtggtctgtggcctccttggcttggcgccgcagctcccacttctcacgctccagcaggtccttctccttggccagcgctttgaccgcatcctcgctctccttgcggtgctgctcatagttgcggatgaagtctcggagctgctcctcgcggctctccagtgtggcatacagctgctgcatctggctcaccaggtctgtcttctcgccctttaagcgcttccgatcagctttcatggcctgcaaggcttctttggctctggctagctcctgctccttctgggccagctggaccctgagctcggtggccgagaggacctcagaggacttgccgccctgcgactcctccaggtccttcgccaacatctccttcatctgccggagaaggtgaacttcctcctggagccgcgacacttcttcccgcaggagcacttgcgctccaagctgggggttctccatgttcgtcgccgccgagtcccccgccgccgaggcgctggccgcggctcccgggcccgggccggggccgccgccgccgctcagttccgccagtctccggttggtggccgtgagttcggctcgcaggttggtcacctcctggctggccgactggaccgccccatcgatgcggagcgcgagctgcttattgtcttccatcatgctcaggattttggcctgggggcgagagaggtgacaaagagctgcatgatgcgcggggggcgcgcggccgggcacccccggctctacctgttgtgtcctccgcggcccggcttcgcccgcgccccgacccccaggcaccggcagcgccggttcctccggcacaggaatgacagcggcgcctccagccctagccgcggcggtggcgaggcggcggggggaggaggcggaggagaaaaaagaggaggagaaggaggaggaggagcagcgatcgccgagaccccggcgggcgggcgc

SEQ ID NO: 64501 - DNA, 2287 bp, Homo sapiens
cccacgcgtccgataaaaaatgtttgtcatctactattcaagacaatcattatttttctggaaattgtatctgttttcaaggttatatgtaaagtgttaagacaatatcctataaaatgcatttttaggaagttttgcattactttcttcctaagtcttggtaaagttatataattagtaccttgaaaaaaataaagtgaaaagccttttggggactttagactttagtgtttaaatgtaattatttttatttgtttttggtttattttttatttttattttttttggccgtggttataatcttcagcatctgcaagaaggacgaaaagctcaacaatatcttgacatgtgctggaaacagatggataatagtaaaaagaagtttgaaagagaatgtagagaggcagaaaaggcacaacagagttatgaaagattggataatgatactaatgcaaccaaggcagatgttgaaaaggccaaacagcagttgaatctgcgtacgcatatggccgatgaaaataaaaatgaatatgctgcacaattacaaaactttaatggagaacaacataaacatttttatgtagtgattcctcagatttacaagcaactacaagaaatggacgaacgaaggactattaaactcagtgagtgttacagaggatttgctgactcagaacgcaaagttattcccatcatttcaaaatgtttggaaggaatgattcttgcagcaaaatcagttgatgaaagaagagactctcaaatggtggtagactccttcaaatctggttttgaacctccaggagactttccatttgaagattacagtcaacatatatatagaaccatttctgatgggactatcagtgcatccaaacaggagagtgggaagatggatgccaaaaccacagtaggaaaggccaagggcaaattgtggctctttggaaagaagccaaagggcccagcactagaagatttcagtcatctgccaccagaacagagacgtaaaaaactacagcagcgcattgatgaacttaacagagaactacagaaagaatcagaccaaaaagatgcactcaacaaaatgaaagatgtatatgagaagaatccacaaatgggggatccagggagtttgcagcctaaattagcagagaccatgaataacattgaccgcctacgaatggaaatccataagaatgaggcttggctctctgaagtcgaaggcaaaacaggtgggagaggagacagaagacatagcagtgacataaatcatcttgtaacacagggacgagaaagtcctgagggaagttacactgatgatgcaaaccaggaagtccgtgggccaccccagcagcatggtcaccacaatgagtttgatgatgaatttgaggatgatgatcccttgcctgctattggacactgcaaagctatctacccttttgatggacataatgaaggtactctagcaatgaaagaaggtgaagttctctacattatagaggaggacaaaggtgacggatggacaagagctcggagacagaacggtgaagaaggctacgttcccacgtcatacatagatgtaactctagagaaaaacagtaaaggttcctgaagagggtttctgaggaaatgggcaagatgttgaaggaggttacatgcagctgcttttgggggagggtattagagttgtcaggctcaaagagagtgagagaagcaagttgcatgagtgcatgcagacatgattttttttttactaacttcattagcatttccatacattgtttttaaaaatcataataccaacccttaagttcctagttcacagttattcccacaaaagaaaaagccaacaatagtgtaccatttttctatttattttattgctgtctaatcaataaagaatgcagagctgtcaaaaaatgtgtcttacattagctgtcccaacaggattgtcttccctcccagctctgttttaattggcttttagacccactatctgtcagatccttgccatctgtcagtgtctgcctgcgccacctccgtgcttgcttaacatcctgttgcatgtctagcgtgattgagctagatttttcaggcatgtctttagattcccttgttcttgtcaaagccttgttttgttttacatttgtagtgcaaatcactttgtcaaacatctccagcactaatgtttccatcttagtatttgtgcacactgctataacttccccactgcaaacattccagttttggcattacgaagaagtagctgtgaacctgaagtatttatgat

SEQ ID NO: 64502 - DNA, 613 bp, Homo sapiens
tttttttaaaaaaataaatacatgtttatttaaaaaagaaaaagaaaaaccctaccaagaacaaaccctggtcaatgagaaatcaatgcttcctctgaaagccagcaacagccggtgctgtcaacaccccaagaagtacaggtacctcagtccaaacatcaggtctcgaatattcttctgtggtcaaaactggcattcaacaggttgctggtctgtgtgggctccaattattagcacagacaactgttaccactggatatctcgctgcctatgcccactaccacagcccagccacccccacagcctcaggaaagttacatatcctcaacactccatttgtaggcaagttcctccactgccttcttgctggcaagcctggcaaagcgcttctgttcaaatccattggatctgtccactccgtcccagcgatatccaggccagatattaaatctgttgggaggaggtgctggaccactgtagcgaggtctcacttttttattcttgttctccttggccttattcttcttgatgaagttggccatagggtccccctctctttcctgttctcttagcatcctatccagatcttcgtcatcaatatagcgggccagag

SEQ ID NO: 64503 - DNA, 2331 bp, Homo sapiens
  misc_feature (1)...(2331): n = a,t,c or g
ggcacgagctcaagtccacactgcagaccctcccagagattgtggcaaaggaagcacaggtgaaagtggccgaggtggagggcgagcaggtggacaacaaggccaagctggaggccacgctgcaggaggaggcggccatccagcaggagcaccgtgagaaggagctgcagaagcgctcggaggtggcgaaggattttgagcccgaacgtgtggtagctgctccccaaaggccggggaccgagccacagccagaaatgcctgacacagtcctgcagtcagagaccttgaaggacactgccccggtgctggagggcttgaaggaggaagagatcacgaaggaggaaatcgacatcctcagcgatgcctgctctaagctgcaggagcagaagaagtcactcaccaaggagaaggaggagctggagctgctgaaggaggatgtgcaggactacagcgaggacttgcaggagatcaagaaggaactttcaaagactggtgaagaaaaatacgtggaagaatctaaagccagcaagagattgacaaaaagggtgcagcaaatgatcgggcagatcgatggcttgatctcgcagctggagatggaccagcaggctggcaagctggccccggccaacggcatgcccacgggggagaacgtcatcagtgtcgctgagctcatcaacgccatgaagcaagtcaagcacattcccgaaagcaagctcaccagcctggccgcagcactggatgaaaacaaggatggcaaggtcaacatcgacgacctcgtcaaggtgattgagctggtggacaaagaagatgttcacatctccaccagccaggtggctgagattgtagcaacactggaaaaagaggagaaggtggaggagaaggagaaggccaaagagaaggcagagaaggaggtcgcagaggtgaagagctagaaccactggcctgggcacctgtcctcctgctgtgccgtcaccctggcaagggccgtgagggcgattgctttgtggtgattctcagtggctcatctaatattttggctggaataaatcagagacttccataatcaagtaaattttaattttcatcattccatggagattcagtctgtctggaatcccggaacccctccacagaatcgtgtctggatccacactgtggtgtggctgccacggcctcctggctccagaggcagctgggccgggccaaggcaggaaggcgcccccatgtgtgtggcctcagtctcagcatctgactgtgctgccctgtccccagggaagagaatgaggaccacgtggactccgcccacacagagctggctgctgtgcccaccctcaggggcgtcaggagacacagcctggcctcctcagggctgaagatgcctccattcgcctgtggaccttgatttctagatttcagtgtcaatagacctgtcttcctgcacactttcagttnggatgtgggtcattgtggagacagaggtgtctgccatctctgtggcctctggagagtgacgtctccctgctgggagtgctggttctcacgtgcggtttcccttgtgtatcggagctctttctcggctttctatttcccccagttctttaagcagtcaattggcacagagtttcccacgggggctgcagtggattcactgtgtcagggatgagcctggcttgggggttggtggggctctgaagcgcatttggggttctttgtagcttctaatgtgaggtttgagtccagtgcgcccacagcagcatgcccttctcaccccttgcagtgttgcaggctcaggcccctgggctccttcagcaagcaggctagtcaatgaggcatgaggatccggcacagggcatcccctggggcttcaagggcaatacccccgtgcttagggtttgcccctgtgccctctgggtggggtggccctcccccgaactcggcaaaacatgcccaggctggccagggcgtgggcaggtggtgtcctgtggcaacctccatcctcctgcccagccggctgtgtcacactcatctttttaaggtcaggttggttcctggcaaaaatgtacctcccaggggcctcccaagcataggatttggaagacaggaacggcacaggcgtccaggaaagcagctgcactcagacaatgccttctccattacttgaagcttctttctgttcagccattaaagaaacttgacaaaataggaacaggagatatttctcaattgtaaacctttgtgcagggacagttggcttccagaggctttcagctttcagttatttgagaagtttgttttagatccttaactaatatttatgaattctctcaaaaa

SEQ ID NO: 64504 - DNA, 2266 bp, Homo sapiens
atggagtatcccgcgccggccacggtgcaggccgcggacggcggagcggccgggccttacagcagctcggagttgctggagggccaggagccggacggggtgcgctttgaccgcgagagggcgcgccgcctgtgggaagccgtgtccggtgcccagccggtgggtagagaggaagtggagcacatgatccagaagaaccaatgtctcttcaccaacacccagtgtaaggtttgctgcgccttgcttatttctgagtcccagaagctggcacattaccagagcaaaaaacatgccaacaaagtgaagagatacctagcaatccatggaatggagacattaaagggggaaacgaagaagctagactcagatcagaagagcagcagaagcaaagacaagaaccagtgctgccccatctgtaacatgaccttttcctcccctgtcgtggcccagtcgcactacctggggaagacccacgcaaagaacttaaagctgaagcagcagtccactaaggtggaagccttgcaccagaatagagagatgatagacccagacaagttctgcagcctctgccatgcaactttcaacgaccctgtcatggctcaacaacattatgtgggcaagaaacacagaaaacaggagaccaagctcaaactaatggcacgctatgggcggctggcggaccctgctgtcactgactttccagctggaaagggctacccctgcaaaacatgtaagatagtgctgaactccatagaacagtaccaagctcatgtcagcggcttcaaacacaagaaccagtcaccaaaaacagtggcatcatccctgggccagattccaatgcaaaggcaacccattcagaaagactcaaccaccttggaagactagaggtgattctgcccagcatcccatattgggccagccatgagccagcttcccgtgactgctcagcccttggctccctcttgctcgttgttctcaccaggaaagtacacgggcctgaggcaggattgggccacagacagcctctcattggtccgggctaattcactcctgctgctcccctttggcaggggtcctgtaggtcatgacaggggaggcaagggtattgagagactcggggtctcgcggggtggtagtttggagggtggctttccccatttcccaacccctctgggccttaggtgctgaggcccctgccacctgtctttcctctaaaggtcagttttgggccagttcttgcaactaaagagcagagatctctctgggccctagacatttccagcaaaacctggaactttcatgccaaacctggggcagggcaggaaacagaggaaatggctgcaacatgggagcttggagctaatacgacactctgccttcccccagaaggtgcaggctttcctgagtcttagaccagatatggccagttgcgcaggtttctgccaactgtgaagtatcctcctggagcagtgacacaatcttggcggagcattgctacccccgctgccccctccacagttcctgaatggtgctaaggatctgcagcagttggcaacgagctggggctgggggcggcctccatgtccactgagatcataggacactccaatggggatgggacctttcccctcctccatcagaggtgctctgaccctaggttacacgggaaagtgccccacatgcaagtctccctgagggttctgcccctaaaggcagactgcctcatgcccgctagctgtgaggttcattgctaccctcggccctactagccctctcttcccccttgtgcagcggaccacttgcccagtttgctgtggtgctagccttccccatcatccaccgggtgatttctgggtcccagggaaagaaagagagagctgatgcaggtttctacagtgaggaacaggcgtttcccaggccccacacccagatttctctatctttgctgtgttttatggcctgggactgagtccacacggatagatttttccttgtaaccttgagacgagaattccaaggagtgtcaccatcagaggcttctcttcattgtgtcaaagaagcccctagctgctctcgtggcctccttcccccactccctatcccttcacctgtgaaatgcctttgctttgcatattgtgtgtggatgtgtgtgtgtgtgtgtgtgtgtttgtgtgtatgtgtgtgcttctgtgtgtgcctaatgctctgtctcttggtcactgaagcatccaaataaagaatttccctcatgggccagactacaaaa

SEQ ID NO: 64505 - DNA, 1041 bp, Homo sapiens
cactaacctgcccctactgctggagctgcccacacggtggtccccgaccttgggcccagaccggcacggggctccggaaaaactgcttggggctgagcggatgccccgagccccgggcggctttgagtgcttccactgccacaaaccctaccacacgctggccgggctggccaggcaccggcagctgcactgccacctgcagggggggcgtgtcttcacctgcaagtactgcgacaaggagtacaccagcctgggtgccctcaagatgcacatccgcactcacacgctgccctgcacctgcaagatctgtggcaaggccttctccaggccctggttactgcagggccatgtccgcacccacacaggggagaagccctatgcctgctcgcactgcagcagggcctttgccgaccgctccaaccttcgggcccatctgcaaacgcactcagacgccaagaagtaccggtgccggcgctgcaccaagaccttctcccgcatgtccctcctggcgcggcatgaggagtctggctgctgcccgggcccctgagaggcacgtggtcggcgcaggtaggagggatggtcctcaccgggagagctggcgtccctcctgcccccagaggagccaggagtctgggagggcggggcctggcctcacacttggtgcgtcctccacatctgcgtccaatcagaaccaaagaagtccagcgggggccactgggccggaggacactcccccaggcatcccaccgcgcggagcccactcagaggagactcctctcccggggaaggctttcatcagaacaagagccatggttccatttcgacacggccaggtctccggggctacccttccaagagtcagagcctcggggaggtggccgccagcatgggccggcactgccgccggatggctggcaaggctgcctagttcccttgcagcagaaatgaacagttctgacttatagtgagcacggccctgtggcccttcctcagtaggcacaactacctctcagccagcccccgccagcctttggtttgggg

SEQ ID NO: 64506 - DNA, 1698 bp, Homo sapiens
  misc_feature (1)...(1698): n = a,t,c or g
taccctccaaatagcaaatgtacttggaaaatcacagttcccgaaggaaaagtagtcgttctcaatttccgattcatagacctcgagagtgacaacctgtgccgctatgactttgtggatgtgtacaatggccatgccaatggccagcgcattggccgcttctgtggcactttccggcctggagcccttgtgtccagtggcaacaagatgatggtgcagatgatttctgatgccaacacagctggcaatggcttcatggccatgttctccgctgctgaaccaaacgaaagaggggatcagtattgtggaggactccttgacagaccttccggctcttttaaaacccccaactggccagaccgggattaccctgcaggagtcacttgtgtgtggcacattgtagccccaaagaatcagcttatagaattaaagtttgagaagtttgatgtggagcgagataactactgccgatatgattatgtggctgtgtttaatggcggggaagtcaacgatgctagaagaattggaaagtattggtgtgatagtccacctgcgccaattgtgtctgagagaaatgaacttcttattcagtttttatcagacttaagtttaactgcagatgggtttattggtcactacatattcaggccaaaaaaactgcctacaactacagaacagcctgtcaccaccacattccctgtaaccacgggtttaaaacccaccgtggccttgtgtcaacaaaagtgtagacggacggggactctggagggcaattattgttcaagtgactttgtattagccggcactgttatcacaaccatcactcgcgatgggagtttgcacgccacagtctcgatcatcaacatctacaaagagggaaatttggcgattcagcaggcgggcaagaacatgagtgccaggctgactgtcgtctgcaagcagtgccctctcctcagaagaggtctaaattacattattatgggccaagtaggtgaagatgggcgaggcaaaatcatgccaaacagctttatcatgatgttcaagaccaagaatcagaagctcctggatgccttaaaaaataagcaatgttaacagtgaactgtgtccatttaagctgtattctgccattgcctttgaaagatctatgttctctcagtagaaaaaaaaatacttataaaattacatattctgaaagaggattccgaaagatgggactggttgactcttcacatgatggaggtatgaggcctccgagatagctgagggaagttctttgcctgctgtcagaggagcagctatctgattggaaacctgccgacttagtgcggtgataggaagctaaaagtgtcaagcgttgacagcttggaagcgtttatttatacatctctgtaaaaggatattttagaattgagttgtgtgaagatgtcaaaaaaagattttagaagtgcaatatttatagtgttatttgtttcaccttcaagcctttgccctgaggtgttacaatcttgtcttgcgttttctaaatcaatgcttaataaaatatttttaaaggnnnnnnnnnnnnnnnnnnnnngggggggccgttttaaagaatccttgggggggccaaagtttacgcgggcttgcaacggaatagttttttccttatagggggcggtattataacctacctgggaatttttggaaaggacctttact

SEQ ID NO: 64507 - DNA, 2185 bp, Homo sapiens
ttttttttttttgagtttccaaaattagaatttatttcagtttctaaggaatgaatccccgagtgtggcaggaaggacacagccggctcctgacgcacacctgatttgattcaacaccgagtcggcacagacacaaccagagatggcctgggtccaggctggggctgcacgggctgtgtcctggacagccaggagggaggccccgcacacagacggccgccgggcagggggcctgagcgggacaggcctggccacagcccatgtccttggccttccacataggtgcacacattgtctgcccagagagggccaagatgccccaggcaccccttcgctccgggggctcaggacacaggctcccagctgaggccacgcctggacccagagctgatgtttggctgcacgcgagcccactcgggacagacccaagaacacgaattctctccctttggatttaaggctggtgttttttgacatttacttcagtttttctctctgaaattaaaattacctgagtaaaagattttaagacattaaaaaagccaaaaacacagaatccctgcaggcagacggtgccagggaggtggcggccagggccaggatgccaggggcacggtggggtcggctggagctccagggctgggcctttcccagtctcgcctgccctggagcccccaggagccgcccctgggccgacgctcctgtggccggagcacaggaaggcacagtgaggtagggacagtggccattgtcccccgcctgccaccagggctgagagggcagcgcacgcctcggcccctcctataagcccctgccccctcggagctgggtgtcttgtccagaagccggggaacggcccctgcagtgtgggaggggaggggctgccgggaggcctgagctcagacagttaaataatcctttatttgggtgggctgggggaggggtgactggcccaggagggcaggcgaggccgggcccagacccccatggggggtggcaggggcctcgggcgggctaggatgcacctggcacccagaagtgccgcgggggcactggctcctcaggggcccgagcgggcggggagcagtctcctacttgtgccgggcctcggtcaccctctgcaggcagtactgcgcggcgggcagcgacaggaccaggctcgcggtgcggcggcccatccagtacaggctgtagcccagcaggccgaagaaggcggccttcacggccaaccgagacactctgccggagacggacggcgggggcacggtcatgatctcctggatgttgaggtcggtgctccagttcttctcgatgccaggcacgtggcccatgcccacgacgcccacgaccacggaggggacgcacttcctgggctcggcgtcagaggcccgaggcagctcgaggcgccgcgcggcctggcgcagcatgtaggttaggtagacgtcgcgctccgagacgatggtgcggtgcaggtctgggaactcgccaatcatctcggccatcatctgctccagtaggtccttctgcttgcagcgttccacgtcatccttgctgatggggtctgacaggaagcacaggccccaagccagcctgaccttctgccagaaggagagcgctgcgatggccctcttgaaggtgacggggatgggtcggtcacccaggtggaacttgcagaaaggcaccttgctggcctccttgaaggcctccctgaactcgccacctggggccatgcccagctgctcggtgatgtgtgcagacaccttcagcagcagcatctgcatcagccccgacatgagcccgttctgcctcacggcctgctgcagcttctccaggctgagctcctgggcctcccgcagcagcgtgctctcgtccatcttcagcatggacacacgatattggcagagctccacgaccaccacgtcaggctgcacctcccggatggtcttcacaacgtccctcttgctgtcgtcgctgaagtgggctgtccccaccacgtacaccctgctcccgtcctcagccaccaactgggtcacagtgcgcggcaggttgggccgctgacgccgccgcttcagcttcatctccaggagcaggttgaaggcgtccacgtcggacaggttctgggggtctccagaaagcaccctgggcaccggctctgaagccacgaaatcgtcgacccgggaattcc

SEQ ID NO: 64508 - DNA, 411 bp, Homo sapiens
ccccggccacctaccacccactccactccaacctccaagcccacctgggccagctttccccgcctcctgagcaccctggcttcgacgccctggatcaactgagccaggtggaactcctgggggacatggatcgcaatgaattcgaccagtatttgaacactcctggccacccagactccgccacaggggccatggccctcagtgggcatgttccggtctcccaggtgacaccaacgggtcccacagagaccagcctcatctccgtcctggctgatgccacggccacgtactacaacagctacagtgtgtcatagagctggaggcgccccgtccggtcagccctcgcgccctctccttcctgtgccttgagtggcagaggagccgtccagccacaccagctttcctcccacc

SEQ ID NO: 64509 - DNA, 2065 bp, Homo sapiens
cggacgcgtgggctcgcgtagccgtgcgccgattgcctctcggcctgggcaatggtcccggctgccggtcgacgaccgccccgcgtcatgcggctcctcggctggtggcaagtattgctgtgggtgctgggacttcccgtccgcggcgtggaggttgcagaggaaagtggtcgcttatggtcagaggagcagcctgctcaccctctccaggtgggggctgtgtacctgggtgaggaggagctcctgcatgacccgatgggccaggacagggcagcagaagaggccaatgcggtgctggggctggacacccaaggcgatcacatggtgatgctgtctgtgattcctggggaagctgaggacaaagtgagttcagagcctagcggcgtcacctgtggtgctggaggagcggaggactcaaggtgcaacgtccgagagagccttttctctctggatggcgctggagcacacttccctgacagagaagaggagtattacacagagccagaagtggcggaatctgacgcagccccgacagaggactccaataacactgaaagtctgaaatccccaaaggtgaactgtgaggagagaaacattacaggattagaaaatttcactctgaaaattttaaatatgtcacaggaccttatggattttctgaacccaaacggtagtgactgtactctagtcctgttttacaccccgtggtgccgcttttctgccagtttggcccctcactttaactctctgccccgggcatttccagctcttcactttttggcactggatgcatctcagcacagcagcctttctaccaggtttggcaccgtagctgttcctaatattttattatttcaaggagctaaaccaatggccagatttaatcatacagatcgaacactggaaacactgaaaatcttcatttttaatcagacaggtatagaagccaagaagaatgtggtggtaactcaagccgaccaaataggccctcttcccagcactttgataaaaagtgtggactggttgcttgtattttccttattctttttaattagttttattatgtatgctaccattcgaactgagagtattcggtggctaattccaggacaagagcaggaacatgtggagtagtgatggtctgaaagaagttggaaagaggaacttcaatccttcgtttcagaaattagtgctacagtttcatacattttctccagtgacgtgttgacttgaaacttcaggcagattaaaagaatcatttgttgaacaactgaatgtataaaaaaattataaactggtgttttaactagtattgcaataagcaaatgcaaaaatattcaatagatgcactattcttgtttttactgcatgaacgtaatccagtatttggaaagtaatccagtttgaaatgtgaagatgtattccggcagaatagtgagtagaatgacatgcttactatacagaaggcaaaaataggactctcaggtaatagtttaaggaaacccttgattccttatatatgtttaagaaggttagttttctgtttctttgcagtttttcttctagagtccatagcaggaaagtatgtaaccagaattggttagtgtgaccccctcaagtagcaagtgatggaaaataagagtcaaataccttgatgtttgtgatctctaactcaaaaaatttgaagtgttttaagttgtttctgggtaagggagatgttaggagaaaggaaatgctgtaactaaagctcaattattatcagttctatgctaacgtatacattttaatcatagttacctaagcagcatgcattaattgaaccttaaaatgttcccactgcgcctggcctaaacaaactttttgaaaagctgtttctaaaagattccttaaattcagatatgacagctaattacctcatcataaattacttttatactaattgtttccagggttttagagtagttgaatgtttatttcacaaggcaccctaaattctatagaaataaaacctcagatgagtctccttcttagagtgttacaatgaatgggagtttacacttttatg

SEQ ID NO: 64510 - DNA, 2446 bp, Homo sapiens
gaagagtgtgcgccagggggctgcctgatggagctatgcatccagctcagcatcgtcatgctggggaaacagctgatccagaacaacctgttcgagatcggcatcccgaagatgaagaagctcatccgctacctgaagctgaagcagcagagcccccctgaccactaggagtgtgtgaagaggaaacagcggtacgaggtggattacaacctggagcccttcgcgggcctcaccccagagtacatggagatgatcatccagtttggcttcgtcaccctgtttgtcgcctccttccccctggccccactgtttgcgctgctgaacaacatcatcgagatccgcctggacgccaaaaagtttgtcactgagctccgaaggccggtagctgtcagagccaaagacatcggaatctggtacaatatcctcagaggcattgggaagcttgctgtcatcatcaatgccttcgtgatctccttcacgtctgacttcatcccgcgcctggtgtacctctacatgtacagtaagaacgggaccatgcacgggttcgcaaccacaccctctcctccttcaacgtcagtgacttccagaacggcacggcccccaatgaccccctggacctgggctacgaggcgcagatctgcagggtataaagactaccgagagccgccgaggccggaaaacaagtacgacatctccaaggacttctgggccgtcctgtgcatccggctggcagttgtgatcgtcttccagaacctggtcatgttcatgagcgactttgtggactgggtcatcccggacatccccaaggacatcagccagcagatccacaaggagaaggtgctcatggtggagctgttcatgcgggaggagcaagacaagcagcagctgctggaaacctggatggagaaggagcggcagaaggacgagccgccgtgcaaccaccacaacaccaaagcctgcccagacagcctcggcagcccagcccccagccatgcctaccacgggggcgtcctgtagctatgccagcggggctgggcaggccagccgggcatcctgaccgatgggcaccctctcccagggcaggcggcttcccgctcccaccagggcccggtgggtcctgggttttctgcaaacatggaggaccactttctgataggacattttcctttcttctttctgttttctttcccttgtttttgcacaaagccattatgcagggaatattttttaatctgtagtattcaagatgaatcaaaatgatggctggtaatacggcaataaggtagcaaaggcaggtgctttgcagaaagaatgcttggaaacttgagtctccctagaggtgaaaagtgagcagaggcccctagaaaccctcctctgaatcctcctaattccttaagatagatgcaaaatggtaagccgaggcatcgcgcaaaagctggtgcgatgcttcagggaaaatggaaaacccacgcaagaataatgattgattccggttccaaaaggtgtcacctacctgtttcagaaaagttagactttccatcgccttttccttccatcagttgagtggctgagagagaagtgcctcatccctgagccacacagggggcgtgggagcatcccagttatccctggaaagctagaaggggacagaggtgtccctgattaagcaggaaacagcacccttggcgtccccagcaggctccccactgtcagccacacacctgcccccatcacaccaagccgacctcagagttgttcatcttccttatgggacaaaaccggttgaccagaaaatgggcagagagagatgacctcggaagcatttccacagatggtgtcagggtttcaagaagtcttagggcttccaggggtcccctggaagctttagaatatttatgggtttttttttcaaatatcaattatatggtagattgaggattttttttctgtagctcaaaggtggagggagtttattagttaaccaaatatcgttgagaggaatttaaaatactgttactaccaaagatttttattaataaaggcttatattttggtaacacttctctatatttttactcacaggaatgtcactgttggacaattattttaaaagtgtataaaaccaagtctcataaatgatatgagtgatctaaatttgcagcaatgatactaaacaactctctgaaatttctcaagcaccaagagaaacatcattttagcaaaggccaggaggaaaaatagaaataaatttgtcttgaagatctcattgatgtgatgttacattccctttaatctgccaactgtggtcaaagttcataggtgtcgtacatttccattatttgctaaaatcatgcaatctgatgcttctcttttctcttgtacagtaagtagtttgaagtgggttttgtatataaatactgtattaaaaattaggaaaaaaccaaaa

SEQ ID NO: 64511 - DNA, 1547 bp, Homo sapiens
tttttttttttggatttttttgtgctttaatgttcgcagtcacacgaaagtggcatctccatcagcactggggcggccggcctcctcatcagccgacagcttgcacggtccccgcctctcatccatttggtctgtttgcaagttactagatcatacaaaaataaccgctacaaattctctgtatctggcatataaaaactgagcaaaaagtatctcttaaagcaaaacatctcagaaaaaatacaacacaggtttaacttctgcagtactttgttcatataaaacactagtaaaataggcttcttaaaaattaaatagtgaaataccaaccaaattatatacattgttacagtacaagtgaatgaggcaaaatatccagttcttagtttcccaggtgggggggggtggccttcagtgcgtggcacggagggggtgacaggaaggccacgttccgatgtcacagtcagcgcagaaagaggcttgcagcgggacaaacagatggaaagaactgagtcacacagggaagaccaggggctcctttgaggaagagtgaggtcatgtttttattgcttgctaatccgaggttttccctggcccgatgcccctctaggtagcctggatcccaaatgctgcagcccacgtagcgctaatccatgtcaccaagcagccacggggaagccacagctgctccagagaagacagaactaggcttcagagccctcaatatctgagctggaccgatcctggtctttcaggtccatcagggtcccacatggtccaactgacacacacgtttccccgctgacggccacgttcacctgagagcctgagggcgggcagtgtgggctcatggcactgggatggtatcactgtggcctggggggtggcactcagacccagccaaccccctcagcgaccacagtgcctcgcccgcttctctgccgccaccagggctgagggtctacgtgcggcgccgcttggcagcactgggactggaagggttgctgtttgcggtcaggactttgtcggtgacccggctgcgcttccgcttgtctgcgccttctttgcaccccaagtctgaggagttcttctctttgtctttgctggatttttctgatgctttccccaaactccctgaagatgaaaaaacatcgtcagccccattgtgggggtccacgtcttccttcatctcctctttcatctcctcttctatcatcacttttccttctcggacctcctgaatgatctcttctggaaggacgaagttcctctctggattcgggaatggaagaatctcagactcatgcagcgcctgcatgtcgtacatggtgctcagatggtcccagatgaccttggatgggacctgccgcccgatgttctggctgaacttgtcccgaatacaaatcatgtggaagtgtcggttcacaccgacgggcttgtggcccagcatggcgtggaagaggcacacctccacctcggggctccacaccactgtctcctccgccgggctggtggccgcctcccccgggcccttgtcgcttgcggcg

SEQ ID NO: 64512 - DNA, 497 bp, Homo sapiens
  misc_feature (1)...(497): n = a,t,c or g
cggcacgaggaagtgatccggaagctgcaggacctggcaggaggcattttccctgaagatgagatcccagagaaggcctgcaggcgcctgcttgaagggaggcggcacaagaagacgaagaagcagaagcgtctgctcaggttgcagcaggagagaggtaggactagggggtgtgttagtcatggagccggcgtcctcacctgcttgcttctcccctggatgggggtcacctgcagtgtctccccctgaagcatgagtgccgagtcccccatcctgggtgcctgctatccacgcatcccggaaatgccctgtcctcggcatccctcctgtaggcctctccctgcctcccccacccaccttccttgtctgcagctcccccgagctgtgtgcgctgccctccctcccggtctggagacatcctcctggctgggctgcctccttccgtgcctccgacgaaatcgtcgacccgagaaattccggagcggtnnnaaagaggc

SEQ ID NO: 64513 - DNA, 863 bp, Homo sapiens
  misc_feature (1)...(863): n = a,t,c or g
ctggaagaagagcgggagttttataatgccaggcgacgggagcatcgccagaggaatgacgttggtggtggcggcagtgagtctcaggagttggttcctcggcctggtggcaacaacaaagaaaaagaggtgcccgctaaagaaaaaccaagctttgaactttctggggcacttcttgaggacaccaacactttccggggtgtagtcattaaatatagtgagcccccagaagcacgtatccccaaaaaacggtggcgtctctacccatttaaaaatgatgaggtgcttccagtcatgtacatacatcgacagagtgcgtacctactgggtcgacaccgccgcattgcagacattccaattgatcacccgtcttgttcaaagcagcatgcggtctttcaatatcggcttgtggaatatacccgtgctgatggcacagttggccgaagagtgaagccctacatcattgaccttggctcaggcaatggaaccttcttaaacaacaaacgtattgagccacagagatactatgaactaaaagaaaaggatgtactcaaatttggattcagtagcagagaatacgtcttgctccatgagtcgncggacacttctgaaatagacaggaaagatgacgaggatgaggaggaggaggaagaagtgtctgacagctagcaaactaagaacccaaactattgatacacggtttccttcttggaagtctttgattgactcagagagcactatggtggtgggtccagcactatggtgctctctgtaatgcctcttactgccttaagtctttcctctgttgctgaccagattgtgttaccatttgaatacactgactaatgtatgttaaactttta

SEQ ID NO: 64514 - DNA, 969 bp, Homo sapiens
ggaattcccgggtcgagggggaccgccttggggggctgtccatcagcccagcgggcatcgtgaagcgggatgagctggtgttccggatggtccgtggccgccgggtgcccatccttatggtgacctcaggcgggtaccagaagcgcacagcccgcatcattgctgactccatacttaatctgtttggcctggggctcattgggcctgagtcacccagcgtctccgcacagaactcagacacaccgctgcttccccctgcagtgccctgacccttgctgccctgcctgtcacgtggccctgcctatccgccccttagtgctttttgttttctaacctcatggggtggtggaggcagccttcagtgagcatggaggggcagggccatccctggctggggcctggagctggcccttcctctacttttccctgctggaagccagaagggcttgaggcctctatgggtgggggcagaaggcagagcctgtgtcccagggggacccacacgaagtcaccagcccataggtccagggaggcaggcagttaactgagaattggagaggacaggctaggtcccaggcacagcgagggccctgggcttggggtgttctggttttgagaacggcagacccaggtcggagtgaggaagcttccacctccatcctgactaggcctgcatcctaactgggcctccctccctccccttggtcatgggatttgctgccctctttgccccagagctgaagagctataggcactggtgtggatggcccaggaggtgctggagctaggtctccaggtgggcctggttcccaggcagcaggtgggaaccctgggcctggatgtgaggggcggtcaggaaggggtacaggtgggttccctcatctggagttccccctcaataaagcaaggtctggacctgccttcccaggcccttctgtgggggtgaaggtggggaaggcctgcggcgcc

SEQ ID NO: 64515 - DNA, 2614 bp, Homo sapiens
ctgtgtggttttatgtaggcatggcaggtgccttttgtttcatcctcatacaactagtcttacttattgattttgcacattcatggaatgaatcgtgggttgaaaaaatggaagaagggaactcgagatgttggtatgcagccttgttatcagctacagctctgaattatctgctgtctttagttgctatcgtcctgttctttgtctactacactcatccagccagttgttcagaaaacaaggcgttcatcagtgtcaacatgctcctctgcgttggtgcttctgtaatgtctatactgccaaaaatccaagaatcacaaccaagatctggtttgttacagtcttcagtaattacagtctacacaatgtatttgacatggtcagctatgaccaatgaaccagaaacaaattgcaacccaagtctactaagcataattggctacaatacaacaagcactgtcccaaaggaagggcagtcagtccagtggtggcatgctcaaggaattataggactaattctctttttgttgtgtgtattttattccagcatccgtacttcaaacaatagtcaggttaataaactgactctaacaagtgatgaatctacattaatagaagatggtggagctagaagtgatggatcactggaggatggggacgatgttcaccgagctgtagataatgaaagggatggtgtcacttacagttattccttctttcacttcatgcttttcctggcttcactttatatcatgatgacccttaccaactggtacaggtatgaaccctctcgtgagatgaaaagtcagtggacagctgtctgggtgaaaatctcttccagttggattggcatcgtgctgtatgtttggacactcgtggcaccacttgttcttacaaatcgtgattttgactgagtgagacttctagcatgaaagtcccactttgattattgcttatttgaaaacagtattcccaacttttgtaaagttgtgtatgtttttgcttcccatgtaacttctccagtgttctggcatgaattagattttactgcttgtcattttgttattttcttaccaagtgcattgatatgtgaagtagaatgaattgcagaggaaagttttatgaatatggtgatgagttagtaaaagtggccactattgggcttattctctgctctatagttgtgaaatgaagagtgaaaacaaatttgtttgactattttaaaattatattagaccttaagctgttttagcaagcattaaagcaaatgtatggctgccttttgaaatatttgatgtgttgcctggcaggatactgcaaagaacatggtttattttaaaatttataaacaagtcacttaaatgccagttgtctgaaaaatcttataaggttttacccttgatacggaatttacacaggtagggagtgtttagtggacaatagtgtaggttatggatggaggtgtcggtactaaattgaataacgagtaaataatcttacttgggtagagatggcctttgccaacaaagtgaactgttttggttgttttaaactcatgaagtatgggttcagtggaaatgtttggaactctgaaggatttagacaaggttttgaaaaggataatcatgggttagaaggaagtgtttgaaagtcactttgaaagttagttttgggccagcacggtagctcacccttgtaatcccagcactttgggaggctgaggtgggtagattacttgagcccaggaattcaagaccagcctgggcaacatggtgaaaccctgtttctataaaaaataatctgggctttgtagcatatgcctgtggtcccagctactgaggaggctgaggtgggaggattgcttgagcccaggaggcagaggttgcagtgagccaaggtcacgtcactgcactctagcctgggcaacagagtaagacaaaaaaatatatatatattgaaaatcaaaggaggcaaaattttgacagggaaggaagtaactgcaaaacactaggctttagtaggtacttatataaaatctagtccagttctctcatttaaaaaaatgaagacactgaagtacagacttaaatagctcagatagctaattaggaaatttcaagttggccaataatagcattctctctgacatttaaaaataatttctattcaaaatacatgcataattgattttacacctcattactggtggataatttatgtgatgtggattgctggtgtccagcatgacccataaacaggtcagaagaatgatggaatgttttagaataaactcctgcttatagtatactacacagttcaaaagatgtttaaaatgcttttgtatttactgccatgtaattgaaatatatagattattgtaacctttcaacctgaaaatcaagcagtatgagagtttagttatttgtatgtgtcactagtgtctaatgaagcttttaaaatctacaatttcttctttaaaaatatttattaatgtgaatggaatataacaattcagcttaattccccaaccttattctgtgtgtagacattgtattccacaattttgaatggctgtgttttacctctaaataaatgaattcagagaaaaaaaaaa

SEQ ID NO: 64516 - DNA, 1272 bp, Homo sapiens
tcagtgtggtggaattcccgggaggtggggggtgcgtctgcccggccgccccttctgggaagtgaggagcccctctgcccggccgccaccccgtctgggaggtgtacccaagagctcattgagaatgggccatgatgacgatggcggttttgtcgaaaagaaaaggggaaaatgtggggaaaagaaagagagatcagattgttactgtgtctgtgtagaaagaagtagacataggagattccattttgttctgtactaagaaaaattcttctgccttgggatgctgttaatctataaccttacccccaacccgtgctctctgaaacatgtgctgtgtcaactcacggttaaatggatcaaggacggtgcaagatgtgctttgttaaacagatgcttgaaggcagcatgctccttaagagtcatcaccactccctaatctcaagtacccagggacacaaacactgcggaaggccgcagggacctctgcctaggaaaaccaggtattgtccaaggtttctccccatgtgatagtctgaaatatggcctcatgggaagggaaagacctgaccgtcccccagcccgacacctgtaaagggtctgtgctgaggaggattagtataagaggaaggcatgcctctttgcagttgagacaagagcaaggcaactgcctcctgcccgtccctgggcaatggaatgtctcggtataaaacccgattgtatattccatttactgagatggggaaaaccgccttagggctggaggtgggacatgcgggcaacaatactgctctgtaaggcattgagatgtttatgtatatgcatatctaaagcacagcacttaatcctttacattgtctatgatgcaaagacctttgttcacgtgtttgtctgctgaccctctccccacaattgtcttgtgaccgtgacacatccccctctttgagaaacacccacaaatgatcaataaatactaagggaacgcagaggctggcgggatcctccatgtgctgaacgctggttccccgggtccccttatttctttctctatactttgtctctgtgtctttttctttcctaagtctctcgttccaccttacgagaaacacccacaggtgtggaggggcaacccacccctacactcacactatgcagggcgacatgagaagccccggtgttttgtcaggaggcagagagaggggagaaagctaaggccagagccttggctggggattctgtgggaaaggcacggagggcggggtgagcacctcataa

SEQ ID NO: 64517 - DNA, 741 bp, Homo sapiens
tttttttgggctgccctcatgggccagggtgtttattcacagagcaacagagtcagcacagggcagggaacgcccaggcctcagcatatcctgagacctgcagcctgtcccagcctgggcggggcaggtgtccggtccctggctagggtctgaccaagtgctggatgtcacgtgaggaagcggggccttgtctggggtggtctacggatcactggtgacatatgccgggagggtgacaccatccgcattgaaaaggatgttgtcaaagccaggggctgtggcctctgtgttgctctggaaggggcagctccccttcttgtgcagccagccccgtcccccaagtcccagcagcaccaggagcatgagcaataggagggcactgccaaccacagctggcacagacccgggtgcggctgtgttccccgggctgggggcaggctgctggcaatgctgcccagccagatactccacgtcatccagggcaatgggccccagggctggctggccgcccagagtggcttcaaacacgatctggaactccttggcactggctacctccacctgggcctccagccactggtgccgccgatgcccgcctgcgccccacacagccagctggccctgagcactgtgcagcagtaccttcagctcccccttgtagaagtgctcaggaaaacccatgtggtaccagaagcggaggcaggaggctggggtggccggcagaggctcgctgcgcagcca

SEQ ID NO: 64518 - DNA, 1521 bp, Homo sapiens
  misc_feature (1)...(1521): n = a,t,c or g
ttttttttttttacatcttcactgtagaaaatttatttgcctttccatggacaacaatcatttgtattattatcagttttctacaacacgtagagttgtcaaatagcttaaagacaaggacaagtatagacccttctagaatcagataactcctagaaaggtcttctagacaatctgtagtgaagttaagtaataccttcaagatttcacaaactgtaaactcgatctgggaattcaacccagatctatattgttctggaaattccaggctctttttttctgtatcaagaagcttttggactggaagagtgtttttcagcaggaattgtggtattggccacccatcaccccatttaattaaaaatccctggcctacaggacctacagcaatgtactgaagaacttcagaacctcaattagccatttgccatcttgagagagtcttgtccatggttcaagtgttcccttggaactcctgaagggcttggagcttagtctgagccatgggaaatggccaaagagtctcaagattcccactgtatcctgtgccttggagcaggcaaggagaccatggcagcccctggccccggtcagttcttggctttggcagttccgggaccaggacgctggtacagccggattatcccttcatcgtgtagccgcttccagacttctctctccagcttgaagtcatggtttatgtaaaagatcagccgcttccatgatgtatcatagtagtgatcagaaaagcgctcatggccctcagtgatgaagccataagcactcacctggtcacagagctgaagggcagtgagcagcaggagggccccagtggtggggcggtatatcctccagtgggcaccatccagggtcttagacctcagaaacctgttcttcatgtatcggagaaagtctgggtgcagcaacaggtccctgtccatgtgcagggcttcccgaaaagcttcctggggtctgtgcctgaaccagaaaaggttttttgacatcaccgtctgattcataagcagtgcttccagccactcatagtcccgggtgccttccaggaagtgcaagtagcggacgtccttcccaagaggcacgttcttgaaaccccgattgcccaatataaggagtgactgggtcagggagaaggcggtaaagccgtagaaggatgtccgagtccccacatcctgttcgtagcctttaatgagagctccgctcaatcggaacacgtagtcgtgactgtctatctcctggcccatgtgggagttgttcaggatgcccccgttgcccaccacggcacaggtgatgctccggaggctcccagcggggaggctggccaggagcagctgctgctggggccctggagggaagcgtgtctcccccttttgcnccaaggagtagttgagctccatgaaaccaaagggtggtgcaaagtgttccaggcgcgtacgagtgggcagtcccggnaattccggnccggtncgacggttgtcgaagctatcaattntcnngnangccccg

SEQ ID NO: 64519 - DNA, 5840 bp, Homo sapiens
gccctgcccacctcacgcagactgccgggacctctggcagaccttttcttgcacctgccagccaggttactacggcccaggctgtgtggatgcctgcctcctgaacccctgtcagaaccagggatcatgccggcacctgccaggagccccccatggctatacctgtgactgtgtgggtggctatttcgggcaccactgtgagcacaggatggaccagcagtgcccacggggctggtgggggagcccaacctgtggcccctgcaactgtgatgttcacaaaggttttgatcccaactgcaacaagacaaatgggcagtgtcactgcaaggagttccactaccgaccgcggggcagtgactcttgcctcccatgtgactgctaccctgtgggctccacctcgcgctcatgtgcaccccacagcgggcagtgcccctgtcgcccaggagcccttggccgccagtgcaacagctgtgacagtcccttcgcagaggtgacagccagcggctgccgggtgctctatgatgcctgccctaagtccctgagatctggtgtgtggtggccccagacaaagtttggcgtcctggccacagtgccctgtccccggggggccctgggattgcggggtgcaggtgctgctgtgcggctgtgtgatgaggcccagggttggctggagcccgacctcttcaactgtacctcccctgcctttcgagagctcagtctgctgctggatggcctagagctgaacaagacggcactggataccatggaggccaagaagctggctcagcggctacgggaggtgactggccacactgaccactattttagccaagatgttcgagtcactgcccgcctgctggcccacctgctggccttcgagagccatcagcagggcttcgggctgacagccacacaggatgcccacttcaatgagaatctgctgtgggccggctctgcactgcttgccccagagacaggggacttgtgggcggcgctggggcagcgggcccctgggggctccccaggcagcgcgggactggtgaggcacctggaggagtatgcagccacactcgcaaggaatatggaactcacatacctgaatcccatggggctggtgacgcctaatatcatgctcagcattgaccgcatggagcaccccagttctccccggggggcccgtcgctaccctcgctaccatagcaacctctttcgaggccaggatgcctgggatcctcacacccatgtgctgctgccttcccagtccccacggccatccccatctgaagttctgcccacaagcagcagcatagaaaactccaccacctcaagtgtggtccccccaccagccccgccagagccagagcctgggatctccattatcattctcctcgtttaccgcaccttagggggactgctccctgcccagttccaggcagaacgccgaggtgccaggcttcctcagaaccccgtcatgaactccccggtggtcagcgtggctgtgttccacggacgcaacttcctaaggggaatcctggagtcccccatcagcctagagtttcgcctgctacagacagcgaatcggagcaaggcgatctgtgtgcagtgggacccacctggcctggcggagcagcatggtgtgtggacagcacgggactgcgagctggtgcacaggaatgggtcccacgcacggtgtcgctgcagccggacagggacctttggggtcctcatggatgcctctccccgtgagaggctggagggcgacctggagctgctggctgtgttcacccacgtggtcgtggctgtgtctgtggctgcgctggtgctgactgcagccatcctgctgagcctgcgcagcctcaagtccaatgtgcgtgggatccatgccaatgtggcagccgccctgggggtggcagagctcctcttcctgctggggattcacaggacccacaatcagctggtgtgcactgcagtcgtcatcctcctgcactacttcttcctcagcaccttcgcgtggctcttcgtgcaggggctgcacctctaccgcatgcaggttgagccacgcaacgtggaccgcggcgccatgcgcttctaccatgccctgggctggggcgtccctgctgtgctgctgggccttgctgtgggcctggaccctgagggctatgggaaccctgacttctgctggatctcagtccacgagcccctcatctggagctttgctggccctgttgtcctggtcatagtgatgaacgggaccatgtttctcctcgctgcccgcacatcctgctccacagggcagagggaggccaagaagacctctgcactgacccttcgcagctccttcctgctgcttctgctggtcagtgcctcctggctctttgggctcctggcagtcaaccacagcatcctagccttccactacctccatgctggactctgcggcctccagggcctggcggtgctgctgctcttctgtgtcctaaatgcagatgctcgggctgcctggatgccagcctgtctgggcaggaaggcagcgcctgaggaggcaaggccagcacctgggctgggacctggggcctacaacaacacggctctctttgaggagagtggcctcatccgcatcactctgggcgcctccaccgtctcctctgtgagcagtgcccgctccggccggacccaggaccaggacagccagcggggccgcagctacctcagggacaatgtcctggttcgacatggctcagccgctgaccacactgaccacagcctccaggctcatgctggccccactgacctggacgtggccatgttccatcgagatgctggcgcagactccgactctgacagtgacctgtccttggaggaggagaggagtctctccattccatcttcagaaagcgaggacaatggccggacgcgggggcgcttccaacggccactctgccgagcagcccagagtgagaggctcctcacccaccccaaagatgtggatggcaatgacctcctgtcctactggccagccctgggggagtgcgaggcagccccctgtgctctgcagacttggggctctgaaaggcgcctggggctggacaccagcaaggatgcagctaacaacaaccagccagacccggccctgaccagtggggatgagacttctctgggccgggcccagcgccagaggaaaggcatcctgaagaaccggttgcaatacccactggtgccacagacccgaggtgcccctgagctgtcctggtgccgtgcagccaccttgggccaccgtgctgtgccagctgcctcttacggtcgcatctatgctggcgggggcacgggcagcctttcacagccagccagccgctactcttctagagaacagctggacctgctcctccggcggcaactgagccgtgagcgactagaggaagcccctgcccctgttctacgtcccctgagccggccagggtcccaggaatgcatggatgctgcaccaggccgactggagcccaaagatcggggcagcaccctgccacggaggcagccacctcgggactaccctggcgccatggctggccgcttcgggtcacgggatgcgctcgacttaggggcacctcgagagtggttgagcacgctgcctccgccccgccgcacccgggaccttgacccacagcccccacctctgcccctgtctccccagcggcaactctcaagggaccccctcttgccatcccggccgctggactctctgtctaggagctcgaactctcgggagcagctggaccaggtgcctagccggcacccctcacgagaagcccttgggccactcccgcagctgctcagagctagggaggactcggtcagtggccccagccatggcccctccacagaacagttggacattctttcctccatccttgcctctttcaactcctcggccctctcctctgtgcaatcttcaagcacacccttgggccctcacaccactgccacaccttctgccacagcctctgtgcttgggccctccacgccacgttctgccacgtctcacagcatctcggagctgtcgccagactcagaagttcccagaagtgagggtcactcctgaggggatgacggcgtggacgaggaacagctgagggcgacagaggatctaggctaacaggagagactccaggagtgggggcagatcccaaggcagcctcctgctccccagtggtgggtgccccagctctacctggtgtggcagggctgaggctccatgtgcatctgtgagcatgcgtgtgacaggtgcagagacgggggactggagggagacttttatacgttttgtacctttgtaaccagagagatgcttatgttatttttcagcttttctgtctcctggggggtttgaggctgggctgggagggggagggagatagagggagagatgcagtttgaccccatttgggtcctgagcaaaccctatgctcatctctctctccttcctggggtggactcagatgggtgggacacatgccttcctccccctattccacccccaagttgatctgagtatcgtcaggggcccaaagtacagaattgttctttgctttttattgaatgctccaaaggccaaacttctggggctgggggttggtcttggaaacaggggtcctctgacttcctcatgggggcttgctcataccgcccctcctggtggatgtgtgtgtttattatgtggagtccctgccacttactgccttatgacctaggactgatgctgtggggtgctggtggagcagctgatgtcgtgtttacagagcaaggcttccctgtctcccacggggaggggctcgggcctctagtcagacattcctgcagagggtcggtggaggggtcattcacctgcccctgcagcaagcaaaagttgtctgtggtgccatttgattccctgacactgccccctgcttgaattgattccgaagggtagggtgggaaggtgagcaaagggagcagaaacaagggaattcaagacccagaatgtaggtgccactgcctcctatgtttacaggatcctccgtggccctaggcacctgggctgcaggaagtgactccgttccactcctcctttattcccttaaaaagggaaaaatgactgttacgaccctgttcacaaaactcttacttttgctattttgtctgctgtccagaactgaagactttaaaattttgttactgtttacaagtccagattcaaaaaatgtttttactttgtttacaactcaaaactttgagttttacactttgtttacagtagataattttttttcctttgtttccaagtgaaaggtagggaaagtgggagagggacttggaggacccacctgtgaggaccctgacctggccatcttgaggggttttctaacccccaggtctcccaggccgaaggtcagccttgagtcccgtttaacagcagatccagaagaccttgagagtaggcgtcctctaaccacgggggagagtggctgtgcagggctggggggtggtctgtgcagacacctcctcacccaccaccccatgcatactcttgggaagcagcttcctgggagattagaaattctacttccctgactggagctaaatcccaccagccaggacccaaactctccttaccgagaaggaccccagctcttgaagggctgagtggcctgctgggggtgggagggtgtctttactatgtcctaggtttcgtagatgcccctctctggggttcccctcctccagcccagcggccctctttcctgtctgtgtaaattgttccgtgaagccgcgctctgttttgggaataaacttctatagaaaacaaa

SEQ ID NO: 64520 - DNA, 1697 bp, Homo sapiens
tttcgtgtggtgggctgcgggtaggggaggggatggaccgagtcccggcttgtcgggatgagggttccggaagatctggccagtaagattctactccctggctgtgcaccgggttccctacccctgtctacgtcggctccgccacttcgcggcttgagactaaaagagcatcccggcagggggccttccagccccaaagcagcctgtccagagacccccaaattctgatcctgaagttggaggcctccggggatgttcttttttaatcttttaaaagggttagaggggttgaggctgcctgaccccagcctaatggggtaggtaggccttgggaagtggagcatgggggcaaaggatccaagcattgagccttcatcctctattccccatccagtggggtgccgaggctcaggcagcatgacgacggagacctttgtgaaggatatcaagcctgggctcaagaatctgaaccttatcttcattgtgctggagacaggccgagtgaccaagacaaaggacgggcatgaggttcggacctgcaaagtggcggacaaaacaggcagcatcaatatctctgtctgggacgatgttggcaatctgatccagcctggggacattatccggctcaccaaagggtacgcttcagttttcaaaggttgtctgacactatatactggccgtgggggtgatctgcagaagattggagaattctgtatggtttattctgaggttcctaacttcagtgagccaaacccagagtacagcacccagcaggcacccaacaaggcggtgcagaacgacagcaacccttcagcttcccagcctaccactggaccctctgctgcctctccagcctctgagaaccagaatgggaatggactgagtgccccaccaggtcccggtggtggcccacatccccctcatactccctcccacccacccagcacccgaatcactcgaagccagcccaaccacacacctgcaggcccgcctggcccttccagcaaccctgttagtaacggcaaagaaacccggaggagcagcaagagatagcatgacattctttcttcctgccaccaaccacatcccaagtgtcccctggagagcaagatagccttccactgattggctggtgtagcagtattttagccactgaacttcagtggagggtggtgagcagtgtccttatccaccctaatctcatactccctcattgtccagctgaactacctgtcccctgggagtcaggaccctctgcctgctctctttcctctttagaaatggcagttactggctgggcgcagtggctcacgcttgtaatcccagcactttgggaagccgaggtgggcggatcacctgaggtcgggagttcaagaccagcctgaccaacatggagaaaccccgtgtctactaaaaatacagaattagccaggcatggtggcgtatgcctgtaatcccagctacttaggaggctgaggcaggagaatctcttgaaaccgggaggcggaggttgaggtgagccgaaattgcaccattgcactccagcctgggcaataagagcgaaactccatctcaaaaaaaaaagaaagaaagaaagaaagaaagaaagaaatggcagttaccatctgtttcttctgtgtgagacatgggagtctaactgaagtctctccttcctaataaatgttaccacttctaaa

SEQ ID NO: 64521 - DNA, 2562 bp, Homo sapiens
atttccatgaaatgggatcaagtggaggtgatcccatatattgcctgtgggaatgccagttctaacagctctgcgggtggccgcctggtatcctttgaagtgccacagaacacctcagtcaagattcggcaagatgccactgcctcactgattttgctctggaagggcacggccacaggattccaacagtgctccctcatagatggacgaagtgtgaccccccttcaggcttcagggggactggtcctcctggaggagatgctcgccttggggaataatcactttattggttttgtgaatgattctgtgactaagtctattgtggctttgcgcttaactctggtggtgaaggtcagcacctgtgtgccgggggagagtcacgcaaatgacttggagtgttcaggaaaaggaaaatgcaccacgaagccgtcagaggcaactttttcctgtacctgtgaggagcagtacgtgggtactttctgtgaagaatacgatgcttgccagaggaaaccttgccaaaacaacgcgagctgtattgatgcaaatgaaaagcaagatgggagcaatttcacctgtgtttgccttcctggttatactggagagctttgccagtccaagattgattactgcatcctaaacccatgcagaaatggagcaacatgcatttccagtctcagtggattcacctgccagtgtccagaaggatacttcggatctgcttgtgaagaaaaggtggacccctgcgcctcgtctccgtgccagaacaacggcacctgctatgtggacggggtacactttacctgcaactgcagcccgggcttcacagggccgacctgtgcccagcttattgacttctgtgccctcagcccctgtgctcatggcacgtgccgcagcgtgggcaccagctacaaatgcctctgtgatccaggttaccatggcctctactgtgaggaggaatataatgagtgcctctccgctccatgcctgaatgcagccacctgcagggacctcgttaatggctatgagtgtgtgtgcctggcagaatacaaaggaacacactgtgaattgtacaaggatccctgcgctaacgtcagctgtctgaacggagccacctgtgacagcgacggcctgaatggcacgtgcatctgtgcacccgggtttacaggtgaagagtgcgacattgacataaatgaatgtgacagtaacccctgccaccatggtgggagctgcctggaccagcccaatggttataactgccactgcccgcatggttgggtgggagcaaactgtgagatccacctccaatggaagtccgggcacatggcggagagcctcaccaacatgccacggcactccctctacatcatcattggagccctctgcgtggccttcatccttatgctgatcatcctgatcgtggggatttgccgcatcagccgcattgaataccagggttcttccaggccagcctatgaggagttctacaactgccgcagcatcgacagcgagttcagcaatgccattgcatccatccggcatgccaggtttggaaagaaatcccggcctgcaatgtatgatgtgagccccatcgcctatgaagattacagtcctgatgacaaacccttggtcacactgattaaaactaaagatttgtaatctttttttggattatttttcaaaaagatgagatactacactcatttaaatatttttaagaaaataaaaagcttaagaaatttaaaatgctagctgctcaagagttttcagtagaatatttaagaactaattttctgcagcttttagtttggaaaaaatattttaaaaacaaaatttgtgaaacctatagacgatgttttaatgtaccttcagctctctaaactgtgtgcttctactagtgtgtgctcttttcactgtagacactatcacgagacccagattaatttctgtggttgttacagaataagtctaatcaaggagaagtttctgtttgacgtttgagtgccggctttctgagtagagttaggaaaaccacgtaacgtagcatatgatgtataatagagtatacccgttacttaaaaagaagtctgaaatgttcgttttgtggaaaagaaactagttaaatttactattcctaacccgaatgaaattagcctttgccttattctgtgcatgggtaagtaacttatttctgcactgttttgttgaactttgtggaaacattctttcgagtttgtttttgtcattttcgtaacagtcgtcgaactaggcctcaaaaacatacgtaacgaaaaggcctagcgaggcaaattctgattgatttgaatctatatttttctttaaaaagtcaagggttctatattgtgagtaaattaaatttacatttgagttgtttgttgctaagaggtagtaaatgtaagagagtactggttccttcagtagtgagtatttctcatagtgcagctttatttatctccaggatgtttttgtggctgtatttgattgatatgtgcttcttctgattcttgctaatttccaaccatattgaataaatgtgatcaagtc

SEQ ID NO: 64522 - DNA, 6152 bp, Homo sapiens
gcgcctgcgcatagaccccagctgcccacagcttccctacactgtgcatcggatgttctacgaggccctggataagtatggggacctcatcgctttgggcttcaagcgccaggacaagtgggaacacatctcctactcccaatactacctgctcgcccgcagagccgccaagggcttcctgaagctcggcctgaagcaggcccacagtgtggccatcctcggcttcaactccccggagtggttcttctcggcagtgggcacagtatttgcaggtggcatcgtcactggcatctacaccaccagctccccagaggcctgccagtacatcgcttatgactgctgcgccaatgtcatcatggtcgacacgcagaagcagctggaaaagatcctgaagatctggaaacagttgccacatctaaaggcagtcgtgatatataaagaacctcctccaaacaagatggccaatgtgtacacgatggaggaattcatggagctggggaatgaagtgcctgaggaagccctggacgccatcattgacacccagcagcccaaccagtgctgtgtgctagtctacacttccggcaccactgggaaccccaagggcgtgatgctgagtcaagacaatatcacgtggacggcacggtacggcagccaggccggtgacatccggccggcagaagtccagcaggaggtggtagtcagctacctgcccctcagccatattgccgcccagatctacgacctgtggacaggcatccagtggggggcccaggtttgctttgccgaacccgacgccctgaaggggagcctggtgaacacgctgcgggaggtggagcccacatcacacatgggggtgccccgggtatgggagaagatcatggagcgcatccaggaggtggcggctcagtctggcttcatccggcgaaagatgctgctgtgggccatgtcggtgaccttggagcagaacctcacctgccccggcagcgacctgaagcccttcacaaccagactggcagattacctggtgctagccaaggttcgccaggcactgggatttgccaagtgtcaaaagaacttctatggagcggcccccatgatggcagagacacagcacttcttcctgggtctcaacatccgcttgtatgcgggctacggcctcagtgagacctcaggcccccacttcatgtccagtccctacaactaccggctgtacagctcaggcaagttggtgcccggctgtcgggtgaagctggtgaaccaggacgcagagggcattggcgagatctgcctgtggggccgcaccatattcatgggctacctgaacatggaggacaagacttgtgaggccatcgacgaggaaggctggctgcacacgggtgatgctggccgcctggacgccgatggcttcctctacatcactgggcgcctcaaagaattaatcatcacagctggtggggagaatgtgccccctgtgcccatcgaggaggccgtgaagatggagctgcccatcatcagcaacgccatgctcattggggaccagaggaagttcctgtccatgctgctcaccttgaagtgcactctggacccagacacctctgaccagactgataatctgactgaacaagctatggagttctgccagagggtgggcagcagagccaccacagtgtccgagatcatagagaagaaggatgaggccgtgtaccaggccatcgaagaggggatccggagggtcaacatgaacgcggcggcccggccctaccacatccagaagtgggccattctcgagagagacttctccatttcgggtggagagttgggtcccacgatgaaactgaaacggctcacagttttggagaagtacaaaggtatcattgactccttttaccaagagcaaaaaatgtaatcagggcctatgcctgcagtttctatagaatagagggcaggcgttccgagcctcttcctgagccccaggtctcttcagtctgggcacaggcatttctgccaagtctgttagatctccaggtcagggcacagcactggctctacatttaccaggtcttacgccaacaatagctgacaattccaagaagcttcacgtgtgggtagttttaattcagtttaagtattgctttttgttcaggtgacaaatgagatcagctctccttccagaacgaaagggctgataatttttggccttagttccaggtagattaaaaagctgctagctcacatacaggacagccagcagtaggctgtggagcgggtaggagagagatggctgatactgctcacgtgcgctgcaggaaaagcaatcagtcacaactcacctagcgacctgacttactctggaatcttggcgggcatcgccgaccctattattccattaccaggcactccgccacccacatgccaactgacttgatgcttaataaaactgctgctgcctgtttgattctatttaatgtataatttgaatattaaaccttttaacagaactgtcaacaaggacctgattttttttgtcaattgagcaggtgggaccagtgcagagagtagtgggcatttaactcacaggactgtgcacagcgggcatgcgagtgaccattagtgccctggaataaacaaaggtgcaggatggggtcaagtggcgcattctcataaaagcagccagctttacgttagcctgtcgccaccagaccaccccacttccattctgaatacgggaagcagccattctcagtagcaagctgagccaaaatgaccgaaggcatttgaacaggaaacaggtagagaaagcaaacatctcagttttggaattctttattactttgaacccaagagcccctgataactggcacaatccaatgaaacagaggaagcagcagcttaaacaaaggaaaatacatttaagattataagtctgggggggcggttacaagcttaaaaagtgacccagacagggatatcattgctaaaaaaaaaaaaatccccttgtgacctgggtacattttgcaaagccacaggtttgcaatgttacacaagggccaaaggaggccatgagttgtctttggttgtggggacagagggtaactgttcatgaaaatagtgagtgtctgaagattaagaaaatcatgctgcagcagaggagaagggagaggaagacaggaagggaaaggagatgcctgagggtcaaaagctgagcccaagcctaagcccaagctcaagctcaagccccagcatggcataattttgtgaattaactcaggctgagttgcctccagtctttggaatgtcatcttatactggtactgctgaggcagagggcagtaattggtgctttgggataggagaaggggcagttgctgaaatacaaaattaatagcatcccaagttcctcaattgcagccaaaatacatgtgttcgggcctttcggcagtatcgcccccagaactacctgctgtagtgtggtccattcccagacagcaacatgcaagaataagtttacaatacactcagcccttctggcttcagatcaggggctcagaggctgtgacaactcatgatgctgaaaatgtatccagtgaaaatgaagtactagctctctgcttcattaaaagctcttggaaagaatattaaatctcaagacaacaaaataattgaacacacaatacatttgtgtctttgtatccaatatattacctttgtcttattaacaaaaattatatctctcattatatatttcttggatctgaagtttttattcacactcagtaatttctgtaaaggacaaatctgtctctattttccatatcatttagaaatataccacattcactctttttgatgtgaactttcccaggaaaattctcttgtgcccatttagttttagaagagtgtcattttgtgctattatgtcaatatcctgttttatttccattatgtttttcaaaaaccgaagaaaataaggtttttcttaaaaagttagacattttctcttgttaattctgtatcctgttatttacagctgaagagaaactattttaacttaagtgtaaaatggtttagaatagcaaatgatacagtccactcagagtttacaaaaaaaacatttaccaggtagacacttaataaataaaacaagcacttggaaaaagttctttgaaaacagacctagggacatccacctgcatcttttgcacagattttgttaagaaaaggccagatctaaaaatgtactgtcaagaaacaagcaaaccaatgcatacatacgtaggtattctaaacagaggttcatgtggtgtccatttagagtgactgatgtaaatgccagttgtagaagtgttaatctaaatcttttactcggcgacagatttcctctgtgaagtctgagcattttgcattgcctcccaaatcttttgtcaagctctgagaaaaggaaaaagcaaaaataaaagatgtatccgcaaactaaactaaaccaaggagattttaaagccctcagtgagatgccacctgggcaagttactcggctgctctttcatttagttcctcatttcaaagtgaggaaccactccaccaccatctacccagcccaggaggatcgggatccaatctcatagtgtatacaacagcactctgcaaagaataaggtgctcttgatgcaaagggaggcagggagctttaccaaaattttccctttgttcacacaatagaccctaacccagattagttggtcatggatatttaaataaaagcgaatctaaataagaagtttcataaaaatccttgggaaatatgtctcaggaatagacctgagacatattttgatctatttttgtttttattattattttttttttagatggagtctcactctgttgcccaggctggagtgcagtggcacgatcccagctcaccacaacctctgcctcctgggttcaagcgattctcctgcctcagcgtcctgaatagctggaattacaagtgcatgccaccatacccaactaatttttgtatctgatctatttttggaggctgggacacaaatacgaaagaaatatttaaatcattaactctttttttttttttaagagatggggtctcactatgtggcccaggctggtcttgaactcagaggctaaggtgatcctcctgcctcagcctatagctgcaactacaggcatgcaccaccacacctgcctaaatcattaactcttaaacctccctctttaggaaagaaagcctcccatacaactgatctgttctaccagcttatcctttctttcctgcatacagaccccaatatatttaattctctttatctttccatcctacacaataaaagggcccactatgtaattcaggcacctctctactgggctgtagattataacttcccaaatataactttaaagaataagaaaatcatatgacctccaatgtgactatcaggctgttaaaaacaagcctgaatttcttgtattttggccacacgatataatttcaaattacagaatttttttaaaagaagggaccaactttgaagatattacgctaagtgaaataagccagactcaaaggacaaatactgtatgattccacttacatgaggtacctagagtagtcaaattcatagagacaggaagcagaatggcaggtgtcagaggatgggagggggaagggaaagttactgtttaacgggtgcagagtctcagtttgagaaaatgaaactggtctggagatgactgatggtgatggttacattacaatgtgaatgtacttaacattattgaactgtatacctaaatacggctaaaatggcaaattttatgttatgcatatttttcacaatttttgttaaaaaggacctcaaattagggatgagtcttcaagtgcattatttcctctaacttcggaatagcccgcgacacttcttccacaggccacaattgcttaccgaggcggtggagcttgttgggtaaggcccagactgcgtgttaataccaacttgggtcatttaggagctgtaaaaccttggacatattatttattctctctgtacctcagtttcctcatctataaaatggaattatagcatctacttcaaagagttatagaaaaactttgctgagatgatatataaagaactt

SEQ ID NO: 64523 - DNA, 2771 bp, Homo sapiens
gatctgagcgccggccgcggtgcccaggcactcccttggcgggccggatggcggaccccggcccagatcccgaatctgagtcggaatcggtgttcccgcgggaggtcgggctctttgcagactcttactcggagaagagccagttctgtttctgtgggcatgtgctgaccatcacgcagaactttgggtcccgcctcggggtggcggcgcgcgtgtgggacgcggccctgagcctgtgcaattatttcgagagtcaaaatgtggatttccgaggcaagaaggtgatcgaactgggtgcggggacaggcatcgtggggatcttggcagcgctgcagggagcttatggtctagtgagggagacagaggacgatgtcatagaacaagaactctggcgaggtatgcgtggagcctgtggacatgctctatccatgtctaccatgactccctgggaatccatcaagggaagctctgtcagggggggatgttaccatcactgacctgcccctggccctagaacagatccagggcaacgtccaggccaatgtgccagctggaggccaggcccaggtgcgtgccttgtcctgggggattgaccatcatgtcttccctgcaaactatgacctggtgctgggggctgatatcgtgtacctggaacccaccttccctctgctgctggggaccctccaacacctgtgcaggccccatggcaccatctatctggcctccaagatgagaaaggagcatgggacagagagcttctttcagcacctcctgccccagcatttccaactggagctggctcagcgggatgaggatgaaaatgtcaacatctatagggccaggcacagggaaccaagacctgcttgacatcacccttgctgttcttctcaatctcttgctctaatgaaggaactgtgtatctcaaaaaccatatttccagagccacaaacatgaggaccaaaaaggatggatttccctggcctctctcactttcctccttccctctttgttaccccagatactcttgggcaggtgcagtgaggtgcctgcttacaaggaatcccagagttctggcagcactagtgttagaacaccaaggaggttcctggctcctgttctcagagaaggaggatggtaaggtatccaggatttttagggggtaagggagatatatgggatgtgagagcagtgattgtagacagactgtcactgatcacttccattcctgttgctgtttacacagaatggactttaaaaaaattctgtgggatttttttttctttttttcttttttttgagacagggtctcactctgtcatccaagctggagtgcagtggtgtgatcacagctcactgcagcctcaacctctgaaggcccagatgatcttcctgcctcagctccccaagtagctgggactagaggcatgcgccaccacacccggctaatttttgtattttcagtagagacagggtttcgccatgttgcccagggtggtctcaaactcctgggctcaagtgatccacccgccttgcctcccaaagtgctgggattgcaggcatggcccactgtgctagcctaggatttttttttttttttaagaaagaattaagccttaaaaatctattgtgcaagaacccaacttttactcaggagctgagaaggaagaagcctcaaaccacccatttcctgctttttagagatagagtctagtggaaccatggctctaactgggtcaagtcctcctagctctgaagctaaggctgcagagctgtcctttggactgtagtttcttcatgctttccagagttagagccttgatcacggaacatcattgtgtgcagaagaatactgtacctagtactaagttcttttcatctttgatttttctttagcttcatcagtccttccttcctaatctctaatcccctgaagcctaacacagttcctaatgtgttttgccttaacctcttttctcttcccacattggtacttctggttggggctctctttacttactgcttaggcacatagtcaccttctctggactccctgcttccatgctttctccttcagtccattccgcaaactcttgtgatcttccaaaattagctctgattagctttcacttcctgtagaagcaagaacaagctcctctgcttggtacttagtctgtgtccatgtgatccaaaattaccttcctattgcatttcctactcctttgctacgtgtattggacctctggccaaattacaaaagatgtactctttgttctctaaaaccacactaaagttttctgacttctttcacactctttatgataatcctctgcctgaaaggctattgccacctgtcaaaatcttcattattctttgcctctttcctgagcctcttgcttgaatgtgatttctttctccctgagacccataaggttcatcttatgggaccttaatttgtcttgcatggacatttgtgattctcattttctcaccattaaattaccttggagggtagggctgtggtttactcctgtctaaacccctgaagcctaacacagttcctggcacacaacaggtgttcaacagatattgtgctcattcaataaatatttactcgctttgtttaatggattccacccctgccttcctaggtgaccttggacaaattctcgaacccattcaccaaccacacaagtttgttgtgagtcataaatggataatgaatataaatgcgcattgaaaataaacataaaatgttacccacaaaaaaaaaa

SEQ ID NO: 64524 - DNA, 2629 bp, Homo sapiens
tttcgtctgggacgaggtggcccagcgctcagggtgcgaggagcggtggctagtgatcgaccgtaaggtgtacaacatcagcgagttcacccgccggcatccagggggctcccgggtcatcagccactacgccgggcaggatgccacggatccctttgtggccttccacatcaacaagggccttgtgaagaagtatatgaactctctcctgattggagaactgtctccagagcagcccagctttgagcccaccaagaataaagagctgacagatgagttccgggagctgcgggccacagtggagcggatggggctcatgaaggccaaccatgtcttcttcctgctgtacctgctgcacatcttgctgctggatggtgcagcctggctcaccctttgggtctttgggacgtcctttttgcccttcctcctctgtgcggtgctgctcagtgcagttcaggcccaggctggctggctgcagcatgactttgggcacctgtcggtcttcagcacctcaaagtggaaccatctgctacatcattttgtgattggccacctgaagggggcccccgccagttggtggaaccacatgcacttccagcaccatgccaagcccaactgcttccgcaaagacccagacatcaacatgcatcccttcttctttgccttggggaagatcctctctgtggagcttgggaaacagaagaaaaaatatatgccgtacaaccaccagcacaaatacttcttcctaattgggcccccagccttgctgcctctctacttccagtggtatattttctattttgttatccagcgaaagaagtgggtggacttggcctggatgattaccttctacgtccgcttcttcctcacttatgtgccactattggggctgaaagccttcctgggccttttcttcatagtcaggttcctggaaagcaactggtttgtgtgggtgacacagatgaaccatattcccatgcacattgatcatgaccggaacatggactgggtttccacccagctccaggccacatgcaatgtccacaagtctgccttcaatgactggttcagtggacacctcaacttccagattgagcaccatctttttcccacgatgcctcgacacaattaccacaaagtggctcccctggtgcagtccttgtgtgccaagcatggcatagagtaccagtccaagcccctgctgtcagccttcgccgacatcatccactcactaaaggagtcagggcagctctggctagatgcctatcttcaccaataacaacagccaccctgcccagtctggaagaagaggaggaagactctggagccaaagcagaggggagcttgagggacaatgccactatagtttaatactcagagggggttgggtttggggacataaagcctctgactcaaactcctcccttttatcttctagccacagttctaagacccaaagtggggggtggacacagaagtccctatgagggaaggagctgttggggcaggggtgtaaattatttcctttttctagtttggcacatgcaggtagttggtgaacagagagaaccaggagggtaacagaagaggagggacctactgaacccagagtcaggaagagatttaacactaaaattccactcatgccgggcgtggtggcacgcgcctgtaatcccagctacccaggaggctgaggcaggagaatcgcttgaaccggggaggtggaggttgcagtgagctgagatcacgccattgtactccagcctgggcgacaaagcaagactccatctcaaaaaataaataaataaaaaaataaaataaaatggtctggatttggtcaacaccttattcagtaaatccttaatttaccttgagacatacaaagacattcttttaaagagctattttcttggtattgcacaaaggttaattttaaagcaatccaggcaagtaagctcacaaaaagaagtacattcatctaatccatttagcaaatgttgcaaatcagcttccaccaataaaacgtagaaatctgtgaaactctatacttcgtgtcagttttaacattgtgttgatggcagccatttcaggcagaggtagccaagttccatatatatggggaaggcaaaaagcagaaaaacattgcaggagacttagcagttctctggcttctattgactatagagcaatttcgaatatgagccatgtttctatgcagaattcttcttttatgccttaaacacaaaagagcttgttgctgccttgggcagatatactggaattgtcctctttgagcttactttctcttttctctaaggtcaagtaaaaaatgtgagacgttttcatataccacaaaggtaatacagcaggctggagtcactctaatcaaattaggagcaattcccttgtaaaatccaccgacgccttctttcctccatgtctttgtgattacatctattacaccactgtaaaacatgtgttgatcctgaagacgagctcttacgacttgatatgggtatgttgctgcgacagcaaatattttggatagtgctgcaacagatatatattctactgtgctcaactgggcttctggtaatctattgatatgctggttgtacttcaacttcag

SEQ ID NO: 64525 - DNA, 2389 bp, Homo sapiens
tttcgtctgtccgcgttgccagcaacctgttttcttttttgaggcccgggctgcggagggggagaagatggggcgaatgggagccgctggattccctgaggacgcggagggctagccacagtgtagtcccagacacccttttcacctgcagcggctggtagtctccgcaccacccgctcccactcgggtcttctcccttcctctgagagctctgtggggagtgtgaaaccggagcgggatggagctggcctcctggagacactcatctccaggaagcagggcaggccaacctaattccctagagggccgaagagggaaaggaggggccctatgcttggacaggctcctcgcagctcggttccactttgtcctccacagctgagaaggtgagctccctgggcaagaactggcaccgcttctgcctgaaatgtgagcgctgccacagcatcctgtcccctggcgggcatgcagagcacaatgggaggccatactgccacaagccatgctatggggctctctttggacccaggggccctccccatatgaagacattcactggggagacctcgctgtgccctggctgtggggagcccgtctattttgctgagaaggtgatgtcattaggcagaaattggcaccgaccgtgtctgaggtgccagcgttgccacaagaccctgactgctgggagtcatgctgagcatgatggagtcccctactgccacgtcccctgctacggctacctgtttggccccaaaggtgtgaacattggcgatgtgggctgctacatctatgacccagtgaagataaaattcaaatgagacgctcacaaaaaaggtcaccctaactcaggcctcccatcatgcccctcatggtccaatggaagctacaaaaatctccagtcccatgggggttggggaaggtgggatcttgggggcctgggcctaggctccatggtaggccagagagtctagactttctctgccaattttttccctttcccatttctatctggttagggaacagcccgttttgaagggtatcctcctcctggccatcacaacccctttccccagcacattctggagcttcaaggtactcataaaacttgtgtttattgaatttcagcctctgtggcttcttcaataaaatgttggctccccatgccttcaactcttctttgggcatgagacccagtggtttgggaggatggggaatgtgggggttggggatgaacatgcaattgccctgcagggtgccctcggaggtagcagggccagcccatgagaacaaaaagctctgttctttttgtcccttgggcctgggcattggcaagtcctaagcaccacacaagtggacaagcatgcccaccaagccccattgggtacccagaagtctcatatgctaagtcctttctttaggcacccatctctaggaggaagcaggaagcaccttatttcaggtaacttcattttgagcatggcaacagatcctatggtaagggcctcccaagaggttttcatttatccatttggggaggatgaacagactgaggcccagagaagggaaagccacatgcccaaggttcacacagcaagttaatggtgaaggttttatcagagcccagggcagactcagtggcttcctatccagggctcttcccacagctcgtcaccactgccccaacccaaggggcacctttatttacagaatcctccccaaccgtgagaggggtgcccagcagcccactgcattctgggaagtcaactgttcctagaagccaaataatcaaggatggatgagcagagggagcgggtactggcagcaactccggccctaggcagagggttcgatactcccagcctgagttgcagggcctgcccttctgctctcccagcccctgctgcagagcttctgtggagggcctgcctccactcccacttagttctggacctgcttcatgggcatctcttcctcctgaagactggttggggcactctttctctccacgtcctggatggtctctggcagctgtgcctgcctcgtctctggcagcaggagggcggtgccggcagccagcagggcgatccccccataagtaagcttgggcagtgacagccacactccatccagcaaggccgccagtggggccaaagagccccccagccggcccaccagtgcagtcagccccatccctgtctgtctgagcaccgtagggtacaactctgaagtgaacaggtaggcagtggtgaaggcagcttcagaaaaagctttccccatcactgccaggacagtgctccaggacttcatatcggaggacactagcagtctagtgccgaacgccagggccgtgcccagcagtgtcccggcttgcgtgaggcggcgtcctgcg

SEQ ID NO: 64526 - DNA, 846 bp, Homo sapiens
ggcacgaggaaacacttacttttccccctaccctgctcctcctcctccacagccgtctttctctttgcctcagccacttccttccttcgcctcaccctccccagtgcactgaagaaggtaaccgggtccagacccacgcggcgccagttctccggcgggaaggaaaaccgcgcagagaggcagcaatgaatgtggatcacgaggttaacctcttagtggaggaaattcatcgtttgggttcaaaaaatgctgatggaaagttaagcgtgaaatttggggtcctcttccgtgatgataaatgtgccaacctctttgaagcattggtaggaactcttaaagctgcaaaacgaaggaagattgtaacatatccaggagagctgcttctgcaaggtgttcatgatgatgttgacattatattactgcaagattaatgtggtttacatatctttatgtactgccattttttgtttctggtaaactggaatataaagtgaaagaacaaacatttgaacatacttaatgtatttttatagaactttgtaaacgaaaggagattcatgttttagaagtctgtccttttttatatcttgaaagaaaatctatgtatgatgctataaaataaatcctattatttttctcaggaatctggttaggaattgcaggcaatgagattttttgcggggcagggatgggaatgtttgttcataaataattagacattttctatagatatttgacattctgcgaaagcaacaagcaaactgaagaccaactcctatgagaaatattatgatgtttatgtaataaagacatgtaactgtcttaaatttgcaaaaaaaaaaaaaa

SEQ ID NO: 64527 - DNA, 611 bp, Homo sapiens
actggctgaaaagttttaaaggtctaagggagaatacaattatctgtgccagtcccaaagagctgcaaggagtaaatgtgatcgatgcagtgaagaactacagcatctgtggcaaaagtactacagagaggtttgatctggccagggctctcccaaagccgacgtttaagcccaagctccccaggccgaagcatgagagcaaaccccctttgcccccgacggtgggagccacagagcccggcccagagaccgatgctgacgccgagcacatctctttccataaaatcatcgcgggcagcgtggcgcttttcctgtccgtgctcgtcatcctgctggttatctacgtgtcatggaagcggtaccctgcgagcatgaagcagctgcagcagcgctccctcatgcgaaggcacaggaaaaagaaaagacagtccctaaagcaaatgactcccagcacccaggaattttatgtagattataaacccaccaacacggagaccagcgagatgctgctgaatgggacgggaccctgcacctataacaaatcgggctccagggagtgtgagatacctttatcaatgaatgtgtcaacctttctggcatacgaccagccg

SEQ ID NO: 64528 - DNA, 1897 bp, Homo sapiens
cgtaacgcgtcacgggcggcctggcagctggcggcattgaggcggacgcgtctagaggtccgtctgaccgcggcgtcgggacctggtttccgggcatgagctgagagcaccacgccgaggccacgagtatttcatagacattgatggaagcagaaaccaaaactcttcccctggagaatgcatccatcctttcagagggctctctgcaggaaggacaccgattatggattggcaacctggaccccaaaattaccgaataccacctcctcaagctcctccagaagtttggcaaggtaaagcagtttgacttcctcttccacaagtcaggtgctttggagggacagcctcgaggctactgttttgttaactttgaaactaagcaggaagcagagcaagccatccagtgtctcaatggcaagttggccctgtccaagaagctggtggtgcgatgggcacatgctcaagtaaagagatatgatcataacaagaatgataagattcttccaatcagtctcgagccatcctcaagcactgagcctactcagtctaacctaagtgtcactgcaaagataaaagccattgaagcaaaactgaaaatgatggcggaaaatcctgatgcagagtatccagcagcgcctgtttattcctactttaagccaccagataaaaaaaggactactccatattctagaacagcatggaaatctcgaagatgatggttgtgaattactgtagcagcaaaagcaaattggtctccacacctaaaatcgtctgcctgtgtactttgtagatgtgaatggtactattcaacggagcacaatcacatgttagcatttggtaacataatgtttttggatgttcttatggatgtttcttccctaaactatgtatggaattgagcatcatccagaataaatagcgttgtatcccaaattgtgatttgaaccctgggatgctctaattggctggttggtttggatttgtaactccagaaacattctatagtgtgccagagcaaaaggcaaatacacaaaatattatttaaatcaggaaactaaaaatattaacatctattaaaaaattgagcatttttctacgctcgtgtgtcttttacaacataaagaaaaagtaaaaggcagggagggaagtgagagacagattttaaatcatgttcagaactgttgttccagaatttactacggcaatccctccaactggactgaaaaagagaaagttcttggcaaaaaggagctgattctttgaacaaatgttgtagtaatctgtttaagaattatgcttattgtttcaaaatcccaactaggaaaacatggtgtatatcttaaaattgttcgtgttgacaaaactagaatcaaatttaacattttataccacaacacaagttctatttggaaattgaacttttattctatagcaaccatttttttcaaatctaaataaccatgccttctataataacaaatgttgctattatcatgggacttttaaaattacatttattgcatgggattgtttttatagcatgagaatgttctgtttggaattatatcatggtcagtctaaatagaaaaagcaaaatttctttgaaaacctaaacattgctatattggtcactatcaaacatacaattttctaataattgtgtagcggtctaagtggaagagattgcattatcttgtgcaggacgaggagaggacatgcagtgggcacagaaagtcaatggaacagatgccactgtggcaccaagactgtaatgactctgtgtggtaggtagttttaaaggactgcatgccttggaaatgattcttcacttggagaacatacttgcctctagatatgtttgtcactctaagcatcctgaatataacaatagagaaag

SEQ ID NO: 64529 - DNA, 2219 bp, Homo sapiens
gacagctacctgcattgccaaaagttcacattttttgtctagaacacaagatattcatattttcagacaggtaaccagtcggggagaggcacatttggagctgaatgcatttcgaaggaagcatgattgtgcactagtcatatctggggactctctggaggtttgtctaaagtactacgagcatgaatttgtggagctggcctgccagtgccctgccgtggtttgctgccgctgctcacccacccagaaggcccgcattgtgacactgctgcagcagcacacagggagacgcacctgcgccatcggtgatggaggaaatgatgtcagcatgattcaggcagcagactgtgggattgggattgagggaaaggagggtaaacaggcctcgctggcggccgacttctccatcacgcagttccggcacataggcaggctgctcatggtgcacgggcggaacagctacaagaggtcggcggcactcggccagttcgtcatgcacaggggccttatcatctccaccatgcaggctgtgttttcctcagtcttctacttcgcatccgtccctttgtatcagggcttcctcatggtggggtatgccaccatatacaccatgttcccagtgttccccttagtgctggaccaggacgtgaagccagagatggcgatgctctacccggagctgtacaaggacctcaccaagggaagatccttgtccttcaaaaccttcctcatctgggttttaataagtatttaccaaggcggcatcctcatgtatggggccctggtgctcttcgagtctgagttcgtccacgtggtggccatctccttcaccgcactgatcctgaccgagctgctgatggtggcgctgaccgtccgcacgtggcactggctgatggtggtggccgatttcctcagcttaggctgctacgtgtcctcactcgcttttctcaatgaatattttggtataggcaaagtgtcttttggagctttcttaaatgttgcctttatcaccaccgtgaccttcctgtggaaagtgtcggcaatcaccgtggtcagctgcctcccgctgtatgtcctcaattacctgaggcgcaagctctctcctcccagctactgcaagctggcctcctaaggggctgtgcacccccagcgggctggccccagcaccttctgcccttcccagcaccttgtgcccttgccagtgaacgcagggtttgccattgctatcaagcaatcaccacaagaaagggagggtacgccaggcgagcccagggcacagatgctgagacagcctctccttctcagtgcagggacgtcacccctgccaggcaagcccagggcacagatgccaggatggcttctccctctcagtgcgaggcttcacccctgccaggcaagcccagggcatagatgctgagacagcctctccctctcagtgcagggacgtcacccctgcccaggcaagccccagggtcaacaagaggcgggacggccctctccctctcagtgtgaggcttcacccatgcctaggcaagccccagggcacagatgcccgggatggccccctccctcctaagtgcgggaacgtcaccccctgcccaggcaagcccagggcacagatgctgcgatggcctcttcctcttaaagtgtggggcctcccccccggcttttctttctttttttgtattgtcaaaattgtatttcccatattgaagcagcttgagtttctactgaaaatgagcccgaattatttcactattactgtaaagggttcatcttactctggcattctgagaattagactgaaagtttaatttctgcagttccctcatattcagattctttctttgatgttataacacaaagtcattcctactcaaatgtaataaaattgaggctccacggaggcccgtgtccacatcagctgcagctcccgctcagacagacggcctgccccacagcctgccctttgctgaaaataccctcgctttatacttgcatttcgcttttcagtaaaaacagtcaagttactgagttctcacataaagagctcttctcacacaccctaaaggcaagttgcgtaaacagtggcgtttccgaacgcaattccattgcggccaccaatgtaaatcattgcccagagactttgctgctagcacgcgtgtccttcccatcctttttctatttgcaaaatcacactcgaacaccatttctatata

SEQ ID NO: 64530 - DNA, 1644 bp, Homo sapiens
gtagccggcccgaaagtagcgtggacctgcgcggggcggccctggcgcacggccgccacctgtccagccgccgcaacgtcctgcacatccgcacgatccctggccacgagttcctgctgcagtcggaccacgagacagagctgcgagcctggcaccgcgcgctgcggactgtcatcgagcggctggatcgggagaaccccctggagctgcgtctgtcgggctctggacccgcggagctgagcgccggggaggacgaagaagaggagtcggagctggtgtccaagccgctgctgcgcctcagcagccgccggagctccattcgggggcccgaaggcaccgagcagaaccgcgtgcgcaacaaactaaagcggctcatcgcgaagagaccgcccttacaaagcctgcaggagcggggtctgctccgaggtgagggggctgggccaggttcatggataagaaaactccagcgaggctcagagtagagcttcccagaactagaccacaaccttctgtgactgctgctttcccactaccccagattgtttaggggagaagctggggtgacctgtacccctttgccagattgtttgaagcaggggaagggaggtggagtgtatttccttgcccaggcctggcacaggcagccaggaggaccagcctcacttaaggataaagacctatgctgagaagagctcctgtgagtgacgctggcactggcttcccgcctcactctacttccccagaccaggtgttcggctgccagttggaatcactctgccagcgggaaggagacacggtgcccagctttttgcggctctgcattgctgctgtggataaaagaggtctagatgtggatggcatttatcgggtgagcgggaacttggcagtggtccagaagcttcgctttctggtggacagagagcgtgcggtcacctccgatgggaggtatgtgttcccagaacagccaggacaagaaggtcggttagatttggacagtactgagtgggatgacattcatgtggtcaccggagccctgaagctttttctccgggagctgccccagcctctggtgccaccactgctgctgccccatttccgtgctgcccttgcactctccgaatcagagcagtgcctctctcagatacaagaattaataggctcaatgccaaagcccaaccatgacactctacggtacctcctggagcatttatgcagggtgatagcacactcagataagaatcgcatgacaccccacaacctgggaattgtgtttggaccaaccctgtttcggccagagcaggagacatctgacccagcagcccatgctctctacccagggcagctggtccagctgatgctcaccaacttcaccagcctcttcccctgatgcagggaaggaagaagagaaaacatatttccggtcatctctggtggtgagaggctggtgttctgttttgaggatatccctttaaatctcccaaatgactgtctctatcttcatgagtgtgacttgaggtgttgggatgggtgagggagcttctctaaagaggaaagtgagtggattaacccctgcttctcttcttgttccctgttatcattcctccccaacataataatacataaagtggcatggtaaaaaaaaaa

SEQ ID NO: 64531 - DNA, 2433 bp, Homo sapiens
acccccggggtcttcatcctcttcgatgatgaccgcttcgggttcgtctggctggagctgaaatccttcagcctgtacagccgggtccaggccaccttccggaacgcagatgcgccgtccccacaggccttcgatgagatgctcaagaacattcagtccctcacctcctgaccggccacatccttgccgccacatcccgggtggctctggggctctgaactctgacctgtgaatagaagcagcatgcactttggaaatccggccttttgaccagaacgcacacctcgtcggggggcccagtccagccaccccccagcactttatgtagagagtgcgacgtaaacctgcatatttgtcagtgccatgatggaagaagctgagcatgtcttaccaaaaacagagagaacgagcctggatacagcagatgtaggggacagccgtgggaccgcgtgagaattgaagcggtggggttcccgcaccctgggctggctggtggttttctcgggaagcaggaccctcctgactggtgctcttcctgtgagcggatagagtgatagactgggtcgtgtgtgagacgcatgtgctccaccccactccttttgggggaagccaggcaacagtggcctctgggagggggtcaggaagaggcgaacagctcaggcagcgcaggtgtgatgggcacagtacgcaaagcaagctcgggaagttggtaggatctcaggcttggggccgggactctggagtgaatccccatttctctaccggcttgcttggagtttggacagaagcatttcacctctgatctcagcttccccacctgtggagtgggtttagtgacctgagtcactagggaatgtcacctgaatgcacagcccagcccatgcacctgccccagcccctccagctttggagccaaggccatcgttccagccacttgactgtcctcgacggcctgttccagacagggcgtttgttttgtccatgccttcctccctgcacgcacacggcgtcaaaaccaagctgccggccactgtctccagaacgcaaggctccaggcccgtgtgtctgaagcagtgagtggtccacacaggtgccaggagtgcccatatgagatgacgaggaaacccctttgcaggtgaggggacagctttctagaaaagccacacctgcatctggggacacactttggaaagtgggaccctccagcctggagaccccatggactgatgcctccactgctgtgtgccccatgttgtgttaacacctgcgtgtggggaccccatctgaggtcttggctgaggttggcatctcctgaagaacagagagcacggtgtccagagctggcccttcccccagcccacagccagctccgtgcccgagtgggcgtccccagcgagccttccctctctgccgcttgtccttgtgtctgggctgctccaagtccttgtgctgggcaccctggacacgtcctgctggtgagggacctcgggaaggtgacagtctgtgtgccttggggtggagaccaacctgaggatgtcctgggaaatgttttcctgatgaatttctccttgactggcctttaaagaacataagaattcccattgcccagcctcagtgcatttggcaaatgcttactttgcttcccagagtcagagaattggcaaaggttcctaaatggtaatctggccggcctgggagaaagactcacgagaaaagccagtggagaaagcgcccttccagggcggcagcagcgggagccacgcagaccccgaggcgcacctgctggctcttgtgtgtggccccagtttctagcggcttttgcagcattagcctacaagctttgtcactccctgccctctgtggaggtcactgtttttctctcttgccaaatgaggcagtctctgagtgacggtgactgtggccttgaagcctggaggactgttgggcatgtagactggcaccttgaagattcaccattgtttaaataaaatcaagcaaatgcttttttaccaagagcccgagcctcgctctaagggacgcagtcctagaggcgtgccctttggggcttgaagagcacactgtgggacgcacgtgcttctgattaaaggaatctcagatctcaattacgcttccagtgtttgggtatagaaatagcttccacccatcatgtctcagccatgggctgttggtcagttcatgtggctcctggttctggtgtgtatgttgggggcgggggtctctccatggtggtgacctgcagagatgccaggcagggccagagccacacagccaggaaagggaggcctttttggccgcacagccagtcccttcagtcgtgactacaggtcttgttttttccgctccgatgtgtccttagccagttcttggctccggttctgtagggacaggcactgaatctgcgcgcctcacaat

SEQ ID NO: 64532 - DNA, 5330 bp, Homo sapiens
cgccgcggggaccgggcagggctccccgtcggagtgcactgcgccggacacttcaagccctggagggacaggaaagccagaaatggacttcgtgagactcgctcgactgttcgccagggcccgccccatgggactgttcatcctgcaacacctggacccctgtagagccaggtgggcaggaggcagggaggggctgatgcggccaatgtgggcgcccttcagcagctcctcctctcagctgcccctcggccaggagcgtcaggaaaacacgggcagcctgggctctgacccgagccactccaactccacggccacgcaggaagaagacgaggaggaggaggagagttttgggaccctctctgacaaatactcctcccggagactattccgcaaatccgcagcccagttccataacctgcggtttggggaacggagagatgagcaaatggaaccggagcccaaattatggcgaggccggagaaacaccccgtactggtacttcttgcagtgcaaacacctgatcaaggaagggaagctggttgaagccctggacctgtttgagaggcagatgctgaaggaggagcgattgcagcccatggagagcaactacacggtgctgattgggggctgcgggcgggttggctacctgaagaaggccttcaacctctacaaccagatgaaaaagcgggacctggagccctcggacgccacctacacggccctgttcaacgtctgtgccgagtccccctggaaggactcagctctacagagcgccctgaagctccggcagcagctgcaggccaaaaacttcgagctcaacttgaaaacataccacgcgctgctgaagatggctgccaagtgcgcagaccttaggatgtgcctcgatgtgttcaaggaaatcatccacaaagggcacgtggtcacagaggagaccttcagtttcctgctcatgggctgcatccaagacaagaagacaggcttccggtacgccctccaggtgtggcggctgatgctgagtctagggctacagccgagccgggacagctacaacctgctgttggtggcagctcgggactgtggcctaggggacccccaggtggcctcagagctgcttctgaagcccagggaggaggcgactgtgcttcagcccccagtgagcaggcagcggccaaggaggacagcccaggccaaggcaggcaacctcatgtcagccatgctgcatgtggaggccctggagaggcagctgtttctggaaccttctcaggcacttgggcctccagagcctccggaagccagagtgcccggcaaggcccaaccagaggtggatactaaggcagagcccagccacacagcagccctcaccgcagtggccctgaagccacctcccgtggagctggaagtcaacctcctgacccccggggccgttccccctacagtggtctcctttggaacggtgaccaccccagctgaccggctggccttgatagggggcctggagggcttcctgagcaagatggcagagcacaggcagcagcccgacatcaggaccctcacgctactggccgaggtggtggagtccgggagtcctgcagagtccttgctgctggccctcctggatgagcaccaggtagaggccgacctgacattctttaacacgctggtgagaaagaagagcaagctgggagacctggagggggccaaggcgctgttgccggtcctggcaaagaggggcctcgtccccaacctgcagacattctgcaacctggccatcgggtgccacaggccgaaggacggtctacagcttctcacagacatgaagaagtcccaggtgacccccaacactcacatctacagtgccctcatcaacgcggccatcaggaagctgaactacacctatctcatcagcatcttgaaggacatgaagcagaacagggtcccggtgaacgaagtggtcatccgccagctggagtttgcagcccagtaccctcccacctttgaccggtaccaagggaagaacacctacctggagaagattgacggcttccgagcctattacaagcagtggctgacagtgatgcccgcagaggaaaccccgcacccctggcagaagttccggaccaagccccagggggaccaggacaccggcaaggaggctgatgacggatgtgcccttgggggcaggtgatgggagcacagctggaacaatgtgctcggcccccagtgctctgtgggagccccaggacaagtgagctggtgtcacctcctgcctgggggaagagccaggccctgaggaacagccgcagcgtgtcacaggtgttggtgaggacacacactaggcccaaggtgcctgtgctcccagcaggtccaagtgcagctccagccacctttgcgtgtcaccttcacgggacttccagctccagctacctttgtgtgtcacctcacacaccacaagggggctggggcatctggtccctggggcctgggccgccccgccgggttccataggccgatgctctgaaagaagagacgtggggctcgagagatttaaagattttatttttacaaatcacagctgatagacagcgaagccttccccatagagaccgtgctccaactcgggcctggggcactgctcgctgctcccaggaagggggtggcgtgacaggcaggaacctgcgaagtccagagtccagggtggagcgcgccagcctcagccagagcagccacgacagccacagtgtgtgcactcgatgatgcggccctgcaacggaggaggacagtgagacgatgccactgcgccacgctcgcccctgcacactcacatatgtggcaaccctcccacgaaggacctgccaccatgccatatagggacacacctcagaaacccttccttgacagctctggacagggaaaatttggctccctcatgaaggtagaaccagctgctgttgacaccgaggttacatctgtatgtctatttataatatgttctgcaaatccaacacacgtttgccaatcaagaaaaaaaaatcggtgtgaatgagtctcgttattctgctaagtgagcatgacagaccctgcgatgagcagacgtggctctgctactgtttggggacttcaggggggcctctgggctggtacactctggtgggggaagagggcaggagactatgcacttgagtcacacccttctggcccagagccccccagaaagaagggtcttgtcccccaggcctggtgcggcccaacacttggccagccagaaagccctagaacagtggcttgtgtttattttactttttcaagttctttttttggaagaacaagaccatagtttaagtaaacaggatcctctggtgaaacccaggtaagtctacagcgggctgttttggccacagggctgaagcagcaccccagcccaccagcccctgacctggactccttgtggaatctgggcactcagaggaagggggcttctgccactctgccacctgtccctgcctccatcagaaaaccaacaccccagtcttccgtcggggaggcggcccttgctcgcccccactgctcagtacccaagtcctcagcatccagccacagctctccattgtcagtctcactgcagcataaaggggactcatgtgaagaggcccctgtgtggagctggggaaaagaaggccaggctggcagatgggcggtggggccaacaactgtgctgaggggctgcactgagcggccactgctgtgactctgcctcgggccacagctgcctttcagaggggcttggaaccggatggagctcagctcctgtccctcagcaccactcctgaggcgcctggcctaggagtggtacttggaacagaaagttctgaaagaagaaacacagtgggctgggcgcagtagctcatgcctgtaatcccggcactttgggaggctgaggcgggtggatcacctgaggtcgggagttcgagaccagcctgagcaacattgagaaaccccgtctctactaaaaatacaaaattagccaggcgtggtggtgcatgcctgtagtcccagctactcaggaggatgaggcaggagaaccgcttgaacccgggaggtggaggttgcagtgagccaagatggcatcactgcactccagcctgggcgacaaagcaagactccgtcttgggggggcgggaaagatagtgatggtaatgttaaagtatcactgtgaggactgaaagggacaggaactcactggttgtccttccctgatgtcaccctgccaccaccttgggattagggctccccaccaccatttcctaagtgaggaaaggggttcagtaatttgcccaaaagtggagttgagattgaccccagacctaacaaacacacagccacacgctgcctcacatggattcctgaatacagggacccactcccacgagggagagccagcaggacatccagggacaaaacgacattccagcccaaccaaataacataagatcccttgcagtcgactaaggcagaattttgagctgaaaacaacaccaagcttgagtgtcagacattaccacttccagcttgcttttgggcacgcggcagatgcagttcgtcccgaagttggtgtcccgtgtctgaatgcaccgcaggcagcacaagttctcatatccttgctttttccattttgcaatcaggtttttgtctgcatagccttctttaatacaatattcatagagttctctgctgatggctttccgcttgtaaaagaggtgcgaagatgtagccggggttttctgggtgggtggatccctgaaagatgggccacagagattccactttccttcttcctttcatgcggttctgtttcagcttctctcatcttttgatctaattcatccagtgttggctcaatcaactccccagcccatctgggggtggctttccggcttcttttgactttaggcattctccttccacagataatctgcaaagatcttaggatgtgctttccaagagtatagacagcagaaagatctctcgtctctgcagttgcagttgcaggcttggattcttgttcagctctaaaaaaattattcagtgactttcaggtcaccttccctctctggttctgtttcttcagaggaaacggcgcgagaatcctagaggaaaaacccccaaatctaccgtcccctcagaagaacgaacgtgcgccgcctcctctcgggagctctctccggcctcaaggtccaaagcccgaacacatcccagtggctggctgagagtccagccactcatatctccctccaggacggtgcagaccaccggtctcccgcctcagggaattc

SEQ ID NO: 64533 - DNA, 720 bp, Homo sapiens
tttttcccaaagggattaaattggggaccccccgggttttccccccccccccgttttaaaaacccggccccggaatttaattttggggccccaaaaaaaaaattttaccttccccacccccgggaataaaaattggtcccctaaaaaggcccccccctttttttttttttggagctgggggatgtttactggtgtggggggacctgggaacatcactgtcgttcgtacatctctcgtaggatcttcatgctttctgagtaacgaagctggttccgatgagaggcctccttccacctctggcggatgcgtttccagcgctgcatgttgcgatagatgagtgtggagggtgagggctcgggctcagagggctcatcgtcaggggtgccctgcatctcaggctgcagtggagatgggatgcgggatctgcaggcatctccgggtggccccgggggtgtgggtggcggcagcttgtacacatcacgactcttgctgttggttacctctgagccctggggacacaagggccccatgccaggcccaagagagtcaaagcagaggggctgggaatccacattcatccctcctgcctttcccagcaacaaatggcatgaggggctcgctaagggactcagacaggaggcatgtatgaagggcagacacctcaaccagccagcgggtcaagtgtgcctgccccagggacccctgtcttctcctatccag

SEQ ID NO: 64534 - DNA, 1034 bp, Homo sapiens
gaagtgcggggaattcgcaggggctctcattgctgacttcttgtctggcctggtacactggggtgctgacacatggggctctgtggagctgcccattgtggggaaggctttcatccgacccttccgggagcaccacattgacccgacagctatcacacggcacgacttcatcgagaccaacggggacaactgcctggtgacactgctgccgctgctaaacatggcctacaagttccgcacccacagccctgaagccctggagcagctatacccctgggagtgcttcgtcttctgcctgatcatcttcggcaccttcaccaaccagatccacaagtggtcgcacacgtactttgggctgccacgctgggtcaccctcctgcaggactggcatgtcatcctgccacgtaaacaccatcgcatccaccacgtctcaccccacgagacctacttctgcatcaccacaggctggctcaactaccctctggagaagataggcttctggcgacgcctggaggacctcatccagggcctgacgggcgagaagcctcgggcagatgacatgaaatgggcccagaagatcaaataacttctccgagcctgctacctggttgccaaccttccctagcccccaaaccgaagccatctgccaaattccagcctctttgagctggcccctccagatggagaggacatctcctgggctgggcccaggtaccccagcccacccctcatgacacagaatacttgagccactgatttttcatttcttttttttttttttcttgggcccttcttaaccccctggggtggtttttttggaaacctggattttgccaccctccctgggaaaaaggggggttaacccattccttgacccctggcggcccttgccccgtggggaaccctttaaggggggttgcctttgggcccaaaaattgccctttttccttctttgttggcccccaggggttgggggagcccccaggcccccttaagggtgggggagctttgttttgccacacccttgcttatgc

SEQ ID NO: 64535 - DNA, 997 bp, Homo sapiens
cgttctctcctgcagggaaagctcacaactcctcacagcgatctggtatcttgagcgtcagtttctggccgaaactgggggctcctgactgaactccctcccacctagaaaaccttctgtgcagtctgattgctccaacacccacagagcaggattcaggtatcccggagaccttgggaggtccccatccagaggtctgctgtcctgccaggcttggggcagcagggactgggaccccactcagacctctctggggcaaatgttttggttctcacaacagccctagtgaaatcaatcctagatactcccatttggtcccaccaaggccatttaatttctctgtaaagggtaagatgacacaaaagagccaactatggaaacggtgaggtgggagtctgaaccgatttagctgttctcagggcgcacagggtgttgacggtggttttcatctgccacctgcctccttgagacccagctggcctgagtgtgcacgaaatgggaccttctccttgggtccaccaggctgggaggcacccctaggtacccggctcctcatcacagcggcagccctctcggttccacatctggttctcctgacgaagccgctggttttcggtccggagcctctggacctcggcagccagctcctccacctggcggcaggactgctggccggtgcacgcctgcagctgctgcagcctcctagtctcctcctccgcctgcgacagccgcttctccagctccaggtagtctcgcaccagctcctgcttgctgcggccctgcaggctctcggtgtggaagcgttcgtaagtctcagagaagtccttccgctggaactcaccgtgcgctcggccccgcccatcactgtccccggcctcactctccccactggaacctgggtgggagatcccatggggcacatccaagttgggctcctccgggtccctgtcattcatcaggaactgggtggtgttgtagggaattccaccacactgga

SEQ ID NO: 64536 - DNA, 2742 bp, Homo sapiens
taaaatatagtggcgtgcattttaattctcagtccatagctcctaccatagaacagattgaccagtcttttggcgcaacccatcctggagtgtacaactccgctgagcagctcttccatctcaacttcagaggactgtctttctcttttcagttagactcatggactgaggctccaaagtatgagcccaattttgcccatggcctggcttctctccagataccccatggagcaactgtaaaacgaatgtacatctacagtggcaacagcctgcaggataccaaggctcccatgatgcctctgagctgtttcctgggcaatgtctatgctgagagtgtagatgttcttcgagatggaactggacctgcaggtttacgacttcgcctacttgctgcaggttgtggacctggcctattagcagatgccaagatgcgggtatttgaacgttcagtgtattttggtgattcctgccaagatgttcttagcatgcttggctctccacacaaagtcttctataaatcagaagacaagatgaaaattcattctccttcccctcataaacaagttccatcgaagtgtaatgactacttttttaactacttcactcttggagtggacatcctctttgatgcgaatacacacaaagtgaagaagtttgttctacacaccaattaccctgggcattataatttcaacatttatcatcgctgtgagttcaagatcccactagccataaagaaagaaaacgcagatggtcagacagaaacatgcacgacctacagcaagtgggacaacatccaggagctcctgggccaccctgtggagaagcctgttgtcctgcacaggtcttcctccccaaacaacaccaacccatttggttccacattctgctttggtcttcagcgaatgatctttgaggtcatgcagaacaaccacattgcctcggtgaccctgtatggcccccccaggcctggtagccacctgagaacagcggaactcccctagggacaccaccacccatgcccctctgtcccgtggaactgtgcatcacatcctgctcagtgggcctctgtaccaccctgtgggttttcttggacacctggccagtgctgaagggctgttgtgatgttctgaggttgggctcaggctgggtgctctgccatgggctgagtggcccagatattcttctgtccatctttggcctgctggtgccagcaggggacacagactgcaaagagaagcacaaagtttgagccttgattcctggacccaggagctctcaactaacaaggaggcaggagaggtcaacccttgtcccatgcacattgggaagacttggggctctttctgtgactgaggacacaggcacccaggataaggacaaggtcctgcctttggctccacattgccacatgacccttaaggcaagcaggtagcgtgtccatagtacttggttgcgacatttgcactacatccactttagttacttgatgagctggctgtggccagggtggcccacctgcccttccctgttcctttcttgcacgcgctccctgcctgggcacaccaaactggttgaaacacagctttctaccatccaggtacatgcccaggcctggttctcacccctgttggagtcagctttcaagattgcctgtgcccctgctctgccccatcctggctggcagggctgcatgtttccatcctgtttgcctcttttatttaatgccaaagttttagccaaagacatcttcctacttttgttgtgtttcagcattctgttctgcactgtgggctggctctctgccccaaccctgggcactggcccctggctgggccatttcatggctcaaagcctctgggggctcaaggaaggctgggctgctcagtcccttcatgggtcttgctaatggaaagtagcatatatgtgctttaaaaatattaatccttttgaaaagaactgagaagaaaaatgtataattttatcccatttttaatattttggtctagcaacttgtgatacatagatgacaattttgtgagtttttcaaatgtgtgtacagatttttgtaaatatgactcttttgtaattaactcatgtacagcctcatcctgtatagtttaatgatgaatgtgcaggggacctgtctcaggctcctatatggttcctgggccttatagccaggtttgtgtggcgctcccgacttttgtgactgactggtgtcttcccatttggactgtggcctggccagagccccttgcatatccccactgtcaggggcagccaggactgttcccatcctcctggaatgggggaaccttccttatcccctgcccacatcccctctccaataaagcacctgtgccctcagcaatggcctgccatgtgctgttgctgggatgtttgtattaaggtaagtgtgggtattggttttgcgccgggtcccgcggcgccaggaactccaggagatttcccacgttcacgaacacatctgcgtcgcccttaaaaacgaagcgcacgtcggggcagaaagctgaggcccaggctagaaagtggatctccttgagcgttaggttaaaaaaggtgtcgtcgaaggcccagagcaggatgtccgcatacgcaaggctctcggcccgcagcagggcgcgccagtgggttcgcgcgccctccccaacttcgtcggcctcggggatgtagtacttgatagcccgcgtgcggatgggccgcgcatgcacaattacg

SEQ ID NO: 64537 - DNA, 2867 bp, Homo sapiens
ttttttttttttaaaaatattcagaaccaagttttattttgtagtcgttacacaggagggggcagtcagaagagtacagctcacccccagcagtggaggggttaaatctcagggacaacgtggggcagtggggacagcacctccgaccctatggggtgtaccttcaagtagcaaggctgacaatgatgtctagaaaggtctccacttctgcctgagttttgccaaacccagtggtctatagggatgtggcaaaagaatgacctaccgcagtgtgattatcagtgttttttaaaataaagagcacagttttgcctttaaaataattcacatcaacggtatttgggagaacatggagctggcataacattggcgtagaaagcagggccaggcccacccacggggccctcgtgtggggacgggtgcctgagcccctgagcccctcgagcctctggccacggctggctgcctgtgtgctgttgtctcgtctgtcccaccccgagaagggagttgaacaatgtgagttgtctgtggcattggaaagtgcagtggttacatgggtgtgtgcgaagtggttagctgtgccttcaggcggtgcgtctagcagggctgatgggggccagggctgctcctggctttttgtgggcagggcttgccctccagggaccccgagtgcttgcacccgctcggtgacagtggctggcaggtctaagtgctgctgctggatgcaaattcctttggtagacttttttttttttaagaaaaaaataaaaccaatttttgggttggcacctgaggtaataagttaagaataagcaccaaaatggcccttcctggcacgcgccggctcacaggttcttcatgcacacctggcagcggctgatgtgtgtgcggatgaggccggccttgagcgtgtcggcggagggcgagccctggaagctctgctcgggaatggtggtcagccagaagctgtacttgttggcgtagtagtggcaggtgccgcggcctccattgcattcgatgaatggtgtggcgcggaagtcctctagacagctgcccggtgacaccagtgattggccaccgccttcgtctcccgccgccgtgtgcatgaggaaggaatatccgatccacaaactccgccacccagctgggcagtgtgggatggagacatcctgactgtggaccgcgatggcgatggccggggcctcacacacagaacagcggctgatgtagggcttgatctcgtcctcggccacgggcatcatgggcagcggcgcagtggtagagagccagtaggacttgtcgttccggctggcatagtagcagacatcaccagggttgcagtacaggaagggcatggtgctgaaccgcgccaggcaggagcccgccagccccaggtcctggttgtgcgccttctcctggccctcgaagtacagcaggctgtatccactccagagtttgttcatgcccaccgggcacatgggctcctggtccgtctggctgtgcttcaccaggaggtagccgatgctgacgctgcggcctggcatacccggcaggcccgggctccctggacggcctggtgcaccttcttggccaatcggcccctggtggcctatgggtccttcatctccccggaagccgggaacagcagacacaccacctcttccttggggcccagctttccctggagccccacgaaaacctggttctccgggggggccctggggccccatctcccccggtgccccaggggggcctcgcctcccctggggacccactgtccctggttggacggcaatcttctgggggattcctgcaatcccgggggctcccacagtcccgggggcaccagggaatcctgggtctcccttgggtcccttggggcctctgtcgcccaccgccccggtgggtccagtgttccccatgaagccttgttcacccctgggccctttttctcctgggagaccaaacacaccaggcctgccctggggcccggagtccccggcccatcctttggtccctggggttcctggagctcctgggttccctgtgtcacctttgcttccaggaagagcagcagaacctggtggccctggtgggccccgataacctttcaggccaaatatccctggcgcccctttgtcaccaggtgccccagagatgttggaagggggtgtgatgcctgggaacccctgaagtcctgggctcccaggtgggcctcgttcccctggagctccttggtctcctttctgtcctgggactcccacagggcctggaagggtgttggcctctcctgggtcacctctttccccaggagggcctgggaagcctgggtctccgtggatgtcagaacctggggatcctggaaagcccttggtgcctggcaagccgtgtaagccgcggatcccacggagtcccggaaaacctggtaagcccggagctcccggccagccatcatctcctttgccaccaggcagtccaatccgccccagctctccctgcgaccctggaggcccagtcagccctggaaagcctgtttgtcctttaagtccaggagggccttggactccagtcacgcctgttatcccagggaagccgatgtcaccttctgttcccttctctccaaagaatcccttcagacctggtattccagtggtgccccgctcccccttcaggcctggtcttcctggtaaatttatagtgtccccgatgtcaccgaaatcaccagtcgcgccaatctcgccatacaggcctgctctccctggggcacctttgtcaccccggcttcctatgaatcctgggaatcccgtaattccaggggggccagccaccccagggaatcctggcaaaccggggatgccggggaggcc

SEQ ID NO: 64538 - DNA, 3004 bp, Homo sapiens
gtccatcttccaccgcggccacgagcgcttccgcattgccagcgcctgcctggacgagctgagctgcgagttcctgctggctggggccggaggggccggggcgggggccgcgcccggaccgcatctccccccacgggggtcggtgcctggggatcctgtccgcatccactgcaacatcacggagtcataccctgctgtgccccccatctggtcggtggagtctgatgaccctaacttggctgctgtcttggagaggctggtggacataaagaaagggaatactctgctattgcagcatctgaagaggatcatctccgacctgtgtaaactctataacctccctcagcatccagatgtggagatgctggatcaacccttgccagcagagcagtgcacacaggaagacgtgtcttcagaagatgaagatgaggagatgcctgaggacacagaagacttagatcactatgaaatgaaagaggaagagccagctgagggcaagaaatctgaagatgatggcattggaaaagaaaacttggccatcctagagaaaattaaaaagaaccagaggcaagattacttaaatggtgcagtgtctggctcggtgcaggccactgaccggctgatgaaggagctcagggatatataccgatcacagagtttcaaaggcggaaactatgcagtcgaactcgtgaatgacagtctgtatgattggaatgtcaaactcctcaaagttgaccaggacagcgctttgcacaacgatctccagatcctcaaagagaaagaaggagccgacttcattctacttaacttttcctttaaagataactttccctttgacccaccatttgtcagggttgtgtctccagtcctctctggagggtatgttctgggcggaggggccatctgcatggaacttctcaccaaacagggctggagcagtgcctactccatagagtcagtgatcatgcagatcagtgccacactggtgaaggggaaagcacgagtgcagtttggagccaacaaatctcaatacagtctgacaagagcacagcagtcctacaagtccttggtgcagatccacgaaaaaaacggctggtacacacccccaaaagaagacggctaaccctggagtatcacccttcctccctccccaggcaccactggaccaattacctttgaatgctgtatttggatctcacgctgcctctgtggttccctccctcatttttcctggacgtgatagctctgcctattgcaggacaatgatggctattctaaacgctaaggaaaaaaaacaaacacagaactgtttcaagtactcaagactgacttacagaccaaccaaccaccttgctggaacccttgctagcaggcattcttataaaagaaactttcgagcctccttatattgctggaaactcagctgtgctccagactagagcctccttacctatgctatggatttttaatttattttctcttatttcatgtacactgctttttttggttacagtgtatgatggatgtgtatgaaaaaaatgtatctttgggaaaacaattacagtttgttaatttgaagatgctggtcttgactcatctttatttttattcgcacatcccaccccatcccctgaactacttgggaggtgggaggggtaccagtccacctttgcttttggtagagatgagaggccgcattttgctgctaaagcaagagaaacttggagctgaagcacacacctggtctgcccctagatttctcctcaaggcctctggagcaaccagcacctgcccccttggaatgcagagcctggcctgccaaactacaatgtggtaggctgaaacgatggtgttaattcttaggactacttttctagtcacagatgttttcaaatttctaagaaaaagaaaatgaggctcaagaggctgcttcgtagaattccttttgaatgaattgagtggggatggggacacagtctccaagtgtgtatgtggtcttttctgatctcagctgtgtggctgcaactcttcgctgttcattggttcctctcctggaaagtggcttctaaccagcactggatggtgatcattggtaagctttgctcacctccctctctcttgcttcatttggctttatcaaaaagaacagacctagctctgaatttgtttggcttgggaaattatggattctttcaagccactcccacaaggtgggtcctactagaaagggttagcattttaaggggggttgttctatacacctgtgtccttaccccaggctcaggaactgccagggagggaagatgaggtggggagtctgtactgagatggaactgtcagtgctgtgttgtatgtacttgctgttgtaaaagtttgggcatgactttgcatctagcgggtgctgcctgcatctctttgtctgtaagcttgctctgggactcagcctcttaggacctacgatgccagcagctctcattaacagtgaaatgacagaggccaaagatggccaagtgaagacccaagtctcagaaaacccagacttgggacaactgcctgggaactaggatgctagagcagttctgtaatgctttgagacacagcaattttcacattggccattctttcccctcccctaccccttttcttttgagggacttttaatgtttgctgctttaggtggatggagagtccaccaggtcccactcaattgctgctctaaacttctacccacacccaccttaattaaggggtgctaataaaacatgctgaggttgagataaagacgggacataaggggaaaaattcattccatagagctgaaatctggttttcaaggcctctgtggctttcttctgaacttaccaccagccctggctggaatgtagattgtgtttttagtaatgtgtactgtgagctgtcttctgtataatgtattttgtaatgtatttttctcatctaccaaaggatgaaacaaataaaattatttaaatagttaaaaaaaaaa

SEQ ID NO: 64539 - DNA, 604 bp, Homo sapiens
ggttttttttccccccggtttttttttttttgtccccggttttttttttcccccggtttttttaaaaggggggggggaaaaattttttttgggccctataaaaaaaaaatttttttttccccgggggggtttttttttttttttttttttgggggggcccccttttttttttttttttttttttttttttttttttttttttttttttttttttttttttttgggtcatttccacatgctttattccagcaatcaaaataattaaaaacatctcaaattattatacacatacaaaataggtacagagtcttttgcttcctcccacccctagggggaaaaactgctttgtgctttgggaagttgtctctgaaacccggggacagaggacgcaggacagactaggagggagccgggaggatgggctgcagctgtggaggagggtttcagaggagagaggtcggagagcagaggcctgagaagccagaggcaggtggagagagggtggaaagtgagcagcgggctgggctggagccgcacacgctctcctcccatgttaaatagcacctttagaaaaattcacaagtccccatccacaaaaaaaaaa

SEQ ID NO: 64540 - DNA, 1462 bp, Homo sapiens
ttttttttttttccaggtcaacacgcttttattgccacttctggctcccctcgtcccagcaagattcctacctcttaccctgtaggaatactgagctccgatgcaggggaatggggtgggggtgttaccacttctcctctgcacactgccaagttaaagaaaaccctgcttgctggagagggagggccagacagggaggaattcaagggcatgtatggctcagtcccacttctgactgcagagtatagggaccagggttccaaactttttttcgaagtaagggaggtggggaagaatttggctgctgttgtaccccgtgtcctagctgccatgtttccatggaaatgaaggtggggcaggatgtagctcactctgactacctgggaggatggcaggacaggcatttggtaaacatatctccctccactcctacctagcacatacggctgtccccagccgacccccaggctctctcctcactgcctgctccactcccttcccttctggagctggtatcatgccaagtggagtccaggcagggctgccagtgctactctccacagccaggtctcactggcacgttaggatctaagtatgtccgccaagctcaggagcatccctgctagagctggtggtggcagtgcctcggtgaaaaggcagcagcagtacccccaactctctgtgcaactgctgtttcccaaacaaaactgaaaacataaacccaaacacttaagggtatcactctggcacaatgctgagggctgggatgggggagaggaggcgcatcctcctgagactggagccacctgtgcaccctgccttctgcccatctggagtttgcttcttcccactgggctgtcactggggggctggaatccaaatctccatttggtgctgctttcagcacccactgctgttcgtttatgaggcttgccagtttccatggtgaggaggtgcaggatggattctcagtaccatgggtcagcccggtgctgctggttgtagagctgtagcttgatctgatctttgatctgattcactaggatctgggacagcagaattcccaccagctgggggatggccaggcctagagccacaccaccaagtaagaataggttgctgtgtatccagttgaccaacttgtcaatacagccattggtgtagatgactttgctagcttccaagtagtcaaaggcctgcataccttggccacacatagtgttgatcactgcctggtcaggagtaggcaagcaacaggagtaaggcacagagcagcgctctcgactggggttgtcttctgagcagttgaaatacatgttctgagaccagtccttgtaggaaatccctccacagcagctaaactttttctggccaaaatcaatgaggttctgcagatccaagtcatctcggtagtgcacaatggcattgttgatgatctcactcactttccctcgacccggga

SEQ ID NO: 64541 - DNA, 834 bp, Homo sapiens
gaattcccgggtcgagggccagctctgcgacctggaccccagtgctcacttctacgggcactgcggcgagcagcttgagtgccggctggacacaggcggcgacctgagccgcggagaggtgccggaacctctgtgtgcctgtcgttcgcagagtccgctctgcgggtccgacggtcacacctactcccagatctgccgcctgcaggaggcggcccgcgctcggcccgatgccaacctcactgtggcacacccggggccctgcgaatcggggccccagatcgtgtcacatccatatgacacttggaatgtgacagggcaggatgtgatctttggctgtgaagtgtttgcctaccccatggcctccatcgagtggaggaaggatggcttggacatccagctgccaggggatgacccccacatctctgtgcagtttaggggtggaccccagaggtttgaggtgactggctggctgcagatccaggctgtgcgtcccagtgatgagggcacttaccgctgccttgcccgcaatgccctgggtcaagtggaggcccctgctagcttgacagtgctcacacctgaccagctgaactctacaggcatcccccagctgcgatcactaaacctggttcctgaggaggaggctgagagtgaagagaatgacgattactactaggtccagagctctggcccatgggggtgggtgagcggctatagtgttcatccctgctcttgaaagacctggaaagggagcagggtccttcatcgactgctttcatgctgtcagtagggatgatcatgggaggctatttgactccaaggtagcagtgtggtagg

SEQ ID NO: 64542 - DNA, 413 bp, Homo sapiens
gctgtgggtcatcctgctgccagtccagctgctgcaagcccagctgctcccagtccagctgctgtaagccctgctgttcccagtccagctgctgtaagccctgctgctgctcctcaggctgtgggtcatcctgctgccagtccagctgctgcaaaccctgctgttcccagtccagctgctgtaagccctgctgctgctcctcaggttgggggtcatcctgctgccagtccagctgctgcaagccctgctcctcccagtccagctgctgtgtcccaatttgctgccagtgcaagatctgaggctctgcccacaaacctcagtgggtcctacagatccgggctctccaggaatgactgcagctgtgtcctgaattcctgaagcacgtctctgaatctgtcctcctctggactaag

SEQ ID NO: 64543 - DNA, 440 bp, Homo sapiens
cccggaccccagcaccctcagcaggcagcaacgcagggtctacccccgaggcccccacttcctcaccagccacgccagccacatcttctccaacaggggcttccagcgcccagcagcaactcatgcagcagatgatccagcttttggctggaagtggaaactcacaggtacatgaggcagtgggggcaggtgctgggagcaccactttgatcctgggaggtttcaagggaagcaatagaatagaggcagtagggcaagcttgggagtcaggtcctgttctgccacttgctagccttgggcaggttactgatgctccctgagttcagtttgtgcagatgtgaaatagagatgagaagagtaatggtacttacccgtgcactacatactgttctaaatgctttagattttggagctcatttacgactcatttaccacattcc

SEQ ID NO: 64544 - DNA, 737 bp, Homo sapiens
ttttttttttttcaagctggcttttcgtatattgtgtataaaaagatcagattcaggatgatttggtgggattgccaggggctgaccggagtgttgctgggaaggagcctcagctccgctccaggtcctccaccaggtaggactgggactcccttagggcctggaggagcaagtccttgcaggtccagttccaggctggtgtgaaactgaagagcttccgcatcttgcttgggttggtgggctcggcccgcactgcctggtactgctcatccgtcaggaccttcccgtacagagcatccagcagccactcaacgtttgtgaccctcgcgataagcgcagcccggtgctggtctataaagtgcaggcctggcttggctgccgactgaggaggggcctggatcccagctggcgcggctccagagccctggtgcgtggccgcctgcagctgcccggccatctcctgcaggcccatgtcgcgcagcacgttagcggtgagctcggcgccgtaggtctccaggtagaagctgaccagcttgtcggtgaggtccaaggcgtccatggacagcagcgcgccccgcgggatgcgcccgtagccctcgcgcagcggcaccgacagcagcttcagcttgaacttcttgagctcctcggcggtcaggttctccagcgcatccaggatggcgtcgcgcgcgcgccccatggctccaggatccccggccgctgccgccgctcaccccgct

SEQ ID NO: 64545 - DNA, 1741 bp, Homo sapiens
aggaggtggccctgagagccacagcagagaatgagtttgtcgttctaaagaaggacgtggactgtgcctacctgcggaaatcagacctggaggccaatgtggaggccctggtggaggagtctagcttcctgaggcgcctctatgaagaggagatccgcgttctccaagcccacatctcagacacctcggtcatagtcaagatggacaacagccgagacctgaacatggactgcatcatcgctgagatcaaggctcagtatgacgatgttgccagccgcagccgggccgaggctgagtcctggtaccgtagcaagtgtgaggagatgaaggccacggtgatcaggcatggggagaccctgcgccgcaccaaggaggagatcaacgagctgaaccgcatgatccagaggctgacggccgagattgagaatgccaagtgccagcgtgccaagctggaggctgctgtggctgaggcagagcagcagggtgaggcggccctcagcgatgcccgctgcaagctggctgagctggagggcgccctgcagaaggccaagcaggacatggcctgcctgctcaaggagtaccaggaggtgatgaactccaagctgggcctggacatcgagatcgccacctacaggcgcctgctggagggcgaggaacacaggctgtgtgaaggtgtgggctctgtgaatgtctgtgtcagcagctcccgtggtggagtctcctgtgggggcctctcctacagcaccaccccagggcgccagatcacttctggcccctcagccataggcggcagcatcacggtggtggcccctgactcctgtgccccctgccagcctcgttcctccagcttcagctgcgggagtagccggtcggtccgctttgcctagtagagtcatggagccagggcttcctgccaagcacctgcctgcctgcatcactgcactgaatggcatgtgaatggaaaatgtgtgcttgcttccagaatcttctggatgttcctacagaggggaagacctacagagggaaagaccctcgggccgctcccctgcgccttttcatgctagggagatgcatcctagttgtcctcctggcagctgttttcagaggcattcccagcccttcacttaactcctacttagctccaaaatacctgtatccaatttgtattattcccccagctctcagggataagaccagtcccccagcgtggtggtcagcacggaagctccaccttctgggtggaggcgccatcctaaccatccagccaggccacccacaacccgagaatcagggagaaagtccctccccagcagccccctcctcctggctgggaagaatggtcccccagcaagcacttgcctgttcattcccgttcatgttttgcttctctctcagactgccttcctgcttctgggctaacctgttccagccaggctcctcatgtgacctcgcagttgagaagcccattatcgtggggcatccttttgcctacagcccctggttagggcactttggacaggtcttgctattcagtgaacctttgtacatttcaaagaagactccatggctgctccagatgcccccttgctgggtgcaggtggggactgtccaatgcagagctggcgggacagagagttaagccacttcctgggtctccttcttatgactgtctatgggtgcattgccttctgggttgtctcgatctgtgtttcaataaatgccgctgcaatgcaaaaaaaaa

SEQ ID NO: 64546 - DNA, 1090 bp, Homo sapiens
cccacgcgtccgaagagtgtagaggctgatgtcaatgggttaccaagagtgatggatgaaataatcctgtgcagaacagatctggagattcagtatgaaaccctgagtgaggagatgacttacctcacaatgaaccataaagaggaaatgctggttctgcagtgcgcagctggaggcaacgtgaacgtggagatgaacgcagcccccggggtggacctcacagttctgctgaacaacatgcgagctgagtacgaagcccttgcagagcagaaccgcagggacgcggaggcctggttcaacgagaagagcgcctccctgcagcagcagatctctgaggatgtcggagccacaacctcagcccggaatgagctgactgaaatgaagcgcactcttcaaaccctggaaattgaacttcagtctctcctagccacgaaacactccctggagtgctccttgacagagaccgagagcaactactgtgcgcagctggcgcagatccaggctcagatcggggccctggaggagcagctgcaccaggtcagaaccgagaccgagggccagaagctggagtatgagcagctcctggacatcaagctccacctggaaaaagaaattgagacctactgtctccttataggaggagatgatggagcctgtaagtctgggggttacaagtctaaagattatggatctggaaatgtgggaagtcaagtcaaagacccagccaaagccatagtggttaagaaagttcttgaggaggtagaccaacgcagcaaaatacttaccaccaggctccactccctggaagagaaatctcaaagcaattaatttgagatgcaacagagaacgtatgccacatagcccctgcgaagaaaaggcattatgtatctgtccagaaaaatgtgcatgtcctaagaaaaatgtctaacctgttgtctttctgttactttctttctgggcaatcaatgacagcatctcccccattccatcttagaagaatgccacacacaaatatgactccatttggattatccctacagaaatctgttgtcaattctttgtattcaataaacctcttctttagcaagtt

SEQ ID NO: 64547 - DNA, 514 bp, Homo sapiens
tttcgtggggaagggccccaggcaggctgaggattctaggggcggggtgggaaggaggaccggccgaaccttgggtgtgggacagagtgcgtgcgtgtggtgtgtccccaagggcaggaaggtggcgaagggaggcgaatccgagtgggtggagggaggggaagggcgggaggagaaaaaggtgggaggaggaccaggtgggagggtggcggctcactcaggacccagcgggggcagcgcgatgaggcgggtgaccctgttcctgaacggcagccccaagaacggaaaggtggttgctgtatatggaactttatctgatttgctttctgtggccagcagtaaactcggcataaaagccaccagtgtgtataatgggaaaggtggactgattgatgatattgctttgatcagggatgatgatgttttgtttgtttgtgaaggagagccatttattgatcctcagacagattctaagcctcctgaaggattgtttggattccacacagagtggctg

SEQ ID NO: 64548 - DNA, 726 bp, Homo sapiens
ggcctggatccacaacatcacccacgggtcggggatcggcaagccaatcgaggccttccatacttcgtctaggaatgcgcgcaacgtctcccaggcctggcgccacgcgttgcccttcactaagatcctgcgcgtgcaggaggtgtgcgccggcgcgctgcagctgctgggctaccggcctgtgtactctgcggaccagcagcgtgacctcaccctggatctggtgctgccacgaggcccagaccacttcagctgggcatcgcctgactgagaactctgggccttagagcaggccccgaactgtggtcgccaggcccaggaggcgactgcatggtggagagggagctggggcgcatggggaagcaggtccctactatcaaccgggagtttggggtcctcccctgaagtaggcaaggactgcacgtttctttctctcctgattctcggttttcctttgaatcttctggagctgccttctcatcaggtgcactcttcatggaaagcaactcttgcccctacctcttctgggcgcagggagtaagttactgctaaattaaattaaatgtgtgccaggccgggtgcggtggctcatgcctgtaatcccagcattttgagaggctgaggcgggtggatcacctgaggtcaggagttcgaaaccagcctggccaacatagtgaaaccccctctctactaaaaatgcaaaaattagtccggcgtggtggcacc

SEQ ID NO: 64549 - DNA, 1071 bp, Homo sapiens
ttttttttttttcataactctggtcactattttcatccgcatctgtcacttctgatgcgtctctaacatttataagatttctctggggagggatttgacgtatccatgccccacctctttctacatttatgggattgagctctccaccagccacccatgggctgatgtctttggaatatggatctagtaccaacagagtcagaaaaagagatggggtccaatgggctacagttgggtggtggtcctgggatacacagcacagtggcctctactgggggatggcagctttccaggagaagagtcgcaagcttgcctgtgggacttgtgtcttgtggagaggacagggctgcctcagcttggggagacagacagagtgttccgggtcccctctttccgccgcagcatgaagtctctgggggcgactggactcatggcatagaagacgttggcattgtcaggaatcaggagcacccggtccccaggaaggacttgaaagagctgatagtcacaggcccagggctggggcacattgtgcttctgcaaggctcgccggaccacgctgggggctttgtcctgactggtcagcaagatgcttcgatacaggttcccgtggtcattgtcgatgctgacgcggatgacacgggcctccgagctctgctgcgccgggagggggattcgagggctgcccagaggcaaagcgaagggccgggggctgggcaggtccaggctcaggggcagcttggtgctggggccctggggccctggagaggccgggggactgccagcaggagcatctctgcttctaggacttgaggggggtgaccctggggacacactggaggtgggggatgaggggtccccgggactcccactaggtgatgagcttttctctcgggcaagcttcgcactgagacgcttggtgaggctgatccgccgtcggatgcgtggggagctggggcaggaggcagctggtggctcaatgacccgggagagccggtagctgaggggtcaatctgtggatgaggtggtgggggcaggaaatacaggggatggagagataagagttggaat

SEQ ID NO: 64550 - DNA, 608 bp, Homo sapiens
ttttttgctgctccaggagtttttattgaacattctggtggggtggggtggggttgggaggtgtcctgtcagtcagtcatccaccaatagcctggggggccgagactcctgaccccattctgggcccgtcttttggcctccctgggcagcgcccagaacagagggggccgcctgcggggctgagtgggctttgtatggggggcaccatggaaggctgcccgccacaggacaggccctgggttgagagggcctgggaaggtgccgccaggctagaggtcgggaagggcgcctgagcagacacgccagcatccgctgctaggtgctggccagggctggggccttggagccccgctgcttgttcatggcactcaggagctgctgcacatatgaggtcagcaggtcatccatcttatagcccagggaggtctcgcacagcaggcggctgccacggcccaggctccccagcgccatgtggaagtaggtgctgccgctgctccagctggagatcttggtgaagggataggtggtgagcaggtccttggtcttggggtggatgagcagaaccccatgtcggttgatggcgatgaggatgacgtccgggtaggaag

SEQ ID NO: 64551 - DNA, 1205 bp, Homo sapiens
cggggagcccccgggggccccgccaccgccgccgtccgccgtcacctacccggactggatcggccagagttactccgaggtgatgagcctcaacgagcactccatgcaggcgctgtcctggcgcaagctctacttgagccgcgccaagcttaaagcctccagccggacctcggctctgctctccggcttcgccatggtggcaatggtggaggtgcagctggacgctgaccacgactacccaccggggctgctcatcgccttcagtgcctgcaccacagtgctggtggctgtgcacctgtttgcgctcatgatcagcacctgcatcctgcccaacatcgaggcggtgagcaacgtgcacaatctcaactcggtcaaggagtccccccatgagcgcatgcaccgccacatcgagctggcctgggccttctccaccgtcatcggcacgctgctcttcctagctgaggtggtgctgctctgctgggtcaagttcttgcccctcaagaagcagccaggccagccaaggcccaccagcaagccccccgccagtggcgcagcagccaacgtcagcaccagcggcatcaccccgggccaggcagctgccatcgcctcgaccaccatcatggtgcccttcggcctgatctttatcgtcttcgccgtccacttctaccgctcactggttagccataagactgaccgacagttccaggagctcaacgagctggcggagtttgcccgcttacaggaccagctggaccacagaggggaccaccccctgacgcccggcagccactatgcctaggcccatgtggtctgggcccttccagtgctttggccttacgcccttccccttgaccttgtcctgccccagcctcacggacagcctgcgcagggggctgggcttcagcaaggggcagagcatggagggaagaggatttttataagagaaatttctgcactttgaaactgtcctctaagagaataagcatttcctgttcttccagctccaggtccacctcctgttgggaggcggtggggggccaaagtggggccacacactcgctgtgtcccctctcctcccctgtgccagtgccacctgggtgcctcctcctgtcctgtccgtctcaacctccctcccgtccagcattgagtgtgtacatgtgtgtgtgacacataaatatactcataaggacacctcaaaaaaaaaa

SEQ ID NO: 64552 - DNA, 1762 bp, Homo sapiens
  misc_feature (1)...(1762): n = a,t,c or g
gcaccctcccctcacaatcggcagcataagcacagacgtaaacgcaggaaccaatgcgattttaggttgaatttaggacagcgctggaacttcactttacccctcttgcggtcacacgagcaaagcgagctgaattccttcttgtggaccattaagcgagacccaccatcttacttctttggcacaatccatgtcccgtacacccgagtttgggacttcatccccgacaactctaaggaggctttcctgcagagcagcattgtgtactttgagttggatctcacagacccctataccatctcagctctcaccagctgtcagatgctgccacagggcgagaacctccaagatgtgctccccagggacatctactgccgcctcaagcgccacctggagtatgtcaagctcatgatgcccttgtggatgaccccagaccagcgcggcaaggggctctacgcagactacctcttcaatgctattgccggaaactgggagcgcaagaggcctgtctgggtgatgctcatggtcaactccctgactgaagtggacattaagtcccgtggagtgcctgtcttagacctgttccttgcccaggaggctgagcggctgaggaaacagactggggcagtggaaaaggtggaagagcagtgccatccattgaatgggttgaacttttcacaggtcatctttgctttgaaccagaccctcctgcagcaggaaagcctgcgagcaggcagtcttcagatcccctacacgacggaggatctcatcaaacactataactgcggggacctcagctccgtcatcctcagccatgacagctcccaggttcccaattttattaatgccacgctaccacctcaggagcgcatcactgctcaggagattgacagctacttacgccgggagctgatctacaagcggaatgagagaatagggaagcgggtgaaggcccttttggaggagttccctgacaaaggcttcttctttgcctttggagctggtcatttcatgggcaacaacacagtgctggatgttttgcggcgtgaaggctatgaggtagaacacgcccctgctggacgacccatccacaaagggaagagtaaaaagacctccacacggcccactctgtccaccatctttgctccaaaagtccctaccctggaagtaccggcaccagaagccgtatcctcagggcactcaacgctgcctccccttgtgtcccggcctggaagtgccgacacgcccagtgaggccgaacagaggttccggaagaagcggaggcggtcacagcggaggccgcgactccggcaattcagcgatctgtgggtccgcctggaggagagtgacatagtcccgcaactccaggtccctgtcctggacaggcacatctccactgaactgcggctccctcgccgtgggcattcccaccacagccagatggtggccagcagtgcctgcctgtctctctggactcctgtgttctgggtgctggtgctggctttccaaacagagacacccctcctgtaacgactggaagcaccaggctaagaacctgacccctcggacttgaagaatggccattcctgtactccacattctggtctagccttgttgggcccaatccagaagagactgctcttgaaaaagcggcccagtgttgattcttctctttccaaggaatgtgactttgggttatccaactttgggggcaggtgtacagttttgtaacataagtgagtgtgntgtgaaaataaattat

SEQ ID NO: 64553 - DNA, 1701 bp, Homo sapiens
  misc_feature (1)...(1701): n = a,t,c or g
ttttttttttttggctgtggttgtaggaaccaccctacagcctagaagactttattaagatcttattgcttatgcagttaaagagacactgattgagctacaggtttcctgtacctggtctcaggtcactctgtgcagagcttccccaggctgttgggagctgggagactgctaggcaggggcaggccccagagtgggaagcatggtacctcctaggagcctcagagtgggtagcgggcttcaagacagccctcagggtgaacagagaggtcaggagtgtcggcttaagccagggcccaggggctacattccctgagatgagtcaagcccagccctctctggggtttccagaacaaaggctaggtgtggggagcagcactgtggagagggcagggagcatgtctctaggcattgctggaactggaggagactgtcagagtggtttgggtaatggttgtataatctgtggcaactgggccttcttgcatgaaagtggaagggtgaggatcccttatggaagagtcatgcaccatggctgggctggactagccagctccagtggctctgctgggtgactaaagtaggcaaggaaagccacttgttgcccacaccccactttcatcaactctgttcatgcaggacaaagcagggagctgcccaacaaggatggggttatttctcaggcctaggtattgatgttaccttaattctttagtctggaagaacttggttgggggtgggggatggtaagcatttccttaaccaaacccacacttcacatctcctaggggtaccccttcatccaccaacctccagagaataacctggctgccctcacttctccagcttttctcacaaggcacttgttacagggctgctgatgggagagggaggaaggcctgggagggggatctggtggtggcgcccaatctacagggtccggaatcagggtggaagttgtcagggactagcggctgccatagtacaggcgcatggccaggccaatgagcaatgtggccaggaagaaggcggctgtgagctgcagccgtagcaggactgctgagagcacggcgttgaccaccagcgagcaggacaccacaaagaggcgtgtgatgctgctgccatgcttcatgacagcagacatgagcagtccatttagtgcctggctcagcaccacgagtgctgcccatcctgagaaaccttccaggaggcctgggccagagccgccgccagcatgcagacctagattcagaagcacaccaaaagtgtagaggaagaggttctgaagtgccaggggcagccgctgtcgcttcatgagcagctctgtgtacactgacgacaagcctgagatgaggcagtacagaatgaggagcagcaggcctagcggagtgatatgcaggggcatggggctggcagcagctgctggagggggactgggaagggtgttcccgggaacttgaaggccccctgctgcatagcaggctcccgcagccatcagcagcagcagcgctaacccctgacgcacagagaggcggtgccggaggcagaggcagtagagcccagctgtgcttccaatcttgagattactcagcacctggtaggtgctggggtccatgtaacgctgaagatagatcaccaggttgttcttagcgcccgcccgcgtgggtcgacgcnggtnctaaggacgtcgagcggggtcag

SEQ ID NO: 64554 - DNA, 663 bp, Homo sapiens
gatttcatctttcagctgcatcttctgaccctgttaaaaagggagtactaacagtggacttctctggagtactaacagtggacttctctccgtagggttatgataattcagagagcagtgttcggaaagcttgtgtcttctgcctggtggctgttcatgcggtaattggtgatgaactaaaaccacatctcagtcaacttactggcagtaaagtaagtagtgctgctgtgctttagagatggtggccatagtacatctttcaaaacttagttacatgtctgtaacagtaagctttttatttggcatttaataagtcaggctttgagcatccaacttgcccttattatttctgttttgtattttatctttttctactctaacatttgttagatgttcactcaggtgaagtcagcagtttgttggggtgatgggtaggtttctgtgagagaaaatgcctgcagcttctggttatttataatagttagctgactccttaccaaatcccagacccaaatctttacccctgaccactgttttattaagaataaatagactgttgtggttatatatattaatggattactgtatatctctccaaatatagaatacttgcacatttaaaaatttttccccttaagaactatgataatcaaatatttgtcg

SEQ ID NO: 64555 - DNA, 2289 bp, Homo sapiens
ggccatggtcttcggaggggtggtgccctacgtcccgcagtatcgggacattcgcaggacgcagaacgccgacggcttctccacgtacgtgtgcctggtgctgttggtggccaacattttgcggatactcttctggtttggaaggcgctttgagtccccgctgctgtggcagagcgccatcatgatcctgaccatgctgctgatgctgaagctgtgcaccgaggtccgtgtggccaacgagctcaacgccaggcgccgctcctttacagctgcagatagcaaggatgaagaagtcaaggttgcccccaggcggtccttcctggacttcgacccccaccacttctggcagtggagcagcttctcggactacgtgcagtgcgtcctggccttcacgggcgtggcgggctacatcacctacctgtccattgactccgccctgtttgtggagaccctgggcttcctggctgtgctgaccgaagccatgctgggtgtgccccagctttaccgcaaccaccgccaccagtccacggagggcatgagcatcaagatggtgctcatgtggaccagtggtgacgccttcaagacggcctacttcctgctgaagggtgcccctctgcagttctccgtgtgcggcctgctgcaggtgctggtggacctggccatcctggggcaggcctacgccttcgcccgccacccccagaagccggcgccccacgccgtgcaccccactggcaccaaggccctctgacagtggggaggacgaggatgtgggaccgccagccgcgggcactggtgggccctgaacctccccgcggggagggtgggtaccgtggcccctgcaggtgtggcagagatggggcataggcattggggtctccatcagcctctgtagggtgtctcagggttgtcagtgggggtggggctgggacgctgtttgtgctcagcggggacagccagggttgatctggccccgagggttttggatgtttttaggatgacataaaaagcaagtgttttccccatttcctcttatgaaacaccgtctgagcccaaggtacacattgggcggcctgcaggaacctgctccaggtggacacacgggccagcagccgcgaaccttgaagctggggtgaccgcaggagaccctgtaaggcctgtgagcggagccctcgaccccgtgacaccctggccagacaccctgcttggactggggtggcctctgctacccaggggtctggcacgggggagggctggggctttctctgcctggtacacacggaaaggcggctgtgcggacgcagggtcaccgtgctccgggttttctgacagtcggtgtttcctgggcctttggagtggctgcgaggcctgaacgccttgtggatccgctgtgtccagcccggctgagcatcgccagggctagctcatgctgctcttgtcagcctctggttctcctcgagtccttggggacgtggcagatgccagcgaccatcagacaacgtggaggccctcatgggcaatggctgagggggccgggctgaggctgtgcacatgcagtctgcacgccactcttgggctctgctggcggagatccccttccttctgggtgcagactgcacctccggatgcagttttgatgtccatcttccaggagagagacggtctcgggtccagggagtggagggggctgcccctgccgtgcaggtcctggccgatggcgccttaccctgctgccctgggcttttggcctgaagcaaattcctgagtggggggtactggggcctgccgcatcctgtcctgtccactgcccacccccgtgtgctggctccctcacttctggctgcagtgggagccgccagtctgacccttgtcaccgcacgctctgcccccaccccgttgcaagaggtcacaccatgtcagcagccttgcactgaccgcagccggcccccaggcctcagagttctggatgcttccgtgcggctccaacaggcatcgtcttcccttccgcaggtggaggggccgcttcccgcaggcatctgagctctgtgccggggccgtggccatgggaagatgttccacgctgcctcctcctcgagttttcctcggaaacactcttgaatgtctgagtgagggtcctgcttagctctttggcctgtgagatgctttgaaaatttttatttttttaagatgaagcaagatgtctgtagcggtaattgcctcacattaaactgtcgccgactgcaggcgcagtgactgctgaaaaaaaacctcgtgccaagcttggcgtaagcg

SEQ ID NO: 64556 - DNA, 957 bp, Homo sapiens
gaatccaaatggtcctcacagtgccacggcccggggcaggatggcagcccctctgcaccttgcacgctggctggttcactcttaactccttacccagctgaaagtgaatgggcggctagaccaagaggagtttgcgcgactgtggaagcgccttgttcactaccagcatgttttccagaaggttcagacaagccctggagtcctcctgagctcggacttgtggaaggccatagagaatacagacttcctcagagggatcttcatcagccgtgagctgctgcatctggtgaccctcaggtacagcgacagcgtcggcagggtcagcttccccagcctggtctgcttcctgatgcggcttgaagccatggcaaagaccttccgcaacctctctaaggatggaaaaggactctacctgacagaaatggagtggatgagcctggtcatgtacaactgaagcaaagaggaaagcagacccatggctcaggacaagctcccagtgatcactcaagaatctggctctcattctaagaggctgtgctgcccagtatggtggttgtgataaatctaaaccagccctgcatgaaacagagtccaagctgtctcccaacagcctgggttcggtccttggctggcccaggcccagttaagcctgtggccaccaagcagctcatctgagcactttgggatgtattcagcctacgttgccctggaaaaggaagcaggagatgtctccctgtgggaaaggagaagagaagttgtctctgagtcccctgtcaccagttggattcatttcttggaagagccagaatgagccactttgaccaccctcgggtgctatgggtgacacaagagctgtccactgggtgtttgcagaataattacactatcttatgtctggatcctgatgatttcacagctaaatggcaaaaataaaacatgtttcccataaaaaaaaaa

SEQ ID NO: 64557 - DNA, 978 bp, Homo sapiens
gaaagccacaaggacgacgcccacaaggaggaaaccagccccaacgtcccccacctcctccaggaaagccacaaggaccacccccacaaggaggaaaccagtcccaaggtcccccacctcctccaggaaagccagaaggacgacccccacaaggaggcaaccagtcccaaggtcccccacctcatccaggaaagccagaaagaccacccccacaaggaggaaaccagtcccaaggtcccccacctcatccaggaaagccagaaagccgacccccacaaggaggacaccagtcccaaggtcccccacctactccaggaaagccggaaggaccacccccacaaggaggaaaccagtcccaacgtaccccacctcctccaggaaagccagaaggacgacccccacaaggaggcaaccagtcccaaggtcccccacctcgtccagaaatgccagaaagaccacccccacaaggaggcaaccagtcccaccgtcccccacctcctccaggaaagccagaaagaccacccccacaaggaggcaaccagtcccaaggtcccccacctcatccaggaaagccagaaggaccacccccacaggaaggaaacaagtcccgaagtgcccgatctcctccaggaaagccacaaggaccaccccaacaagaaggcaacaagcctcaaggtcccccacctcctggaaagccacaaggcccacccccaccaggaggcaatccccagcagcctcaggcacctcctgctggaaagccccaggggccacctccacctcctcaagggggcaggccacccagacctgcccagggacaacagcctccccagtaatctaggattcaatgacaggaagtgaataagaagatatcagtgaattcaaataattcaattgctacaaatgccgtgacattggaacaagttcatcatagctctaactttaatataccaataaaataatcagcttgcaaaaaaaaaa

SEQ ID NO: 64558 - DNA, 1868 bp, Homo sapiens
ttttttttttttaacagtaattcttcagactttattaaaaaatgacataaagtgcatcttattaaaaaatgtataaaaaccacataaattcagggcccctgtgctgggcagtgttgatatcccttagagtggaggaaggtgagggatggagggtgaactggggactggggagaggaccagggtgcagttagttcctcgtgtttgagttcaaagatggagcgagggtggatatggtgggaaggggcacacgggttctcacgcaacaacggaggaaggcaggcgacagtctcttccctgaattctgagggaaaggcgtacattgtcacgaaatctctcctgagctcgcgctgtcctctcgtgtggccacagcctgatacaggctggaaaggtccaggagttgggtccgagcccaggacctggtgagggccgcagtgccaacctagccctctggtccctgaggtggtgggacgacggcagcaacaactacatcctcggctgactggcaaggcagaacgcacgcagcccaagctggtcctgaatctgcagtgagacagggcagccggtggcagcgggataatgtggaaggtgaagaggccagttggtgagggtttccaactctgtctcagacaaccactttggatgcatccccagcacccctgggaggccatgaactggagcagccgtgtgtgctgcatgccatgctatctcttccctctcattctagtttcacatttggaattgttttttaaacaaagggctcagtttacataaggagcactgttccaccaacctaggcaggcccccatatttggccaggacctctggggccacggctgtttgggtgtctgggtggtaggagcttcgctacttgactggagagcagcaggccagctggccccaaggctcccaagggccgggcaccacggtcgtgttccacgaagagcagagcggaggggaggtccagttgaccctctccgagcattcacagcccctgaagccagggcagcgtcctctggaagtcagctctcacaccacagagtcacggatctccgagccaaggcggacccggggccgggggcacactggggatacctccacgaagctgtcttggatgctgagtggcctcttctctgactcagtgaagactcgggcccccggggggctgtctgacagggactggtaccctcggtgatcgagcggggtgctagggggccctaggccgttgagtgggcgggtctcagggggcagcaccacagggcaggtcttggggtgcacgctggcacattccccctgcttcaggaagactttcatgctgttccggtgccggtagagcaagaataaaactgggagcagcacggccagcacaaagagcgtgcacatcaccaggaactccttccagtaggacctgtctgcaccccagctggccttgccaccagctggtgcactcacacgcgatgtgctgataatgacgggtacactgccaccctcatctgtttggtctgccaccccgtcctccaccacctctgggcagtagctggctaccagctgctggaagccctcctctagtgaccagcactggaactcccccagctgttgggtgcccaccagcagcaggtccccagtgggtagcacgtggcaggaggccgaggcattgacgggggccccgttgcgtagccagagtcgggtcgccaggttggagaggagcgggcaggccaaagtgttcactgtgttgggctggaactggacttgctcacatggcttctcccctgttggtacaaaagacggggacacaaccgaagacgcgctgcaaaggtccttggcgctggctccctcgatgtcctggatccacggcctggtggccagctgag

SEQ ID NO: 64559 - DNA, 934 bp, Homo sapiens
ttttttttttttagattcagatatttaacgaatagtattgcatggtacaatcatgcaggtttaaaataatagcaattgagtccataggagaagacgacattcttgcttgacaaggtaggaacaaattcattatatttcaccaagactaaaattacaaagtttgggtgtgtaaaggcaagatttaattgttgggaaaatttatccgagccagccaccacgacaaaagccaggctgaccaaatcaaatggattctttacatcctccaagtttcagaagaatcttgaatatggttagccagaagatatggtaaatttgaccccaaacatttgcttgaaggagtaaggtcttctaatgagtgaatgtcaagagatcagcacataagtaatagcttatttatcctttaggtcacatccatctgtgaatcaagcagccttgcagtccacatggtcagcatctctcccatggctcgaggctcaatgatcaaggttgtttagccagtcttagagtatataaaaagcctctccatttttttttggttgttttagagagagaatacgcaagggaattcttcacaggaggagacgtagtcctaaatcccttctgctttccgttgcattggatgtatcacttgttctctttaataatcattttttccatcctcattcattgtacttggacagttttaacctggggatgatgttcatagactgtagttcctggaagagcagcttgcaggcatacggaatacggagggaagacacgtggcaggatgacttgcagtaatggcaccagccagaataccccagaagtccacactgcccacagacatcaacctcaaaggcatcacttgaaatcattagtctctctagcaaaagcatactggctccataaccgattaaacagtcacgttccatttccccgagacgcaagccac

SEQ ID NO: 64560 - DNA, 1445 bp, Homo sapiens
atgaagaaggaggtgtgctccgtggccttcctcaaggccgtgttcgcagagttcttggccaccctcatcttcgtcttctttggcctgggctcggccctcaagtggccgtcggcgctgcctaccatcctgcagatcgcgctggcgtttggcctggccataggcacgctggcccaggccctgggacccgtgagcggcggacacatcaaccccgccatcaccctggccctcttggggggcaaccagatctcgctgctccgggctttcttctacgtggcggcccagctggtgggcgccattgccggggctggcatcctctacggtgtggcaccgctcaatgcccggggcaatctggccgtcaacgcgctcaacaacaacacaacgcagggccaggccatggtggtggagctgattctgaccttccagctggcactctgcatcttcgcctccactgactcccgccgcaccagccctgtgggctccccagccctgtccattggcctgtctgtcaccctgggccaccttgtcggaatctacttcactggctgctccatgaacccagcccgctcttttggccctgcggtggtcatgaatcggttcagccccgctcactgggttttctgggtagggcccatcgtgggggcggtcctggctgccatcctttacttctacctgctcttccccaactccctgagcctgagtgagcgtgtggccatcatcaaaggcacgtatgagcctgacgaggactgggaggagcagcgggaagagcggaagaagaccatggagctgaccacccgctgaccagtgtcaggcaggggccagcccctcagcccctgagccaagggggaaaagaagaaaaagtacctaacacaagcttcctttttgcacaaccggtcctcttggctgaggaggaggagctggtcaccctggctgcacagttagagaggggagaaggaacccatgatgggactcctggggtaggggccaggggctggggtctgctggggacaggtctctctgggacagacctcagagattgtgaatgcagtgccaagctcacaggctgcaagggccaggccagaaaagggtgggcctgcagcctgcaccccccaccttccccaacccttcctcaagagctgaagggatcccagcccctaggtgggcagaggcagaccctccccagagctccttaggaagaagacagactggttcattgaatgccgccttatttatttctggtgaggatgcatgcgtggggctgctggtgtttagagtgggggctacccaataaatcactgatactcaaaacaccagcagaccctccccagagctccttaggaagaagacagactggttcattgaatgccgccttatttatttctggtgaggatgcatgcgtggggctgctggtgtttagagtgggggctacccaataaatcactgatact

SEQ ID NO: 64561 - DNA, 1213 bp, Homo sapiens
ttttttttttttaagtcataaaacaaatttattttaaaaatcaatatcttgcatttcagatatacagatgtatcttttaccagcaggtgaaagcaccttttccagaatctgcttccagcagaatcaatactgatttcgaaactggttgcttaggtcttggagctctgtcactaaggtgtccatagctgttatgtcatcagctaattccctggacatttctccagttgccacatctgtaaaaagttgctttgctttagataacaagccccgtaaattgagtcgaacagaagaaagcatttgtacagcttcttgggaactggatttgtttttactgcattttatggccacatgtgcaagtcctaaggctctttgaacaacttccttaaatgatgtaatatctttctcccaacaattggactgggtgtcacacttgtatgcctttgagaggcactggaatgccttttcattttcatcaggcttttcactctgcccatttccatatacgtgggcatacagcctccagatttctccatcatttgtcactcttgaagtcactctgccaaataactcctgcagctttcctgtgaggccagttgcaacatctccacttcgatcagtcatcccatcaatcactgccctgactagaattttaaggacctgaacatctttgtatttgtcacgtaagtccaagagccggtgataagctttaatggcttctgaaaattccccaacgtcagtgctggtgaggatgtagttttcccaaatctgccagtgttcatagttacacttgagagcttcttgtaaagttctaaaagcttttactttttgttttaatcggatataggaagttgacaaattgttccaagcttcagcattatcgggttctagagtcacacagcgctgaaatgcctttgctgaaccttgatagtcttccaaggccaaataggcacaaccgagagaaaaccacaccccgagctgcatgggattaatcttaaccgagcgttcgaagcactctacacactcttgaaactccttgttccgaagatgaaggagggctttggagcgctgagcacgagcactgcggtaccgggacaactcccaggccttgtcatagcaagaatggtctccgaggacatctccaagcaagcagtataaactaggcgtttcttttttctccagctcttgtataaggatttcttctgcctttccgtgc

SEQ ID NO: 64562 - DNA, 2572 bp, Homo sapiens
cagcattgatgcatatagatctcaaagattcaaagaaacagaacgtccatcaataaagcaggtgattgttcggaaggaagatgttacttcaaaactggatgaaaaaaataatgcctttccttgtcaagttaatatcaaacagaaaatgcaggaactcaataacgaaataaatatgcaacagacagtgatctatcaagctagccaggctcttaactgctgtgttgatgaagaacatggaaaagggtccctagaagaagctgaagcagaaagacttcttctaattgcaactgggaagagaacacttttgattgatgaattgaataaattgaagaacgaaggacctcagaggaagaataaggctagtccccaaagtgaatttatgccatccaaaggatcagttactttgtcagaaatccgcttgcctctaaaagcagattttgtctgcagtacggctcacaaaccagatgcagcaaattactattacttaattatactaaaagcaggagctgaaaatatggtagccacaccattagcaagtacttcaaactctcttaacggtgatgctctgacattcactactacatttactctgcaagatgtatccaatgactttgaaataaatattgaagtttacagcttggtgcaaaagaaagatccctcaggccttgataagaagaaaaaaacatccaagtccaaggctattactccaaagcgactcctcacatctataaccacaaaaagcaacattcattcttcagtcatggccagtccaggaggtcttagtgctgtgcgaaccagcaacttcgcccttgttggatcttacacattatcattgtcttcagtaggaaatactaagtttgttctggacaaggtcccctttttatcttctttggaaggtcatatttatttaaaaataaaatgtcaagtgaattccagtgttgaagaaagaggttttctaaccatatttgaagatgttagtggttttggtgcctggcatcgaagatggtgtgttctttctggaaactgtatatcttattggacttatccagatgatgagaaacgcaagaatcccataggaaggataaatctggctaattgtaccagtcgtcagatagaaccagccaacagagaattttgtgcaagacgcaacacttttgaattaattactgtccgaccacaaagagaagatgaccgagagactcttgtcagccaatgcagggacacactctgtgttaccaagaactggctgtctgcagatactaaagaagagcgggatctctggatgcaaaaactcaatcaagttcttgttgatattcgcctctggcaacctgatgcttgctacaaacctattggaaagccttaaaccgggaaatttccatgctatctagaggtttttgatgtcatcttaagaaacacacttaagagcatcagatttactgattgcattttatgctttaagtacgaaagggtttgtgccaatattcactacgtattatgcagtatttatatcttttgtatgtaaaactttaactgatttctgtcattcatcaatgagtagaagtaaatacattatagttgattttgctaaatcttaatttaaaagcctcattttcctagaaatctaattattcagttattcatgacaatatttttttaaaagtaagaaattctgagttgtcttcttggagctgtaggtcttgaagcagcaacgtctttcaggggttggagacagaaacccattctccaatctcagtagttttttcgaaaggctgtgatcatttattgatcgtgatatgacttgttactagggtactgaaaaaaatgtctaaggcctttacagaaacatttttagtaatgaggatgagaactttttcaaatagcaaatatatattggcttaaagcatgaggctgtcttcagaaaagtgatgtggacataggaggcaatgtgtgagacttgggggttcaatattttatatagaagagttaataagcacatggtttacatttactcagctactatatatgcagtgtggtgcacattttcacagaattctggcttcattaagatcattatttttgctgcgtagcttacagacttagcatattagttttttctactcctacaagtgtaaattgaaaaatctttatattaaaaaagtaaactgttatgaagctgctatgtactaataatactttgccttgcccaaagtgtttgggttttgttgttgtttgtttgtttgtttgtttttggttcatgaacaacagtgtcctagaaaacccattttgaaagtggaaaattattaagtcacctatcaccttttaaacggcctttttttaaaattataaaatattgtaaagcaggggtctcaacttttaaatacactttgaacttctttctctgaattattaaagttctttatgacctcatttataaacactaaattctgtcacctcctgtcattttattttttattcattcaaatgtattttttcttgtgcatattataaaaatatattttatgagctcttactcaaataaatacctgtaaatgtctaaaggaaaaaaaaaaaa

SEQ ID NO: 64563 - DNA, 2929 bp, Homo sapiens
ctttggtggggttgagttgggggtattttctaattttttttgtacatttggaacagtgacaataaatgagacccctttaaactgtcttattttccaccagattgagaaccagatgttctctacacactatcactgttcaatagagctttcttcagtgatggaaatgctctgtaatctacactgttcagtacaggtagctacagagcatctgaaatatggctagaaactacatttttgttttgattaatttaaatagccatacagttgctaccatactggtcacggcagctgtagactgactgggtccatagttcatcacctcaaaattctttcaaaatttattatctctttctctccttacatgtttatttcccaggcctaccctggtgattagaacagctgaagggcctttcttgttaggctgtccatgccctaaggatgggttcctgtttatccttgccacgcagctgagcttactgcatgtttatatctcccaaggactgttctctgctcagaaatgccctgtcaagggtgtggcatcacgcagtttcatccaagttgtttcaggaattgctgacactgctgggtgcagttctatcccctaaagcctagggtgtggccctttaacttccccttcagtagaactgggaaaggcagtaccattcctagttatgagtgaagcatccactttcttttgtaacaatgaggaacagaaaggataagactgaagagtgatcttttgtccaactaaaccatttatctccttttgtaggtaaattcaaatcctgcccagttatagttttcagtcactggagaattccaggtaggagccctactttaggtgatcctaggaactcctatgttcagaaaagaattttcttcctactatataattacagtatttagctgtcaattttaagatgaatttggtagagccttatagtaaagtatgtatcttggtcacacacaaagcttggaaaaagtaaaagatgtctaaaccataatcttgtaactcataacatctgggctggggcccggggatctaattgtttagagagccccaaaagtggctcagatgtaaagccagggttaagaaccatctgccttggaagatttaagggaaacatataaacttgtacaaaggacacagaagcagtcagttttaattttttagccatgttggtaaaagttcattttcagtacatgggtaacacccaggccctttcccattatatccaggtatgctacaagttcttttaactcttatcagaagttattattactgtttccttagagaggctaccaggctaaaattcacttagtttggtttgtctaatgtcctcattattttatcctgaagatgatgtcatttctcaggacttgaaaatgacttggctgaactaaaggtaaaaaagccaagcctctgtcacttttcctagactcctaggcacagctatggagtctttgccacagtggcccataccctaaaaattaataatgaaaaccaaacctcaagaacctagagcagctctctacttgccaccatggactccagtggtcagcataagaaaagcagatagttgcattctatttagtttatagctgctttgttcctttgtgtttcactaagcagaggctcaaaaattcccttgataacttcagcttgcccctgttcttttcctcaaactccaggatgagacctttaatgtgggacaatttctggtgaaggtactcacagcgacgcttttcttctctgtaacttgggtactgcttcctgaactttttatattcctggattatcttgtcttccaggaccttgtattctggagttcctcgccgaactcttttaatctctgctcccagctctatgaacctttggcttgcagtcccaacacgggcatgcaggatgcggtattcagcataatctgtctcaaagtcctgctcataggcatgttgctgttctgcactgtggatggccctgtattgcaggaggtagtctggtatatcttcaggacttggggattcagaatcttcttgaactgaggaactgtgttctaatctggggtccatgtcctcatcttcttgctcccaatcttctccctcttgtaaatcctgattggtcaggccttgtagggggcttggcactaaaggcagagttctgaacctcttttcttccagttctacagtggctacaggcactgaacgtttcttgtccagacgtttccggctggcagaggaaggcagtgcctgaacaggttctctgtttggaacatgggtctggcttctcacttcccactgtgccatgtgctcccttgaggatcctgggagtgactgtccttggttgcttgccagtggatctgacattgacacctcctctagtgccatctgtggctgtgatactgcatctccttcagaatagcctcctgtgttctgccaactctcaggatgtcaggcatcttcagtcaggttgtgtccctgaactgatgatggggctgggatagaatccatggctgcccaaataatgaggcgctccctgagtgagcccaggcagtggaggctgttaggcccagacctgaggaagcgttggcacacaaggtccaagctaccaccagcgccctcctgacaacactgggacactatgaaggagaagaggcaggcccaaccagggcctgggagtctcagataccctcggtggccttggaaagcaatcaccggccgtacctgttgccgctgacactcttgcagcgcccgcagggcagcgtcgttgagcctgagcagtaagaggctagtccgggcagcttgcgtgaagcagagccggagctgtcctctcagaggctcctggagctcctccatggcgacgagttcgagtgcaagcagcacgggggccacaggcgagggccaccaccgccacctcctcgaatgccaccgc

SEQ ID NO: 64564 - DNA, 1354 bp, Homo sapiens
tttcgtatggccggctcctaccctgaaggtgcacctgcaatcctcgccgataagaggcagcagttcggaagccggttcctgagcgatccggcgcgcgtcttccaccacaatgcctgggacaatgtggagtggtcggaagagcaagccgcggcggcggagagaaaagtccaggagaacagtatccagcgggtgtgccaggagaaacaagttgattatgagatcaatgcccacaaatactggaatgacttctacaaaatccacgaaaatgggtttttcaaggatagacattggctttttaccgaattccctgagctggcacctagccaaaatcaaaatcatttgaaggattggttcttggagaacaagagtgaagtatgtgaatgtagaaacaatgaggatggacctggtttaataatggaagaacagcacaagtgttcttcgaagagccttgaacataaaacacagacacctcctgtggaggagaatgtaactcagaaaattagtgacctggaaatttgtgctgatgagtttcctggatcctcagccacctaccgaatactggaggttggctgtggtgtgggaaacacagtctttccaattttacaaacgaacaatgacccaggactctttgtttattgctgtgatttttcttccacagctatagaactggtccagacaaattcagaatatgatccttctcggtgttttgcctttgttcacgacctgtgtgatgaagagaagagttacccagtgcccaagggcagtcttgatattatcattctcatatttgttctttcagcaattgttccagacaagatgcagaaggctatcaacaggctgagcaggcttctgaaacctggcgggatgatgcttctgcgagattacggccgctatgacatggctcagcttcggtttaaaaaaggtcagtgtctatctggaaatttctacgtgagaggtgatggaaccagagtttacttcttcacacaagaggaactggacacgcttttcaccactgctggactggaaaaagttcagaacctggtggatcgccgactgcaggtgaaccgaggaaagcaactgacaatgtaccgggtttggattcagtgcaaatactgcaagccccttctgtccagcaccagctgagaggcacctgctgccaacacgatgcaagcccattgtgtttccgggcttttttaaaaaaaaaattgtagcactgggcgtggtgcatgcctgtaatcccagccactcaggaggctgaggcggggaggaatccattgagcccagcagtccaacctgggcaaaataagtgagagaccctgtatctgaaagtaataataaaaataaaaaatataaa

SEQ ID NO: 64565 - DNA, 822 bp, Homo sapiens
ttttttttttttctttattttccttttattttttaaaggtcacctttacaaagtagcatttaaaaataaatccatctcacagctcaaagaaatttctgacagtactgccctcatgctggtcagccattatttactgtgtgtctgccacatgtcggcacatatatatagctcttcctctcctttcctgggagcaaacccttagcgtttcttccacgtaaactttctgcgggctccctcttggcctggcttcttccgttccctcacacgtggatcagtagtaagtagtccagcttgtctcatccactcgacctcgtcctcggtgacaaagctgcacaaggcttttgccattgccagtcgtattgctccagcctgcgctgacctcccgccccctgagactgtgcaggtcacgtcgtgctttcccagccggtcaacaaagtggaaagggaacatcagctgttctctgtcctgtgtgatcgggaagtaaagctggtaatcaattccatttacttttattcttccacttccatgtttataaacaattgcttctgcttttgcagtctttcttttaccttcgcttttgctaaaggccattccttgctcatcatactgtacaggttcaatcagctgtttttttgattcaagagttacacttcttcgaaacctctgcacaaattcttcctcagcagcaccacactgcgatgtcaataacttttctagcagccgaatgaactgcatataatctagatctgacagtttttccactaacatttcttctagttcctccttaatcagccatctgctgccaatcacgtctctcgtgcc

SEQ ID NO: 64566 - DNA, 1630 bp, Homo sapiens
tcacattaaatggcaaagacaatgccctactccaggaagcatgagccttttctatctaaaattcagtactgtttctggacaattttcttctacttcttctaagtcatgtatctatcccataaatatacatcttgatactttacactaggccgagagctccacattttcaccctgaattaattttcaggtttttctcacagatactgcaaagtcaggcagtgttggtccctatgcagtcatctttggaaatttggagagaggccactgcaaagagatttcattccactgcctttccaaatcttgtatgagaaaactccatggtcacagtctttgcatgcggcagaacaggtttgcagcgaaggctcccggggggaaggatattatcctaatacacaggatttgggcctctgtcaaaatgagcattcttcacggctgcagagtgcccaggcatgttttgggaaaaagtcttgagagtggacagaagtgaagggaaggagtagagacctggttcagttgtgacaaccaagtgggtaaaatctgccctcacctgcctgctactgtccaggggagatgggcagaatcttctccataaaaagcagaacatcagtttaatcgcaatttcctctttttattcatttcagacattaacaaactaaatgcagataaatgtattctacttcacaggacagtaagtgtcctagataaaaacaagcactggctccaagcagtcgcccattctagtcccgcaacggtaatctatttttcttcaaatgtcagttcttcacagtttcaatactgcagcagcaagttcttccttagatcaagaaagccgtggtccgtatttcagaaaatcttaagtagagataagtgagcaagcttctggtgccacgtgcagtttgggtgggacaattttacctgaagtcctgcagactggccatggggatgacgggggccccgtcccttgcggtgttcttcatatcgattcagggaagcgaactgtgcagtgctcgcattctatttattggtccctgtcaccccgtggggtgtcacagaaaaaaaaaagtcaatgcttcacagaggagttgttcagagcaggtcaggcaggacgaggccaggaggctttggttcgacacagttgatccagaagttggcacagctggcgtgatactggtgccctccataggccagcttgaaactgtctgtttctgagttgaatgcccggctcctcgagtccacattcaagaggcacactccacaggcaagctcctgagcatttttaatcccaggccgtaacatacaggaggaaaaatccagcgagttttcatctggtgtgagtgtggcgagtgacatgaagccgattaggttattccatactttatcgatgtccttcagcaactgctggagtttctcactgcacactgcagtggcttttatccccagctccacacgcttggttaccctgtacacttcaacaacacctaataaatattccatgccttgagctgactgaattacttctgtgcaaacagaactactactgattccatttaaggtatcatttgccttcttaatgacattcagggcactccccaggcatctctgccattcatatgcatatctctcattttcc

SEQ ID NO: 64567 - DNA, 1357 bp, Homo sapiens
ttttttttttttccaatacaactctttcacttttatggctaacacaactaggtatctccagggccacatcacacaaattcggccaaggtcaaagtctgagtgaggtccggcctcagtcctaggtgcaacatctgtcttagctcctggagtccctgaccctctctctcaagcggagaagaggaggaggtctcagctgtccaggctcatgagtagagcagtgcccctcttgatccaatgatcaggtgtcatggccccagaccgcaggtcaatgccgatgacaaaggaggctcggtctgagctgcctgcccggttgggatagtaatagcaggggcaggagtacatgcccttggcgctcttcttgcggctctctgcaggccggaagtggatcgtgggcatgaggcagacaagctgcatgggctctgcctccaccaagcaggagttcttccggtcccagccagcaccttccaggtacaggccccggacccagacaccatccttggggggatacactaggttgctgtcatccacagtggaaacgataaactcccaggagaggctgtccactgaaacgttgttttggcgagctgaagactgcagcacagcagtgaggaagccagtgggaaaggtgaaaccagacaaccagaagatcacaggaggccgggcccggctggcccacagctcaaactgctccacacgcatggccaagtcccgggtccaggcagccaatggcttttgtgaggggtatgcctttccccagagcggaggaacatgggcatcaaagatgcaattgaaaatctcttccaggcttgtagacatgacgatgagaccctggatgcctttctctaggtctgtcagtgagaacaggatggtctgcatcagtgtgttgtatctctggatctcctgcagaaggaccacattgaggggggaggggtcgagagctagcagtttttgagtcccctcatagtcgatcatttcagggatcttctgcttcacatcagcggccaactcaaggacattctcttcccgggtctggcctccagccctggtgggtgtaatctgaggttgcaaggaaagcaaagtatcaaagagggtttgtgcctcagtgatctgagaggccacatcagcattggggtgctggccaaaggcctcaggggggtccatgccaggcaataagctgatgtattccttgtaagaagcgaggctgccatccttggggatgaaataagtctccagtgctgacaaccggtggaagggagttgatagagactggtcacagaaataatcattgatgtaggtggtcagcaggcgccggtcccagtcatctgtaacatgtccaccatagttgatgcctcgtgcc

SEQ ID NO: 64568 - DNA, 1805 bp, Homo sapiens
  misc_feature (1)...(1805): n = a,t,c or g
tttttttttttttagggtatacttcaaacacaatttatttttaatttatcaaacaaaaatcaacaatttaagtcactgattggcaagctacagcctgcaggccaaacccagccctccacctgcttttgtaaataaagttttcttggattacagccacactcatttacacgcatattgtctattgctgcttttgcatgtcaacagcagagttgagtagatgtgacagaggccgcatggcctgcaaagcccaaaatatttcccgtctggccctttacagaaaaagtttgctgacccctgatttaagtgatcatgatttaaggacagggtgatatctgacaaaagtatcagtaagaatggggacagtgacccatcaaatagtaagatccccgcaaacagaagggagatcaagaagtgtatatttgacatcgtttctttgacaaacgttttgatataaattataattacttcaactacacaatcaaataatttaacaagaaccttttcctccctgattcagtcactttattatttgagcaagagaacagattgctgcttagtccaaaagaggtcacatctgaaagggtgaagaacagcttaaccatctcttatctgctggttcttgaagcaagctgagagttgctgtttgtcttccagatgcccatttcctcattgcagcagctgaagacttgctgtagccatataacacaagctgggaagcaatgaactcctcctcatctctctgctcctaggctccatgattgttctatttctttccggggaagggttactgtcatttgttttgttttgttttgtttttctgagaaacagtgattggctcagtcatgattgctattgagtttgtatgctattggcatatcaggcacttgctgactagaaaagttttatgcaataagttcatgtttttatggtgccagatggaagacagaccttcaagttgagttcccaggattctacacactcagaatctcaaaatcttcctccagatcaaactcctccagttgctcagtagagtcaatgaattctgccccagtggttgtcacttctggcttggctggaggtacaaagggaggccagtgtgatggatgtttctgaactaattcaaacatccttaaattctcctttagaatttccttctgaacaaggctacaccagttatcaaagtctttttcttctttgcagaaaaatcccaatgcaactgaaggatccaggtttaggatgttcattcgctgtggggactgcaggcaatggaaagtctggtcattaaccgttccattctcttcagtgtcaacaaaggtctgggttgtatgagggtccaagaagatgagctcgtcacctaagaatcctatgaaataatacgcgttatttggttttcctcctaatgcccctaaagactgtggcatcttaaaacactctttgaatgcatcaacatagacaggattgatttggtttatgcccaggcgaaggggcacaatgagcagcaggggtttccaggctgagcagtaggcagaggtgcccttactctggtttgaagcagttaaagaatcgggaggcctgtcaccagatgtgtcagcactcaagggaaggacacggcacatttttttgatatcttcaatgaccactgtgttatccattgaaacataaacagccaaggaattccattcgtcaaataaagcaagtttttttaacacctgtgcaactgtattaaataaaaaccgttctccaattgatttcctcgtgccgaatcgattggatgggcttnncaacaagtcgctgggctaaatgta

SEQ ID NO: 64569 - DNA, 1280 bp, Homo sapiens
aattccgcacgaggcggggtgatgaggggctgcgggctcgcgccctcgctctccaagagggacgagggcagcagccccagcctcgccctcaacacctatccgtcctacctctcgcagctggactcctggggcgaccccaaagccgcctatcgcctggaacaacctgttggcaggccgctgtcctcctgctcctacccacctagtgtcaaggaggagaatgtctgctgcatgtacagcgcagagaagcgggcgaaaagtggccccgaggcagctctctactcccaccccttgccggagtcctgccttggggagcacgaggtacccgtgcccagctactaccgcgccagcccgagctactccgcgctggacaagacgccccactgttctggggccaacgacttcgaagcccctttcgagcagcgggccagtctcaacccgcgcgccgaacatctggaatcgcctcagctggggggcaaagtgagtttccctgagacccccaagtccgacagccagacccccagccccaatgaaatcaagacggagcagagcctggcgggccctaaagggagcccctcggagagcgaaaaggagagggccaaagctgccgactccagcccagacacctcggataacgaagcgaaagaggagataaaggcagaaaacaccacaggaaattggctgacagcaaagagcggaaggaagaagaggtgcccctatactaaacaccagacgctggaattggagaaagaatttctgttcaatatgtatttgacgcgagagcgccgcctggagattagcaagaccattaaccttacagacagacaagtcaaaatctggtttcaaaatcgcagaatgaaactcaagaaaatgaaccgagagaatcggatccgggaactgacctccaattttaatttcacctgagagcgcggcctctcctcctcccttcccgctccttcctctccccgcccctcctccctttgtgcctggtgatatatttttttttcctccctgagtataaatgcaatgcgactgcaaaaaaggcaaagacctcagactctccttccaagggacctgtggttcgtgctgcgaagatgcttccacttaaagcatgagaaatggggtgccgggatgtggggtgtggtgtgtgccctcatagatgggggtgggagtgtggctggtgtgtgtgtcaaaccctcactcacccacgcactcacacacagcattctgttctccatgcaaagttaagatcgaatccatccgcttgtaggggaaaaaaaaaa

SEQ ID NO: 64570 - DNA, 1138 bp, Homo sapiens
tttttaaactcaaaaactaaaagggtttactatttcaacatattacttcctccagaactctcataacatgtacataaataagaatgtttctcatttcttaatttattaacaatgtatacatttgaaaaaatatatacaatatttcaaaacaagcccttcaagactatatttaagcaatgacatccaaggaagcagaactcaggtaccatgtaatatttggaaaatatggtaacttgaagattaagatttctcttccttgctggttactctgaagtctccaatatacaaaggttgctcctaacgtggttttcttattgagccaagcatcttgatgggtcaatcccagtttcattttctccagtactgggcaaacttgtgaatctgttccaccactgcagcaaaaagagcatggacactctcatcaatcagactctgcatgtaatgcacagcctcttcatccgacaggtctaagcggaatttatcctgaacctttttcacagttttatctggttcaagtgcaatatctggaatgtttgcatcaaccatcaaggaaaacaagttcaaaatcagattagaataccttcgcaggtggaggaaagccgtgtaacactgtttacggaactcttggtactgctcactctgtgtgccccccattccttctaccatttctttattcagcttcattggtggaggaagaggctttggatcccgacccaaaatatatccaaagtctatgtggaagagtttgcctgtttttgttagcaaaaggttatccaggtgcctgtctccaactccaagtatataggtgatcacgcaatatccagcacagcttttaacgtaagtgtccatgacctcagcactaatcccatttggcccattctcacttggtgcatattttctaaaaaagttctgaatgcttccctctgtatcaagaacttcagccacaggaactgactggataaactgcatgaagccatgttttgtactggtggctaacaccttataaggtgtcaatttcaagtccagattttctttccgtaacagcttgtccatgagtgaaatgatttgaagaataagttgatcttgacgtaaatcatctccatgcttaaatataactggatatttgccgacagcaacg

SEQ ID NO: 64571 - DNA, 542 bp, Homo sapiens
ttttttttttttaaaggctttatttgcattcttggaaattttattatttcaagtcaatgtgttaagaattactgcgcatatagttatttcttttataaatttgttttccgggattccttcaaaagctttcttattgttggcctttattttctgcagagaagactacagttttacagcttatgctaccatttcgtttttgaaaatgggacctaaggctaatcttctgaacaatgagggccatgctattactttgcaagtgacaaagtccacgcagaactctttcagggtaaatggctattaattttcagttttatatattttaaaaagtatattaaagcctatgggatgcttttctgtcatattcccctaggtccagttgaacatgagaaaagtcagttttctgattagatttctgggtatggaagagagaaaatatagttttctgtaaagatgtaagtgaaagaatttagactggccttttaacataaactaggggtttccagtttcttggaatgggaggactccgtttgaatatctaattt

SEQ ID NO: 64572 - DNA, 1997 bp, Homo sapiens
ttttttttttttaggaacagaaaatttattattatgcaactagcaagctggggtcaaagggctttcccaaaaaaagttgtgtttccctatattacaggtaccaaaacagagcaaaacatccaggagaaccaaattgaaactcagaaaagagacaatttctgaggcccaccagatcctgattccattttgaaatactctattgcagtacctctgggtaaatattagctggttgctaaagacaggatctgaggctgggccaattcttaaggcaccagctgtcttgaggaggaagatgaagactgtgaatgaaggacagcagacttgcttctaggaaaataatatatgtaagttgggatgcctcttgcagccagatgtttccgaataagtcgctcagtaccataccagttaaaacctttcgtggcatgtccaatacgtggaagatgaacacttgctttcttcttttttgctgctaaaaatatcttcttcaggccctcttctagggctgccatcttaatgccagacaggacattggaacgatcacgatgctgagccacaatcaaggccaacaaatcttgccctttgtttcttgattctttatcatcaacaggaaataaaaggccccctcccaaactcaggtctttcattttcccagccagctcatatatttttcttggctcagcggatcgcttttccagagctgtaaataaaccacctctgccccagtggccagagtcatctacgcagtgcacaatgagagcatcctcggccccagcctgagggtgggtgacatcaccactaacgtacttgagggaagtagcatctgggtcttggtaatccagctcagcagagctctcttccccattctcaaggtcctctggctcgctctcctcagagggcaggcagaaggactggtaattgttggattcccaccaggccatctttttcttatgttcagcctcttccttttgcctcttcttctcctctatgagtctccttctcttggcagctgcttcttgtcttttcttctgtctgtcctccagctcttctggactcagaacccgcttccttttggtagatccctccacaaggcctgggatgagaacactgcctttatttcggagtgatcggccctcttgactagctttctccaaaagggttttctgaaggtttaccagttgttcaaatgattttctgtcttccttactgggctctttagaataatctttaccttcaaataagtacatatgattttttccttcctcttgatctctgctccctccttctgctgcaggcaaggcatcagagacccactggccatcttttgtttctcccaggatggactccaggtctatttcatccatggtgctcccctcagaggccagcagtttatccaaaccaaatttgagtatctcactcaactggaggtcagcatcggcagcgggtttctgggctcccagagtaaaatggcctccttctatgatcatgttggtgagctgcagtttggaggctgctttcctatagactatttcttccacagtgtctcgaccaatcagccgaataactttaacagacttgttttggccaatgcgatgagccctggcagctgcttgcaagtcattctgaggattaaagtcactgtcaacaaaaatcacagtatctgctgctgttaagttcatgccaactccacctgccctagtactcaggagaaaaacgaaaatgggctgctgtccaaagttcttaatggccaagtgtctctcttctcctctcacagaaccatccacacgctcatagctgtagcctctgtaatccatatagtcttggagaatatccaacatctgggtcatttgggagaaaagtaaaacccgatggcccccagaatacaggaatgctagtagcttatccagcaggtgaagcttcccactagcctcagtcaggtggtctccaacttcaaaaggctccggctccacacctagaaaagaaagaacccactcccagta

SEQ ID NO: 64573 - DNA, 2127 bp, Homo sapiens
cgttgctgtcggtaatggctctatagactgaagctctgtcagtgtctgcatcagaggaagaagggctgaatttcttaaatgaatatgatgaaacaaaaccagaactgcccagtgggaaaaagaatcagtctcttacactcatagaacttcttaaaaataaaaggatgggagaagaaaggaattctgctatttctcctcaaaagatccataatcagacagcaagaaagagattcgttcagaaatgcgttcttccattaaatgaggatagtccgttgatgtatcagccacaaaaaatggacttgactatgcactcagccttagattgtaagcaaaagaaatcaaggtcaagatctggaagcaagaagaaaatgctaacattacctcatggtgctgacgaggtttacattctccgatgcaggttttgtggcctagtctttcgaggacccttgtctgttcaggaagactggattaagcacttacaacgacatattgtaaacgctaatcttccacggactggagctggcatggtggaagtcacgtcactacttaaaaagcctgcctccattacagaaacttcattttctctactaatggccgaagcagcttcatagaaccaggaaaccttttaaatagccagtttgaattggatgtaaatttgaaattctttttttttaagccacattaaattatctgtttataaatactaaagcaggaaaatggggggaaagtgaattacagtgacatcagagcaaattgaatacttaaaacagtaagtagtctatatattttatatagggtggaagatgtgtttttaaggtttatgaagttttgttggttaactgtgttcactcagtaaaagagcagtacatgtaagcagccattaataaactgttgcacatggatacttatagacagacttattggacaattatgttttttgcagtgttaccagaatcaaggctctgtttattccccacaagacttgcatagaaaaataagatattatattttgtttgtatgtatttagtgttttgtataataccaagaaccgctgactaaatttactcaaattagggcattaaatatcatgtacttcatagtttgagactgttcactcaaatagggcagagtactattctatctagatgtgtaagtgttttttttaaaatcacatggaacggttttttttatactaaaaagtggagggagatttgtttaaacaagtatttctaaaagaaatatgtacatagttctggaaattatttgtggtaaggaaatattctttactccagttgcatttctcagacaataaagtggtgcatccatgctacctcctactttgtcaacaaagatgctatttaccctttacatttttgtatcataatagattttaaaaatctaatgttctttattgcaagacattcttttgttaacaggtttgtttctttttaatgttttacctaaaatttgacatgcttacaggacaggtttgcctcttactttatttaacattgtagaaatgtaattaataaacaatgctcactacacagtttagaatagacgttctcatttatattatcttccaaatttgatcagttagcaaaacttaatacaccaattaaaatatttctacatatgagaatgtttacaatttaaattttagaacttgttttggatgtgattatatgtacgaaaatcgtgtaacactatgctcatgctaagaaccgacataacagaattactgaaataaatgtgctgtgaggaatggaaaatatggtgcaggtgtcttggtcatgataaattgtgattctttttaaaaattttttccaaaaacaattaggtattttaatctgaaatcagattcctttacaaacaacaagtttttgtatgcaagcacccattttatttcatgtagtatgtcctaatactatagttgaaccaaggatatgcattgattctttgcttcgtatgtaaataaagttaaaaacagttaaaataaggagtattttggtagagtatatacatacctcactgccagtgaaattgctttcctatggtatatctccttaccagaaaaatctctaaataaaaaaaggtttaaagaaaattaaaatgtgaaaaaaaaaa

SEQ ID NO: 64574 - DNA, 1340 bp, Homo sapiens
cgttgctgtcggaaaatgctgaagatggaactgaagaaaataaagcgcttaaaattcagacaagtggagagccagatgtggctgaaagagtggatctagaagagctgattgagtgtgcaactggtaaaatggagctttgtgcaagaactgacccttctgagcaagtcgagggaaattgtgaaattgtaaatgaactaattgctgcctccacacagaaaggccagataaagaagaaaaggttgagtgaactggggatcacgcaagctgatgacaacttaatgtcacaggagatgtttgttgggattgtggggaaccagttcaagtggaatgggaaaggtagttttggcacatttcttttctgactacagtgatgtaagtagatagcaaaatactggattttgcacatgctgccctaagaatcactgctgccattgtagtttgctgtattgtctgtattttatatttgattatttgggcttgagtgaaaggtagatttatttccatttgcaggtgttgcacataaaacactccctctttataagaaaaatcataaatgcatataaaatagaaaatatttggagattgcttatctgaaagtcttgctttcttatacacatggttctctcatattaagcctggtggtaactttttagtgtaattacctttagcacttcaaagacgaggaagtaaggaagggaatgcaagactagtgcataaaaatgcaataggtgtcatatgtacagcattcttcttagagttgccttttcatcccaattacagtgagtctgatttccatcctgtatttgcataatacttgtcttaaaataaaagcttttatgattgggaatttatctgcctaatcagacttattattgagacgtcaatgggacgcatttttctgttgagctatgcagtcgtcaaaacagcgatagacagcataggaggtttgaagcagaaatgaaatgtgttattcagagccaatgttgtacatagagcattttcactattgctgaatgggaatgattaaaaacaaggtatttttcgggccaggcggtaggtcacgcttgtaatcgcagcactttgggaggctgaggcaggaggatcacttgagcccaggagttcaagactagcctaggcaacatagtgagaccctgtctctactaaaaataaatttaaaaaaaattagctgagtgtggtggtgcatgcatgtagttccagctactcaggaggctgaggctagaggatccttgagcccaggaggttgaggctgcagtgaggtgtgattgcgccactgcattccagcttgggcgacagagcgagacccagtctcaaaaaaaaaa

SEQ ID NO: 64575 - DNA, 1568 bp, Homo sapiens
ttttttttttttctaccacaacaaaccaaatttataagacaacccctcacaatcatttaggaatgccacagtaagggaatggaaatacactaaaataatttttgttcccttctctctctaatttagtcagtcataataacaaagcagcttcatgttaaggacttaattctgattccattgcttggtctgtcaattttatttatcatatcaatctacctcccattaccaccatccgagtccaagttaccatcacctcagacctggacaaccacagaagcctcctcactggtctctctgtttccatcttggccctccttcagtcaattttctatatgggtagccagagcaatttggaaaaagcactggtgtctttcactctaaaataaccgatgtcctgtgtatagttgcttaatagtcacgtgagacagttcaaagaaactctcattttgcaaataacgaaacccgaggccaaaacatactgaaacttcaattccagaactgaggtcagaatttggaattcataattgcacagatgagcctcatttcaatgggccatgctgcttctcccaaacaggtatttcattttctgttatcaatgaaagacaaatgaaataatttgaattgatctagagcctgctttcagggctataaaatatgaaaaaaactgatcaccaggggacaaaagggatgacaacctggactgaactgatacatttaagggccactcgcacgtggatcccatgtgtcccaggatctacctcctctagccaactgaaggacaggggcagcattccagatccaggactatgtgatccacatggggagcataggatttcactggttggatgtgcagaatttgtgtcttccatggtttcccatgcacctgctgaagaagagtggcgattcgagtttctgcagattctgcccacctttgccactctggcttggtggctggtgacagcatttttcccctagaatccctggtagctccatttttccattggttggtggtaatttgctgaggatacagccaatgctctttctctactttgctgactccaagagcctgaagattcttccctgggaaagattccacattttggtggatatgcaaaatgcctccagcatcctgccttaacacttggcaggcaatgggccagccttcttcagagctgggaatcagccccaggatcaccctatctgcaatatttgagagcttcagttttctgttatctccaaagtgtatttggcaccgatctgctactccattgatctcaaggttatttctcagagcaactacagcatggggattccactcacaagcatggacgaaggcagcaccagcatgaactaggaaaggcaatgtaaaataaccaatccctgcatagagatccaccagcacttctccagcacaggacaacgatgccactcgaagcttctcagtgatgtttccaaaggagaacatacactgggtcacgtctaacttataacggataccattatccacatgctctacccagccatggtcacccagcagcagggtcactggctggagttcgagtaccctt

SEQ ID NO: 64576 - DNA, 1229 bp, Homo sapiens
ggaagtcttgagactttttctggactggggctaatactaggtcctcctgtaggtggctttttgtatcaatcctttggctatgaagtgccttttattgttctgggatgcgtcgttttgctgatggtaccactcaatatgtatattttacccaattacgagtctgatccaggtgaacactcattctggaaactgatcgctttacccaaagttggccttatagccttcgtcatcaactcactcagctcgtgttttggcttcctcgatcctactctgtctctctttgttttggagaagttcaatttaccagctggatatgtgggactagtattcctgggtatggcactgtcctatgccatctcttcaccactatttggtctcctaagtgataaaaggccacctctaaggaaatggcttctggtgtttggcaacttaatcacagccgggtgctacatgctcttagggcctgtcccaatcttgcatattaaaagtcagctctggctgctggtgctgatattagttgtaagtggcctctctgctggaatgagtataattccaactttcccggaaattctcagttgtgcacatgaaaatgggtttgaagagggattaagtacattgggacttgtatcaggtctttttagtgcaatgtggtcaattggtgcttttatgggaccaacgctgggtggatttctgtatgagaaaattggttttgaatgggcagcagctatacaaggtctatgggctctgataagtggattagccatgggcttgttttatctactggagtattcaaggagaaaaaggtctaaatctcaaaacatcctcagcacagaggaggaacgaactactctcttgcctaatgaaacctagtccgatggatcctggattgatacaaggttgagaaatgaatgctcctggccttaaacatcaccgtaggaagggtttttaaaattttacgcgcaaaactccgtggaccccgtgccagtgtcttggaagtgtcaacgtgtttttggatgatcctgtattgggctgtacttactgtgatactgaaaagctgtcctgctgaagcagctatatttgaaatattaagtatgaaaggaggtaattaaaaaccaagcaaaacaaaacaaggacttagttttttaaattgaccaaacttgtcctttaaagatgttgttatttaactcgagttaagttccttatttcctctggtttattttttaatccta

SEQ ID NO: 64577 - DNA, 1367 bp, Homo sapiens
  misc_feature (1)...(1367): n = a,t,c or g
agctccaactttcatcaactttcctgcaaaagggaaacccaaacggggtgatacatatnatttacaggtgcggggtttttnagctgagcagattgcccggtggatcgccgacagaactgatgtcaatattagagtgattagacccccaaattatgctggtccccttatgttgggattgcttttggctgttattggtggacttgtgtatcttcgaagaagtaatatggaatttctctttaataaaactggatgggcttttgcagctttgtgttttgtgcttgctatgacatctggtcaaatgtggaaccatataagaggaccaccatatgcccataagaatccccacacgggacatgtgaattatatccatggaagcagtcaagcccagtttgtagctgaaacacacattgttcttctgtttaatggtggagttaccttaggaatggtgcttttatgtgaagctgctacctctgacatggatattggaaagcgaaagataatgtgtgtggctggtattggacttgttgtattattcttcagttggatgctctctatttttagatctaaatatcatggctacccatacagctttctgatgagttaaaaaggtcccagagatatatagacactggagtactggaaattgaaaaacgaaaatcgtgtgtgtttgaaaagaagaatgcaacttgtatattttgtattacctctttttttcaagtgatttaaatagttaatcatttaaccaaagaagatgtgtagtgccttaacaagcaatcctctgtcaaaatctgaggtatttgaaaataattatcctcttaaccttctcttcccagtgaactttatggaacatttaatttagtacaattaagtatattataaaaattgtaaaactactactttgttttagttagaacaaagctcaaaactactttagttaacttggtcatctgattttatattgccttatccaaagatggggaaagtaagtcctgaccaggtgttcccacatatgcctgttacagataactacattaggaattcattcttagcttcttcatctttgtgtggatgtgtatactttacgcatctttccttttgagtagagaaattatgtgtgtcatgtggtcttctgaaaatggaacaccattcttcagagcacacgtctagccctcagcaagacagttgtttctcctcctccttgcatatttcctactgaaatacagtgctgtctatgattgtttttgttttgttgttttttcgagatcacgctactgcgctccagcctgagtgatagagtgagactctgtctcaaaaaaaagtatctctaaatacaggattataatttctgcttgagtatggggttacta

SEQ ID NO: 64578 - DNA, 1620 bp, Homo sapiens
ggcacgagcccaagcaattcaagacccagcaatactacaacggcctgaagcagatctgtccagaagtggagaatgcccagccaggggccttgaagagtcagaggctcccagatctgaccacagtcatctcggtggatgcccctttgccggggaccctgctcctggatgaagtggtggcggctggcagcacacggcagcatctggaccagctccaatacaaccagcagttcctgtcctgccatgaccccatcaacatccagttcacctcggggacaacaggcagccccaagggggccaccctctcccactacaacattgtcaacaactccaacattttaggagagcgcctgaaactgcatgagaagacaccagagcagttgcggatgatcctgcccaaccccctgtaccattgcctgggttccgtggcaggcacaatgatgtgtctgatgtacggtgccaccctcatcctggcctctcccatcttcaatggcaagaaggcactggaggccatcagcagagagagaggcaccttcctgtatggtacccccacgatgttcgtggacattctgaaccagccagacttctccagttatgacatctcgaccatgtgtggaggtgtcattgctgggtcccctgcacctccagagttgatccgagccatcatcaacaagataaatatgaaggacctggtggttgcttatggaaccacagagaacagtcccgtgacattcgcgcacttccctgaggacactgtggagcagaaggcagaaagcgtgggcagaattatgcctcacacggaggcccggatcatgaacatggaggcagggacgctggcaaagctgaacacgcccggggagctgtgcatccgagggtactgcgtcatgctgggctactggggtgagcctcagaagacagaggaagcagtggatcaggacaagtggtattggacaggagatgtcgccacaatgaatgagcagggcttctgcaagatcgtgggccgctctaaggatatgatcatccggggtggtgagaacatctaccccgcagagctcgaggacttctttcacacacacccgaaggtgcaggaagtgcaggtggtgggagtgaaggacgatcggatgggggaagagatttgtgcctgcattcggctgaaggacggggaggagaccacggtggaggagataaaagctttctgcaaagggaagatctctcacttcaagattccgaagtacatcgtgtttgtcacaaactaccccctcaccatttcaggaaagatccagaaattcaaacttcgagagcagatggaacgacatctaaatctgtgaataaagcagcaggcctgtcctggccggttggcttgactctctcctgtcagaatgcaacctggctttatgcacctagatgtccccagcacccagttctgagccaggcacatcaaatgtcaaggaattgactgaacgaactaagagctcctggatgggtccgggaactcgcctgggcacaaggtgccaaaaggcaggcagcctgcccaggccctccctcctgtccatcccccacattcccctgtctgtccttgtgatttggcataaagagcttctgttttctttggcaaaaaaaaaa

SEQ ID NO: 64579 - DNA, 711 bp, Homo sapiens
  misc_feature (1)...(711): n = a,t,c or g
aatacattggcgggcgtagtacttattgtgctcgtcaaacttgagttcctgaatgacatctgggtacttgagtagccgcagcaggatcttctctgatatcatggaggggctaaactgagagacctctgtggctaggaagcgatgagcggccaggaggagctgcggggagattttcactttgagctcattgtccgcatccttgaaggcagagaagtcacgcttgttcttctcagacacccgcttccggcttcggttgtcagtgtacatgtcggactcgtccaggatctccgacttgatgatctcctcgatcacgtcctccagggtgaccaggcccaggacctcgtagaaggggtcaccctcaccctcgttgtttaccttctgcacgatggccaggtgggacttcccagctccagctgctttttctcatggggaaaagccaggggccccagagcagaccagggactcccaccacccaagaaggagtcctctgcatcttactcaatgagtctcccaggaaggtccagcctctgagatcccaggggcccaggatgttcccgcgctctcaggccctcccatgggagaggtgcgggcaggactgactggaagccacaggcttgggccaaagtccacacaaacagatagctgagcaccctgatttcttgcgnncgggtggntcgncgcnannttnggngnatgntncaggaggtcctt

SEQ ID NO: 64580 - DNA, 549 bp, Homo sapiens
cgcctttgtagaaatgagttccagcagctttatgggaatatctaatatgacacaactggaaagctcaactagtaaaatgcttaaagcaggcataagaggaattccgcctaaaattgaagctcttccatctgatatcagcattgatgaaggcaaagttctaacagtagcctgtgctttcacgggtgagcctaccccagaagtaacatggtcctgtggtggaagaaaaatccacagtcaagaacaggggaggttccacattgaaaacacagatgacctgacaaccctgatcatcatggacgtacagaaacaagatggtggactttataccctgagtttagggaatgaatttggatctgactctgccactgtgaatatacatattcgatccatttaagagggcctgtgcccttatactctacactcattcttaacttttcgcaaacgtttcacacggactaatctttctgaactgtaaatatttaaagaaaaaaaaagtagttttgtatcaacctaaatgagtcaaagttcaaaaatattcatttcaatctt

SEQ ID NO: 64581 - DNA, 1101 bp, Homo sapiens
gaccacgccaagcttggcacgaggccagaacctgaaaagtgtcagagcgtatcttcagctggtgaacttgaaacagaaaactatgaaagagacagcttgctagcaactgttccagatgagcaggattgtgttactcaagaagtgccagactcccgccaggcagaaactgaagctgaagtgaaaaagaagaagaacaagaagaagaacaaaaaggtgaatggtctgcctcctgaaatagctgctgttcctgagctggcaaaatactgggcccagaggtacaggctcttctcccgttttgatgatgggattaagttggacagagagggctggttttcagttacacccgagaagattgctgaacacattgctggccgtgttagtcagtccttcaagtgtgacgttgtagtagacgcattctgtggagttggaggaaataccattcagtttgccttaacaggaatgagagtgattgccattgatatcgatcctgttaagattgcccttgctcgcaataatgcagaagtttatgggatagcagataagatagagttcatctgtggagatttcttgctgctggcttcttttttaaaggctgatgttgtgttcctcagcccaccttggggagggccagactatgccactgcagagacctttgacattagaacaatgatgtctcctgatggctttgaaattttcagactttctaagaagatcactaataatattgtttattttcttccaagaaatgctgatattgaccaggtggcatccttagctgggcctggagggcaagtggaaatagaacagaacttccttaacaacaaattgaagacaatcactgcatattttggtgacctaattcgaagaccagcctctgaaacctaactatgcagcagtgcgaggacaaaagatcatggagtggtcaaaatattcagatgagacatttggcatgtcttcctttattcactgatattttctacccatggtcttatatcaccgtatgaaatggaaacttacaggacttaaatatcagtgaaatattttgagatctttgaataattcctttagaggaattatacaaaattaatatatatgagtcct

SEQ ID NO: 64582 - DNA, 2237 bp, Homo sapiens
cgacgcgcgctgcggacccggctcgacccacgcgtacgcggacgcgtgggcggacgcgtgggcgccagcattcgctcaagaagtcccgcatggagaatgacatggcccagtctctccacagtgacacggctgatgacactgcccatcgccctggcaagagcaacctcaagctgccaaagggcattctcaagaagaaggtgtcagcctctgcagaaggggtacaggaggaccctccggagctcagcccaatccctgcgagcccagggcaggctgcccccctgctccccaagaagggcattctcaagaagccccgacagcgcgagtctggctactactcctctcccgagcccagtgaatctggggagctcttggacgcaggtgacgtgtttgtgagtggggatcccaaggagcagaagcctccgcaagcttcagggctcctcctccatcgcaaaggcatcctcaaactcaatggcaagttctcccagacagccttggagctcgcggcccccaccaccttcggctccctggatgaactcgccccacctcgccccctggcccgggccagccgaccctcaggggctgtgagcgaggacagcatcctgtcctctgagtcctttgaccagctggacttgcctgaacggctcccagagcccccactgcggggctgtgtgtctgtggacaacctcacggggcttgaggagcccccctcagagggccctggaagctgcctgaggcgctggcggcaggatcctttgggggacagctgcttttccctgacagactgccaggaggtgacagcgacctaccgacaggcactgagggtctgctcaaagctcacctgagtggagtaggcattgccccagcccggtcaggctctcagatgcagctggttgcaccccgaggggagatgccttctcccccacctcccaggacctgcatcccagctcagaaggctgagagggtttgcagtggagccctgagcagggctggatatgggaagtaggcaaatgaaatgcgccaagggttcagtgtctgtcttcagccctgctgaacgaagaggatactaaagagaggggaacgggaatgcccgcgacagagtccacattgcctgtttcttgtgtacatgggggggccacagagacctggaaagagaactctcccagggcccatctcctgcatcccatgaatactctgtacacatggtgccttctaaggacagctccttccctactcattccctgcccaagtggggccagacctctttacacacacattcccgttcctaccaaccaccagaactggatggtggcacccctaatgtgcatgaggcatcctgggaatggtctggagtaacgcttcgttatttttatttttatttttatttatttatttatttttttgagacggagtttcgctcttggtgcccaggctagagtgcaatggcgcgatctcagctcacctcaacctccgcctcccgggttcaagcgattctcctgcctcagcctccctagtagctgggattacaggcgcccgccaccatgcccggctaattttgtatttttagtagagacagggtttctccatgttggtcaggctggtctcaaactcccgacctcaggtgatccacccacctcggcctcccaaagtgctgggattacaggcgtgagccaccgcgccccacctaacccttccttatttagcctaggagtaagagaacacaatctctgtttcttcaatggttctcttcccttttccatcctccaaacctggcctgagcctcctgaagttgctgctgtgaatctgaaagacttgaaaagcctccgcctgctgtgtggacttcatctcaaggggcccagcctcctctggactccaccttggacctcagtgactcagaacttctgcctctaagctgctctaaagtccagactatggatgtgttctctaggccttcaggactctagaatgtccatatttatttttatgttcttggctttgtgttttaggaaaagtgaatcttgctgttttcaataatgtgaatgctatgttctgggaaaatccactatgacatctaagttttgtgtacagagagatatttttgcaactatttccacctcctcccacaaccccccacactccactccacactcttgagtctctttacctaatggtctctacctaatggacctccgtggccaaaaagtaccattaaaaccagaaaggtgattggaaaaaaaaaa

SEQ ID NO: 64583 - DNA, 1462 bp, Homo sapiens
actagatctagatctctttaatgccattctgatcgaaacgccattagctccattcttccaagactgcatgtctgaaaatgctctagatgaactgaatattgaattgctacgcaataaactatacaagtcttaccttgaggcattctataaattctgtaagaatcatggtgatgtcacagcagaagttatgtgtcccattcttgagtttgaggccgacagacgtgcttttatcatcactcttaactcctttggcactgaattgagcaaagaagaccgagagaccctctatccaaccttcggcaaactctatcctgaggggttgcggctgttggctcaagcagaagactttgaccagatgaagaacgtagcggatcattacggagtatacaaacctttatttgaagctgtaggtggcagtgggggaaagacattggaggacgtgttttacgagcgtgaggtacaaatgaatgtgctggcattcaacagacagttccactacggtgtgttttatgcatatgtaaagctgaaggaacaggaaattagaaatattgtgtggatagcagaatgtatttcacagaggcatcgaactaaaatcaacagttacattccaattttataacccaagtaaggttctcaaatgtaaaaaattataaatgttaaaaggaagttattgaagaaaataaaagaaattatgttatattatctagactacacaaaagtaagccacactatatcttcatgagttgcaaatccatggaaacacagtaaaccagccctgaaacaaagcatttccttgttttcagtggtattagatcttgtttccacatgtctgtctcattcttcactgggccttacaggttagttttaattaactctatggtatttttcttattcttgtttgatcatgttaaaaattggacctaataaaagtattttattcttgcttttccatgcttctctacaggtccaaatactgaatgtctcctttactttttctcttttaaatttttttctagacagggtctcactctgtcacctaggctacagtgcagtggtgtgatcacagctcactgcagcctcgacttcccaggctcaagtgatcctcccagctctcagcctccaaagtagctggcactacaagtgtacacccccacacaaggctaagttttgtattttttgtagagacagggtttcaacatattatccaggctggtgtcgaattcctgggctccagggatccacagtcccccttggcctcccaaagtgctgggattacatgcatgagccactgtgctgggcttcatttacattttaactgtctgttccttgcctagattcacagaaatccaaagctgtatgtagtcaacatggttcacaagtggtggaaaatgtgcttttttgctttgttttggtttgtttcggtttgttttgagacagagattccctctgtcgcccaagctag

SEQ ID NO: 64584 - DNA, 2287 bp, Homo sapiens
atgagcgccgccacccactcgcccatgatgcaggtggcgtccggcaacggtgaccgcgaccctttgccccccggatgggagatcaagatcgacccgcagaccggctggcccttcttcgtggaccacaacagccgcaccactacgtggaacgacccgcgcgtgccctctgagggccccaaggagactccatcctctgccaatggcccttcccgggagggctctaggctgccgcctgctagggaaggccaccctgtgtacccccagctccgaccaggctacattcccattcctgtgctccatgaaggcgctgagaaccggcaggtgcaccctttccatgtctatccccagcctgggatgcagcgattccgaactgaggcggcagcagcggctcctcagaggtcccagtcacctctgcggggcatgccagaaaccactcagccagataaacagcgtggacaggtggcagcggcggcggcagcccagcccccagcctcccacggacctgagcggtcccagtctccagctgcctctgactgctcatcctcatcctcctcggccagcctgccttcctccggcaggagcagcctgggcagtcaccagctcccgcgggggtacatctccattccggtgatacacgagcagaacgttacccggccagcagcccagccctccttccaccaagcccagaagacgcactacccagcgcagcagggggagtaccagacccaccagcctgtgtaccacaagatccagggggatgactgggagccccggcccctgcgggcggcatccccgttcaggtcatctgtccagggtgcatcgagccgggagggctcaccagccaggagcagcacgccactccactccccctcgcccatccgtgtgcacaccgtggtcgacaggcctcagcagcccatgacccatcgagaaactgcacctgtttcccagcctgaaaacaaaccagaaagtaagccaggcccagttggaccaaaactccctccgggacacatcccaattcaagtgatccgcaaagaggtggattctaaacctgtttcccagaagcccccacctccctctgagaaggtagaggtgaaagttccccctgctccagttccttgtcctcctcccagccctggcccttctgctgtcccctcttcccccaagagtgtggctacagaagagagggcagcccccagcactgcccctgcagaagctacacctccaaaaccaggagaagccgaggctcccccaaaacatccaggagtgctgaaagtggaagccatcctggagaaggtgcaggggctggagcaggctgtagacaactttgaaggcaagaagactgacaaaaagtacctgatgatcgaagagtatttgaccaaagagctgctggccctggattcagtggaccccgagggacgagccgatgtgcgtcaggccaggagagacggtgtcaggaaggttcagaccatcttggaaaaacttgaacagaaagccattgatgtcccaggtcaagtccaggtctatgaactccagcccagcaaccttgaagcagatcagccactgcaggcaatcatggagatgggtgccgtggcagcagacaagggcaagaaaaatgctggaaatgcagaagatccccacacagaaacccagcagccagaagccacagcagcagcgacttcaaaccccagcagcatgacagacacccctggtaacccagcagcaccgtagcctctgccctgtaaaaatcagactcggaaccgatgtgtgctttagggaattttaagttgcatgcatttcagagactttaagtcagttggtttttattagctgcttggtatgcagtaacttgggtggaggcaaaacactaataaaagggctaaaaaggaaaatgatgcttttcttctatattcttactctgtacaaataaagaagttgcttgttgtttgagaagtttaaccccgttgcttgttgttctgcagccctgtctacttgggcacccccaccacctgttagctgtggttgtgcactgtcttttgtagctctggactggaggggtagatggggagtcaattacccatcacataaatatgaaacatttatcagaaatgttgccattttaatgagatgattttcttcatctcataattaaaatacctgactttagagagagtaaaatgtgccaggagccataggaatatctgtatgttggatgactttaatgctacattttaaaaaaagaaaataaagtaataatataactcaaaaaaaaaaaaagtcgacgcggccg

SEQ ID NO: 64585 - DNA, 2243 bp, Homo sapiens
tcctcccggccagccaccaagaccatgaactttttttggcagagagctgagatcttgggagccctggtctctgtactgtccatctgggtcgtgacgggggtactggtgtacctggctgtggagcggctgatctctggggactatgaaattgacggggggaccatgctgatcacgtcgggctgcgctgtggctgtgaacatcataatggggttgacccttcaccagtctggccatgggcacagccacggcaccaccaaccagcaggaggagaaccccagcgtccgagctgccttcatccatgtgatcggcgactttatgcagagcatgggtgtcctagtggcagcctatattttatacttcaagccagaatacaagtatgtagaccccatctgcaccttcgtcttctccatcctggtcctggggacaaccttgaccatcctgagagatgtgatcctggtgttgatggaagggacccccaagggcgttgacttcacagctgttcgtgatctgctgctgtcggtggagggggtagaagccctgcacagcctgcatatctgggcactgacggtggcccagcctgttctgtctgtccacatcgccattgctcagaatacagacgcccaggctgtgctgaagacagccagcagccgcctccaagggaagttccacttccacaccgtgaccatccagatcgaggactactcggaggacatgaaggactgtcaggcatgccagggcccctcagactgactgctcagccaggcaccaactggggcatgaacaggacctgcaggtggctggactgagtgtcccccaggcccagccaggactttgcctaccccagctgtgttgtaaaccaggtccccctcctgacctctgccccactccaggaatggagctcttcccagcctcccatctgactacagccagggtggggactcagcgggtataaagctagtgtgaccctgctcttccagctcctgggccagctctggaagggctgtatttgggcctaatcctcagcaaatgttctaccactcgcaggggcaaaggtggtgagccacgggacgtccaaggggaggctggccccagcgcgcccatactgcctgcctcatgccccattctcagcctggctggcctttgcctttatgaatctgagcccctccatctgcctatagcaataggcacgggggtgaggaccctcacactctcatttgagcctccctgaggcagggagccaggaggcacctgaggcctatctgtgccttagtcacttcagctatgagccaaatgttccctttcctggaggggagaggcttcttactaggtaagagacaggtttcctctttccttatttcctcagctgtgccaacacaaaaaacaactttggcacaggtggtgggcagggggtagagagatttcagcttgggttctgcactaacagcctccaagccccctggcacttctgttgccctgagagtgtcccaggggattcagagtctccagaaagatatggctgggccaactctgttgcctacctggcctgacccagtcggagcctgacatggtggagggaaagggagacaagtggggctgcactcggtccagaggccagctaggagggaaaccgcagcttcctggggcttgtgtgtgaagattcctgacttaggggtggcttttgtttacaagatgcaagaggggaaacctgtccccgactcatcgagacaacatgcccagttatcagggagtcctgtgtcacaaggtctgtctctgccattgtaagcaagtgccttgggcgagctggcctctgccccacagtctcatctgtacaccgacagggttgatgcctccctcacagggttgagaacaagagccagttggccaagtacctgtggttgttgaagattggttacttttaccatcctggggacagggaactctgtggcccgaggctgcctcactgaggagtcaggtgggcttcccagcctccccaggggcagtgctgagtttgtcttgactgttctggcccaaggtgggaggaggtgggtttggtcacttgcctcccactttaaatctctgtctttccatctgtgaaatgacctctttgtgccttcccagcactgtcatcctgatcgcctgtgttctaggtagatgggtccttcagcccctccaggtctgtgaaaagtctgtggaaagcactggcctggagaggggtggggggttgctggtgggtgctccattcc

SEQ ID NO: 64586 - DNA, 1381 bp, Homo sapiens
  misc_feature (1)...(1381): n = a,t,c or g
ttttttttttttagttttttttgaatatatttacaatataaatactaatttgtttccaaagtacatattcttttaacaatttgagaaaattatctagcatacgacgagtaatttaatgtaaagactctatagtagtgattaaggaaaaatagaactgttttggggataaggaatcctgggctatgaatgggcatgatgatctgaacttgcaaagggaaagtgaagcagcttcagtccaccattggcactgctaatacacatatgttaaaggactactatgtgagatagcaacctggatatggtgttaataaaaactaaacatgagaggatataaaaagtacacatgcttggcataggtgtgttacttttaaagaagctcaacattttattctcattttcaataacttaaatgaacagcacttaacacattacacaaaattaaagacttgtgcatatatttgatttcaacattaatgtcaaaaatacatagtatgattttacataggatttgtgctacattagaacactagagacaaacatcacttgagtattaaggaaaacattaaatattaaataactgagaaaatgtgtaaacactaatctaactgggggttttgctattgcaacatgtccaatgaagtggtttcaacagtacaaaaaggattaggacatgagtttttccagtctacatggaatatatggatttcatttcaggaatcctttcataaaaactggtccaggataacaggagagaatccactctcctgattgttaatttggtacactccattctatgctaatttttacttgcaaacttgggtactgagtaaatactttaaatcatcactccttatcaacatcttggtgaaaactgagggtttgttggtgattcagtgtaagatttgagttcatatgcagcaccgctatcaacctccattgactttctagagaacaggagccgtacgtctctatggaggtagatctttccagatttagaactctggaacctcagatgtatgaggtagcgtaataaccgttcttctgtgtgtcggatgttctctttattaacacttctcttcacttcttgtttaacaggtacagaaaaagttctttgtcgtaggaatgtctgatgattggctggcatatctcgtaaatcatatatcacaacaaacatcttcaccacagtcttattaggattaaataaggtcacttgtattgttcctgaaggaggtactcgataaccccttttaccaagggactctaaagtaatnacacccatataaggagagggagnattgtcatntgaaacactgtagaatgacacttcaactggnagagtcaaatgtgtggggcagaaagcaccacttgcccctacctcggc

SEQ ID NO: 64587 - DNA, 1586 bp, Homo sapiens
aaatgcacatctcatggcagctaagccacatggctgggatttaaagcctttagagccagcccatggctttagctacctcactatgctgcttcacaaaccttgctcctgtgtaaaactatattctcagtgtagggcagagaggtctaacaccaacataaggtactagcagtgtttcccgtattgacaggaatacttaactcaataattcttttcttttccatttagtaacagttgtgatgactatgtttctattctaagtaattcctgtattctacagcagatactttgtcagcaatactaagggaagaaacaaagttgaaccgtttctttaataatgctgatctactttttgttgaatttgtattttatttcaagtgtcaaagaaatcatctttgtttatttagatgaaaccaaacactacacatttacactcacactgcttccaggacccaagggtttcacagaccatttgcctacctggttctttcctctcctctttccagtgatttctagaataccctttcaaaggaccacatgaatatacgaactgtaaaattcaactttgatcttttgcgaaatgttttatttactgcttaaaatctaggtgggtggatatattcatgtatgcatatattgatagattaatacaaacataagtatgtatttaaattgaaggataagtaaagtgagagtacaacagccccattcttagttaaaaagaaaagaaaaagacaagagcaagccactgccaccacaggtaccagcacttaaatttgtcagcaggctgaccaaagagtggcctgtctgttggcattcatcggacatggcagctcccttcagctctccagtgagtttcaagttcagagcactttcagtccttgtcttgtttatctattactgaagggtttctaggaaggtttagcagtgcttcaattttcttagcatcattctcaggttcatcttcctgtaaactactttcaattttctcagggaggtgctcagtaacttgtagtctgcctttccactcttccagttttagctcatggagtgcctttcgatccttctgttttctttcctgaacagtctcaccagagtacttctgaaatgccatcagcaggcctcctacaggagtgcccagcaaggctccaattatgccaccagccaccaggccacgcaggcctacgtttatcctaaaaagacttcccgtgacagtctttgccaaacagctcccggaggcggtcccatccagattccgggtaatagggctctgggacgtagggaagccgcttctgacgctcctcaaggacttccgaatcggcagtcacagcttcggcagcaaagactcggggaaataggcacaatgctctacagagaaagctccgcggtgccggtggcggcacctccatggccttctctcgacctacggacaaacttgagcgctcaggacttcaagtcctcgcggacgtgccgcgggagagcgtaactgtacgaggtgagaatccgtgcatttgacccaggttaaccctctgccagagggctcgacacccacaccttcagtccccggcctcgctttgcggacgcgtggg

SEQ ID NO: 64588 - DNA, 1139 bp, Homo sapiens
tttttttttttaaaaatgttagaaaaaaacatttattgacatgaaaaggggtttcaaatatactgatttgtcaaacaaatagtaaaacaacatagagtaatgattcattttggtaaaaaatatatatgtatatatagaaaaaaaaattctgcaaggacatatgctaaattggtaacagtgcttacccctgggaagggggtatacagatgttgatttactctttgggtacctgtatttcccagtttttctataaatcacatcatttgcttctgtcataagaaaaaataatatctattatcatcctttattttgatcaaaacaaatcaattttttaaaaaatcttaggtttttttaagaagcagaaataatttccaaattgcctccagagacaatgattttatcctctgcagaagctggtcagaaccttcttgatcacagccccagttagatacagggaagaatggcgcttcctacagcttcagcggcctcagctcagctctgtgccccaaggccaaaccagctcatctccagccccatccatcctattcttgctgagtcaccagtctcatcatcttcagagccatgtccccttggtcagaaggaaccatatgaccagctttcagaatccagtagaaagcaaggttcttgtaggacttgacaaaagcagatgtttccaaagatttagggtcactgtacagggccttccacttcagctgactgaatttaggcagttctggccacttcagtttccgcacccaggcctcctgacccatggtatctacgatgagatccagctgtccattatacaccgtcacgttgatccctgcctccagcaactcgtccacaatgctaatgactggcttcatgaagtcctcctccatgttcacaaagacgttggtagcctggcctccccaggattgatcctcaggaataattttgagcttctttctgatggggccattcatgagctggcttaaggcatctcgttgtaggtgtctcacgtggcgctgacaaagacaaactaggtggctctgtgtgaattctagactcgactccattgtagacgtgggagtgcttttagttaagatgttatagaagttcaccccatctgtcccttctgtcgtcttctcgcagccgta

SEQ ID NO: 64589 - DNA, 1397 bp, Homo sapiens
ctcagagcggtggaattcgaacgcttttgaaagcgaatcaggaaattacttatcaatctgaagccccatataattatgaataatcctcgctgccaaagggaaggggattttgagcaaaagctccacatctgcgcacactagagttcaaagactccagctgttggaaggtcttgtgagcaagagccaaagatgtttgtcttgctctatgttacaagttttgccatttgtgccagtggacaaccccggggtaatcagttgaaaggagagaactactcccccaggtatatctgcagcattcctggcttgcctggacctccagggccccctggagcaaatggttcccctgggccccatggtcgcatcggccttccaggaagagatggtagagacggcaggaaaggagagaaaggtgaaaagggaactgcaggtttgagaggtaagactggaccgctaggtcttgccggtgagaaaggggaccaaggagagactgggaagaaaggacccataggaccagagggagagaaaggagaagtaggtccaattggtcctcctggaccaaagggagacagaggagaacaaggggacccggggctgcctggagtttgcagatgtggaagcatcgtgctcaaatccgccttttctgttggcatcacaaccagctacccagaagaaagactacctattatatttaacaaggtcctcttcaacgagggagagcactacaaccctgccacagggaagttcatctgtgctttcccagggatctattacttttcttatgatatcacattggctaataagcatctggcaatcggactggtacacaatgggcaataccggataaagaccttcgacgccaacacaggaaaccatgatgtggcttcggggtccacagtcatctatctgcagccagaagatgaagtctggctggagattttcttcacagaccagaatggcctcttctcagacccaggttgggcagacagcttattctccgggtttctcttatacgttgacacagattacctagattccatatcagaagatgatgaattgtgatcaggaccaagatccctgtggtaaacactctgattgaatctggggttccagaaggtggaacaagcaggaatgggatccaaagagactcccactcagattctaaagcatttaaagacaattctagcagaatttatcaaaacaagatgaaacacagaaaagttgaaaccacaacaaaatgaattctattaaagaatagccccagatataaattctcttgaaagcaatgttcataaatatttaagcaaattaaagacaatgttaacaaattttctattaaatgccctgagtgataaaaccagttggcaataatattgccttattaaatcttcaaaaaataa

SEQ ID NO: 64590 - DNA, 1096 bp, Homo sapiens
gtcagtgtggtggaattcggctctgtgaagaaaagggtatgctttccatcagaagatcatctagaggagtttatagcagaacatctccctgaagcatccaatcagagtctcctcactgttgcccatgcagacacaggcatccaaaccaacggtgacctggaagacctggaggagcatgggccagggcagacagtctctgaggaagccacagaagttcacatgatggagggggacccagacacactggccgaacttctgatcagggatgtacttcaggagctgtccagttacaacggcgaggaggaggacccagaggaggtgaagacatccttgggagttccacaacgtggtgacctggaagacctggaggagcatctgccagggcagacagtctctgaggaagccacaggggttcacatgatgcaggtggacccagccacaccggcaaagaaattggaagactccaccattacaggcagccaccagcagatgtcagcaagtccttcctctgcacctgcagaagaagcaacagaaaagaccaaagtggaagaggaagtgaaaaccagaaagcccaagaagaaaaccaggaagcccagcaagaaaagccggtggaatgtcctgaaatgttgggacatttttaatatattttagagacctctgaagattcctcgaccaccaggaagggccccgacgtggggatgtcaacatggctcagacttgatgtggatcgtgatcatttcgggaaatgtgttactccaaaaacttttataatctttgcttaatttgtttttaaatactttcctggctgggcgtggtggcttatgcctgtaatcccagcactttgggaggccgaggcgggtggatcacctgaggtcaggagttcaagaccagcctggccaacaaggtgaaaccccgtctctactaaaaatacaaaaattagctaggcgtggtggcgcactcttgtagtcccagctatttgggaggctgaggcaggagaatcacttgacctcaggaggcggaggttgcagtgagccgagatcatgccactgcaccccagcacctggctacagagtgagactttgtctcaaaaaaaaaa

SEQ ID NO: 64591 - DNA, 1108 bp, Homo sapiens
tttttttgggaggtacaattttaaaaataatacactagatacgtttttcctaaagcagtagatgacattcaataagccatgttatagataactaataacaatgctaacagggtcaaaccaaaaaaaaggcacaggtctttcacatgttttcattagatttgtttaggccaagttttacaattcacatctccattttggcaagtaatttcctactgcaaatatttatttctgagaaacaactcaaataatttaatttcaattaagaaattaaatcaactcaaaataggaataagacaaactcattatgcttgcttcagcatttccttctaccgtgcccaaaaatgctggggtcttcaattggtaaaagttatcttgtatggcttgccattgacaatggcagataaagctgatcgggggatcttgccagatctggttttgggtagctgtttgacaaacactgcatttcgaaaagcagccacagggccaatgttctgtctaacgtgtttcacaatttcttccaaaacttgctcctctgttgcatttatatcttttctcaatacacagagtgctaaggggacatgaccttttaagggatcttccttgccaacaacagcacagtctgccacggtaccatgggaaaggattgactcttcaatggcgcctgcagaaattctgtgacctgcaacatttattacatcatccactcgagacataacatacaaatagccttcttcatccatgtaaccagcatccatggtatcataatatccaggaaatttttcaaagtataaatgcttgaatgcttcctgattcttccagagtcctgaaaaagccccaggtggcaatggtaactttaccacaatatttcctaaacaccgagccttcagtttttgcatgttgtcatccaaaatcataacattgtatcctgggacgctttttcctgcttgccctggtggaggtgttttagaattgcctaatccaacacatgacgcagtaattggagatccagtctcagtttgccaccaatggtctaagacaggtactctgaagacatttttggaccattccagggtctctacatcacatcgttctccagccgaattccacc

SEQ ID NO: 64592 - DNA, 1025 bp, Homo sapiens
tctctagtccgtgcggtggaattcggagctgggcctccgggactccgacatggactacatccagacggatgccatcatcaactacgggaactccgggggaccactggtgaacctggatggcgaggtcattggcatcaacacgctcaaggtcacggctggcatctcctttgccatcccctcagaccgcatcacacggttcctcacagagttccaagacaagcagatcaaagccccctcactggcagttcattgagagcagggggcttcctcacgtttccccctcctccatgaccccgtcagccaagcacatggaccccagtgcagccaaggctggtgccatgagggctggtcacatgaagagctgctgttgaggatgccgccattgttcttctgtgtccattatgggaagacaatctggagccaggcagagcctgtctttcccaaagaagctgaagtcttcttctcttgaacagtggggaccatctaatctcttgagcccttttcctgttggcttctaggaagctcagagctagattcaggggtgcacccagacctgtcctagcatgctcctttccctaatgaccgagtctttcctgttgaattatcccattctccatgggtgcctttgactttggcctccttactggaaattagcggagctgctgtttgcacacactgagctgtgaggtggctttccttggaagtggatgatagtgtcctcttcccttcttgcctctctctttctcctgagacaggatccccctggggcctaggtttgctcctttgttgtacaggggctgtcccagttagtgctgaccttcatcccagaaccccctgggaaaatatcccctgtcctcagagctgtgttcccctccccaaggacagtgcagacttaactgagggagcctgataaaccttagctgcatggcacaattgcaattttaaaatcctttcttgaagttgattggtgtttgtaatttgcttctcttttttatttaataaaatccaatgatccaaaaaaaaaa

SEQ ID NO: 64593 - DNA, 1401 bp, Homo sapiens
cgagaccactagtccagagcggtggaattcgagagacagtatgaatgccacgaatgtgggaaagccttcaaccagaaatcaatactcattgttcatcagaaaattcatacaggagagaaaccctatgtatgcactgagtgtggaagagctttcatccgcaagtcaaactttattactcatcaaagaattcatactggagagaagccttatgaatgcagtgactgtgggaagtcctttacctccaagtctcagctcctggtgcatcagccagttcacacaggagagaaaccctatgtgtgtgccgagtgtgggaaagcctttagtggcaggtcaaatctcagtaagcaccagaaaactcataccggagaaaagccctacatttgttctgaatgtgggaagacctttcgacagaagtcagagttgattacacatcacagaattcatactggagagaaaccttatgagtgcagtgactgtgggaagtctttcactaaaaaatcacagctccaagtgcatcagcgaattcacactggagagaagccttacgtgtgtgctgagtgtgggaaggcctttagcaacaggtccaatttgaataaacatcagacaacacacactggagacaaaccctacaagtgtggcatctgtgggaaaggcttcgttcagaaatcagtgttcagcgtccatcagagcagccacgcttgagagaaacagtgtgagaaaacccccctgagggttgggtctgattgtacactgttgcacgcatgcagcagaaaaatatgtatattattgtaaatagaaatgaccacatcagaatgtcacacatggctgttctggagagggcctctgagaaggcactgaatgaggcgagggacccttcctacattgtcaccatccccagtaaaccttgggtcattattcatactgacaaggaaccgagtcaatttggtgaataggaaaagccttctcatgaaaactacaatagaatactgttaccaaattcttcctaagaaagatcgtattaagttaacgataatcctgtttactgtggattaggtatagtgccaacaaattgaatgataaaacaacataatacgtagttattttgatagtgatgaatcctaagttatgtgagttgttcgttgtggaacacattgtgtaacagactcctgggtgtttttctttctcattcgaatctaccacagttggtcatatccaaccctcattcagtatttctatcaagaaagagatgctacaaaaaaaaaaaagaaaaaaccttttttgtttccaaacttaaccctcaaatggttggttgggccccctttggttttaacaaaaattggcccccccctattaatctacaaggagtgggtttaaccctaagggcccttaacctttttgggg

SEQ ID NO: 64594 - DNA, 1650 bp, Homo sapiens
cccacgcgtccgtctacatggttgtcaaatctgttgaattgatgtcagtctaccagtatcctgaaaagtctcagcaggcagtactcacgccacaatttttgcacgtcattacaagtaacaacctgcagtgtttcactgtgcggtgcagtgcggcggcagctcgtgaggaggacccgtacatggacaccaccctgaaggcttgcccacctgtcagtatggatgtctgtgctttaagaatacagcttttcataggcttgaaagccatctgtcactttaaaaaccacatcatacttttgactaaagcagaacctgaagccattccagagagaagacagtcacccaagaggcttctttcgagaaaagataccagtgttaaaatcaaaatacctcctgtagctgaggctgggtggaatttgtatattgtgaatacgatctcaccagagcaactgtaacaaagagatggtagactatagcaatacctataagactgtcaaaacccagagctgcattcaccttctcagtgaggctcatctgttagtgcgagctggcctgatggatgccagtcagctggaacctggagagaaggcagagcttttggaagcatttaaggaaagctgtgggcaccttggggactgttacagcaggcttgactcccagcattctcatctcaccttgccatactataagatgtctggtttgtctatggctgaagttctggcccgcacggactggacagtagaggatggattacagaaatacgagagaggattaatcttttacattaatcattcactttatgaaaacctggatgaagaattaaatgaagaattagcagcaaaagtggttcagatgttttatgtggctgagccaaagcaagtgccccatattctctgtagtccttctatgaagaatattaatcctttaactgccatgagctatctaaggaagctggatacttctgggttttcatcgatcttagtgacattgaccaaggcagcagtggctctgaaaatgggagatcttgacatgcacagaaatgaaatgaaaagccattcagagatgaagttggtatgtggcttcattctggaacctcggctgttgattcaacagagaaagggacagattgttccaaccgagcttgcacttcacttgaaggaaactcagcctggattgcttgtggcttcagttctgggcttgcagaagaacaacaaaattggaattgaagaagcagattccttttttaaggtgctttgtgctaaggatgaagatacaattcctcagctcttggtagacttttgggaagctcagctagtggcatgtctcccagatgtggtacttcaggaactctttttcaaactcacatcacagtacatctggagattgtctaaggaggcagcctcctgacaccacaccattgcgaacatcggaggatcttattctcctggtcattccttggtagatatttggaataaaataatcacactgactgtgattgggtagatcacattccatattctcctgtgagtctcagaagatgcttcattttgtagaacggtgtaagtggtttccattccagcatgaatgtggtcggtcacatggcagtggagtaaccaaattccaggtgttcttggaaacatttctagggtttgg

SEQ ID NO: 64595 - DNA, 1069 bp, Homo sapiens
ctgatcttaaggataccattggctctgtcaccaaaacaccgagtggtttatacataattcacccagaaggatctagctacccatttgaggtaatgtgtgacatggattacagaggaggtggatggactgtgatacagaaaagaattgatgggataattgatttccagaggttgtggtgtgattatctggatggatttggagatcttctaggagaattttggctaggactgaaaaagattttttatatagtaaatcagaaaaataccagttttatgctgtatgtggctttggaatctgaagatgacactcttgcttatgcatcatatgataatttttggctagaggatgaaacgagattttttaaaatgcacttaggacggtattcaggaaatgctggtgatgcattccggggtctcaaaaaagaagataatcaaaatgcaatgccttttagcacatcagatgttgataatgatgggtgtcgccctgcatgcctggtcaatggtcagtctgtgaagagctgcagtcacctccataacaagaccggctggtggtttaacgagtgtggtctagcaaatctaaatggcattcatcacttctctggaaaattgcttgcaactggaattcaatggggcacgtggaccaaaaacaactcacctgtcaagattaaatctgtttcaatgaaaattagaagaatgtacaatccatattttaaataatctcatttaacattgtaatgcaagttctacaatgataatatattaaagatttttaaaagtttatcttttcacttagtgtttcaaacatattaggcaaaatttaactgtagatggcatttagatgttatgagtttaattagaaaacttcaattttgtagtattctataaaagaaaacatggcttattgtatgtttttacttctgactatattaacaatatacaatgaaatttgtttcaagtgaactacaacttgtcttcctaaaatttatagtgattttaaaggattttgccttttctttgaagcatttttaaaccataatatgttgtaaggaaaattgaagggaatattttac

SEQ ID NO: 64596 - DNA, 1808 bp, Homo sapiens
ttttagggccagcgtctgggctccatttgatcaggtcagcatttattagtaggaagcagtaacatttacaactggtcctcgggcaggaaccgggagggccaccacccgcggccgcccacgcgagcccagccttcaggaggagagagcagcgcgtccaatgcactgaggacaataccccaacccgcctcgaggctcctgcggctcctctaagcctcactggatgatctccaccagaggtcctcgcgtgcctccctgaggaaagggggctttcgcaactggtgggcaaccccgccgggcttcaccgtgggctagcagccggtgtgtccgcactgttgtcgctctgccttcattcttggaattggggcgcacttggacccctgtttgggcagtgctggggggtgagggggactaaactaacagcacttttcaaaaacatgggggacatttacacaagagagggctccccaagccagcttgcactcacaaaatatagcatttcttaaggaaccaatggagcaggaaaaagagggagtgggatagggcgaaaccccaaagccacttggtttttccaacacgtaaacgagcaaatacagagtcccccaaatacctcagagaccaaccccccagtcccttttatttaaaaagaaaaaaaaaaagaagaagaagtccaagtcgctggagagtttctggaaatcaagcaccaaacacccacaaaggaaaacagcaacaacaacaaatccgctgcccttgagcgctcccgccagcaccgcgccgggtcagtctcctttggggcatttctccttgctcatctttttcattttcatcctacggttctgaaaccagattttgacctgtctctctgttaggttgagaatcctggccacctcgtagcgccggtcccgggtgaggtacatgttgaagaggaattctttctccagctcaagcgtctggtatttggtgtagggacagcgctttttccgggtggagcgagcgtggatccagttcgcggcggggttgtttgggtcaagttgctgctgctgctgcggctgcgaatgctgcttctcctcctccttcagcgaacagcctgggatcgggtggtcgctgcaagctgagggctccgacgagccgcccgtcccagtcgcggccccgatccctgccccaggcccggttccccccgtcgccgctgccgccttctcctgcaggaacgagttgcacgagaactcggggccgctgctcccctgggactcccgggccacggagcactcagtccgtttggaggaggaggataaggaagtggaggaggaggaggtggtggaggcggccgtggcgggggccggggccgctcgggtttcaggcttaatcccgtagtggcgcccgttggctgggccgctggggccagggctgggaccgcggcccggaccgccgcctccaccaccaccgccaccgcccgcaccgcccgggaagccgggcagcggctccatccaggagcgcacgtagcggccgggctcggaggcagaggcggccaggggcggcgggggaacgtacgggtggtagaggccgctcatcgccgccgctgccgggggctgggagggcaccgcggaccacgaggcagagaacacggccgatctgggggcaaaactacacgaggcgaactcggcggcggtggcggccgggccatcagccacacctgcaggccggccctgcgcgcctggccccggcggcccgaagcgcgccgcgaacacctcgtcgccctcatggcctataagcgagtccacgtagtagttgctgagggtgccactggaagacat

SEQ ID NO: 64597 - DNA, 774 bp, Homo sapiens
gcggaggactttgcggctgtgcgggccgatgactcagaggtggatggggactgcagcctgactggaccttctgctttggtgggctcctatggcacctccccagagggggtcggaggatacatccattcccatcggcccctgggcccaagagagtttgagtccttcattgatgtctatgccatccggagtgctgaaggagccccccagaaggaggtctacttcatgggcctcattgatatccttacacagtatgatgccaagaagaaagcagctcatgcagccaaaactgtcaagcatggggctggggcagagatctctactgtccatccggagcagtatgctaagcgattcctggattttattaccaacatctttgcctaagagactgcctggttctctctgatgttcaaggtggtggggttctgagacacttgggggaattgtggggatattctagccaccagttctcttcttcctttgctaaattcaggctgcaggctccttccatccagataactccatcctgtcgagtaggctctttctgaccctcagaaatacattgtcctttttcctctttgcccatttttcttccctctcttcctccccatgagaagtctgcttgtagtattagaatgttattgttgactctctcccaagtgccttgatctttgtaatatctcctgttgtttctatgatataggagctaggggaagggggttgcttgccttcttcaggacctgactggacagatggacctggctcaagcaactactc

SEQ ID NO: 64598 - DNA, 1582 bp, Homo sapiens
gtggtgtcgtacatgacacaatgacgtgtttcgggccatatcctattggaactggacttcagggaataaccttgtgttatagttgttttccctccttctgcaagatgaaaagcaggatgtgcatggctatcagcatttgtcagacgctttccatgttgagttttgtggtctgtgctttcaggtacaggcatatgttcaaaaggggttggccaatgggtacatgttgtttgtttctgcccacagctgccccagtgctcagctgtgaagctgcaacacagactgaaaggagactggatctggctgcagtgactctgaggagaggcttgagatctagagcttcgcgatgcagaccgcggtctttgatagattacaaatcctacatggacaccaagctgctggtggcgaggttcctggagcagtcctcttgtaccatgaccccagacatccatgaacttgtagaaaacattaaatctgttttgaaatctgatgaggagcacatggaggaagccatcacaagtgccagttttctagaacagataatggccccattgcagcccagcacatccagggcccacaagctgccctcgcggagacagcctggcctgctgcacctccagagctgcggcgaccttcacaccttcacaccagcggggaggccccgagccgagaggaggccccggcgagtggaggctgagcggccacacagcctcattggggtcatccgagagactgtcctgtgaaccctggaagacagaaggccactccaaggggaaggatccctctcctctctgccatttcttggctgggagctgtggtccacctcaaaaaaaaggagcactctggaggacacgttttcccacctgttggctcccgtgtctgctgactgagggcattcaggagtaaatgcacaggtcggtccaggcccgtctgggtttgggatgcactgagttggaggttatgaaagctttgatcctcttcttcctctgctgggcctcgcagcattcccaagggtcacatgccctggcatgggcagaaactgggctaatgattctttgcccacttcacccctcgtgtctctctttgttgctaagttctttccctcttggaaggacagatctgccgggctgctatttatagttgcctttggcctttcactgctctgcgatttggcaggaaataaggcgattaaccctatgtgtccacaagcctcaagccttgtttcaggtcaccctcaaatcacactctctttaggcaaaacaggaaacttcttaagtgacaaattttaatgccagacatttaaggagaggattattgttgattccatttactcatgcttgcaaaactagagacccctaaggcagaactgagaataaacatgtttactttgggccactgggcttgatgtgtaatatttgttattacatgtatccttcgggctgtatcgttcattcagcaagcacttggctggatggcttcatggagctgccttctcatgggatcgcggacaataaatcaataaagtaattacagattggggattattgctaaaaagagcaataggtggttagagggaattccacca

SEQ ID NO: 64599 - DNA, 1752 bp, Homo sapiens
  misc_feature (1)...(1752): n = a,t,c or g
ttttttttttttcgttgaaaaccaataatttatcaaaacgctgcgtgtgtatgtgggggggagggtgtcgcaacagacagggcagcggtgggcggacgcacaggcaggagacggtgcccggagagtgggggcggcagcttgccactggctggccatgcgggcgggcaggctagacattcttgccgcgcaggcgcagttcgtggcgtcgcaggtggttgtagagcgactgcacataggtgaagacacacttggggtcaggcttcttgcccatgatcatcatgtcgtccacctccaccaggggcacacagtccaccagcatccgtggggccccgagcaggggttaggactttttggtttttaccagccccttctggaccagacagcggtagaattcctggatgtacgtgtacacgcacttccagtcaggctctcgaagccgcaccatgtcctctgtatccaggagctgcgggcagtccgcatgggtctccgcagatgagaaggccacctcgaagttctggcgtcggttctgagggctaagctgcccatagtcgaaggcctcagggaagaagttgtgcaccagggcacagaaggccatcccatcactccagctggaggagaagttctggatgtcgacgtgctcgtagccgcgagtcttggctcgacaccagtccagcagcatctgcttgatgctgttggcgttggggaccccgaagctggtggatcgctgcacggctgcgcggggtccgccagggctgccggccgcgccctccttctccagcttctcaatcatggccttgcgcgcctgggaggctgaggtcttgggcagactctgcgccttcatcagctctttcttcttctcggcctgccgtttctcgagcgccgccaggctgccggcccgtgggctggcctggtcctcgcggtcgaagatgctgcccatcttcttggatgaggaggaagaggagaaggtcttggtttgcatcatggtgctgccactgccattctccgagcgcctcacgaaactcgactccactgtggtggtgcgggccgtccgtgtgccatcattggagtggacgagccgctcagtcttggtaacagtgctgacagcagagccatcagctgcccgctggctgtgcctcgtggtggtctcagtggctgtgttgccgcgcccctcccctggccggccccgtgcctcctgcagccgccgttcccgctccttgtcccgctggtctctcttcctttgtcggagctcacgaagtgcagcccggatgagcttccgctcttcaaagtccgtgctctgatccagcatcttgtccaagactccttcatcctcaatagtcatcagctcctcagcgctcagagggctccgcccttctggtgctttgttcactcgggtctgctcagccccattggccacttccactgctgcagcgagaggctctgctggctctggttccatcttgatgctgcagcctcctcggctactggggggggcatggctgaagctggtgacatgagtgacactgcccagccgagccagggtcccagggctgttgacacgggtgatggtgctcttgcccccactactggtgctgagtagggtcgggggcgcccgcagccccagtgtcagttctgccctctggttgcctgtgggcagcagcacccggcaagtggaggcctggccacggccgtccttgatctcgatggtgaatgtggtcgtcgnattccacggcgttcatccgagggcgatcaatg

SEQ ID NO: 64600 - DNA, 1091 bp, Homo sapiens
atccgtccgctgaattttttggaaaaacggaaaaaaccaagtgcctttaggaaaaaaaaaggctggggcgggtggctcccccctgtgattcccgccctttgggaggcccaggaaggaggatccctggaggcccggagttcaaccagacccccgtttttagtatggcccaaaaaaaaaaaatctgtagaaaaatggaagagattggggagggaggaaagaggctgcctgggtccaggttgtgcctctgtgtgaagagacaccagcggctgccagtggggagtgcggagtaaaggcctgcgggaggagatgtccgctctcaggggctcggaagcccctcagcctcttgcctccccaacgggagacatgtaggaggccgagcaagctgggtgcccttgagagacaggcccaggcagggctgtggccacagcagccctgggggctccccagcgaggtggaggcagaagttccaggagcctgggagccacccagggcaaggagtgaccctggaagccatccagcctcctggaaagtggaagtggtttaaaaacacagtgggcttttccggttgctagtaacacatagaattacagagttcacgttttagtcccagacgggagactgaggctcgagactgaggaaggcatctgccgtccggggttggagctcctgaggaccaacacctgctcagcggctcggcccctggtctccctgagatgctcaggccggagagaagcgggatgatggttccagagcgtcctcctccaagtctccgaggccccagcggcggttcgggcaccgggagacccgcggggctctcagtggcacatccgggcggtcatttctttcagtggctccagctccttggtgtcgatgaggccgaactccttgacgaaatagtagaagtgcttgtagcaggtgttcacgtgggcctcggagcccatctgcccgatgcggtcaaagtggtggatgtagacgtgcacgaacacgcggaacagccgcaacaggatcttccgcaccgtctgcaggaagttcttgggaaacggagtgccaacgttggtggggaagaggtcctcgttgttgaagtcccgcca

SEQ ID NO: 64601 - DNA, 2014 bp, Homo sapiens
tcgacccacgcgtccggatttatgaagctgatttgcagtaccgtgtcaccctagattcactaagacaaatatcacgaagttttttctctggaactcaagagagaaaggttcaaaggaacatcacagttcgaaaatcagaatgcactaagcactccttctacatgttggacaagcatgactttcaggactctgtgagaataacgttggactttaatcttaccgatccagaaaatgggcctgttcttgatgattctctaccaaactcagtacatgaatatattccctttgccaaagattgtggaaataaggaaaaatgtatctcagacctcagcctgcatgtcgccaccactgaaaaggacctgctgattgtccgatcccagaatgataagttcaacgttagcctcacagtcaaaaatacaaaggacagtgcctataacaccaggacaatagtgcattattctccaaatctagttttttcaggaattgaggctatccaaaaagacagttgtgaatctaatcataatatcacatgtaaagttggatatcccttcctgagaagaggagagatggtaactttcaaaatattgtttcagtttaacacatcctatctcatggaaaatgtgaccatttatttaagtgcaacaagtgacagcgaagaacctcctgaaaccctttctgataatgtagtaaacatttctatcccggtaaaatatgaagttggactacagttttacagctctgcaagtgaataccacatttcaattgctgccaatgagacagtccctgaagttattaattctactgaggacattggaaatgaaattaatatcttctacttgattagaaaaagtggatcttttccaatgccagagcttaagctgtcaatttcattccccaatatgacatcaaatggttaccctgtgctgtacccaactggattgtcatcttctgagaatgcaaactgcagaccccatatctttgaggatcctttcagtatcaactctggaaagaaaatgactacatcaactgaccatctcaaacgaggcacaattctggactgcaatacatgtaaatttgctaccatcacatgtaatctcacttcttctgacatcagccaagtcaatgtttcgcttatcttgtggaaaccaacttttataaaatcatatttttccagcttaaatcttactataaggggaggacttcggagtgaaaatgcatctctggttttaagtagcagcaatcaaaaaagagagcttgctattcaaatatccaaagatgggctaccgggcagagtgccattatgggtcatcctgctgagtgcttttgccggattgttgctgttaatgctgctcattttagcactgtggaagattggattcttcaaaagaccactgaaaaagaaaatggagaaatgaaatattttacgaaagaaaataataacaattattcaataatctatcctcaggtttgcctcaaatatgtgacaagaaatgtataattcatgacatagtcatgtaactatgtaatccatcagggattcattacttggaaaatgacagggcatgcattatccaaaaacaataccaaaaagacatattttataaaatgacaaaaaatattttacataattactcatttttgttgagtaagcaaaattacaaagtgtttttaaaaaaacctgtacaaatatgtttatgtattaaatcaccatccaaaatatttaaggaatatataaaaagatttttatgatcatagaaacatctattttcaaaacaatataaattaagcttttccccttgattcctgttggatatccatgttcagcatgacagtcagcactcgtaaatgccaagaaaagaattacctgaaaaagatcatttctccctattcaaatgagaatattttccctcggtagaatccatatacaatatggattgaaaattaagtcacgaagaatacatttagcatctttgtgttgggttctatacctaaaaattttccctcccggcccaag

SEQ ID NO: 64602 - DNA, 1291 bp, Homo sapiens
ttttttttttttcccagtttcaggtatgtctttattagcagtgtgaaaatgaactaatacagactggaagccttgtgacaggaaaactgaacatctgagacatctataggaaaaaaagatctgcttacatccagtccttggagttccagtagactgatttattcaccaacagcattgctcctccagctccattccaggagacaggcaccccagaagtagcaggactggtagacatcactagtattgtatatgtgttgggccatgtttgtgtgttgaggaagaggatggggaaaacaatgatggtggtcaccaggtaagatggggacccaggaagggattgcaagtccaggccccatgaacacccccaaagaatgcccctcctcttggaaataaaagtgggtcttggatccagggagatcaacagttgcaaggctgatattaagagttgtctattggatctgttctaagggatatgttatgtgaagccaaattaatgaagttaggaagtcacattacaagttgatgggtactttgtttcatcaacttgtagaatttcttccttttgaacctctttactgggtgttagctggtgacttaggggtagggatgtggaggctgtcataggcccgtctccgctcttgggcctgaagggaatcctatgtatgcggcagtatacaaagtatgcagggatggggaggatgacaatggcaaaaagggtgatcatcaagagcagtgcccacggtgggtatggtcgaagcacctcttttgaggtgcttgagtcccaggacatgtaggtgatcggcttcatacaaagatgaaccatcatggtcacaaagatgattagcagcacaactggacacagatggggccacagccaaccaaagatgggagagatggggtggcccaacaggatcgtcaggtctgcaaggaacctggagaagggccaccagagtgtgggatgcccagttaggcctcaccaccttggaggcagggccagcccaaccttggcatctttcaaacattctattgtatctctaatctcctgtttcatctcaagtcttgtcctctctcatcttccccctagtcagtctgtcttctatcctaacccaagaaacttttccaaacacccctctcctgctcaagaactttccatgggtatccaatggcctcaggagaaaggccaagtctctttcattcatcccataaatatgagaatgtctatgatgtgccaggaactcttttaagtgctggatatccagcagtgaacaacacagataaaataaagtggcat

SEQ ID NO: 64603 - DNA, 1736 bp, Homo sapiens
gtgcgaggaattcggcgatcaaggtatttgtggaatcgatgaatttgataagatggggaatcaacatcaagccttgttggaagccatggagcagcaaagtattagtcttgctaaggctggtgtggtttgtagccttcctgcaagaacttccattattgctgctgcaaatccagttggaggacattacaataaagccaaaacagtttctgagaatttaaaaatggggagtgcactactatccagatttgatttggtctttatcctgttagatactccaaatgagcatcatgatcacttactctctgaacatgtgattgcaataagagctggaaagcagagaaccattagcagtgccacagtagctcgtatgaatagtcaagattcaaatacttccgtacttgaagtagtttctgagaagccattatcagaaagactaaaggtggttcctggagaaacaatagatcccattccccaccagctattgagaaagtacattggctatgctcggcagtatgtgtacccaaggctatccacagaagctgctcgagttcttcaagatttttaccttgagctccggaaacagagccagaggttaaatagctcaccaatcactaccaggcagctggaatctttgattcgtctgacagaggcacgagcaaggttggaattgagagaggaagcaaccaaagaagacgctgaggatatagtggaaattatgaaatatagcatgctaggaacttactctgatgaatttgggaacctagattttgagcgatcccagcatggttctggaatgagcaacaggtcaacagcgaaaagatttatttctgctctcaacaacgttgctgaaagaacttataataatatatttcaatttcatcaacttcggcagattgccaaagaactaaacattcaggttgctgattttgaaaattttattggatcactaaatgaccagggttacctcttgaaaaaaggcccaaaagtttaccagcttcaaactatgtaaaaggacttcaccaagttagggcctcctgggtttattgcagattaaagccatctcagtgaagatatgcgtgcacgcacagacagacagacacacacacacacacacacacacacacacacacacacacacacacacagtcaaatactgttctctgaaaaatgatgtcccaaaagtattataataggaaaaaagcattatatataataaactaatttaagaagtgataaagtctccagatgcagtagctcacactgtaatcacagtgactcaggaggctgaggtgagaggattccttgaggccagggttcgagaccaaccttgggcaacatggcaagaccccatttcttaaattagtttattatatttaatgcttttttcctattataatacttttgggacatcatttttcagagaacagtatttgactgtgtgtgtgtgtgtgtgtgtgtgtgtgtgtgtgtctgtctgtctgtgcgtgcacgcataatcttcactgagatggctttaatctgcaataaacccaggaggccctaacttggtgaagtccttttacatagtttgaagctggtaaacttttgggccttttttcaacgaggtaaccctggtcatttagtgatccaataaaattttcaaaatcagcaacctgaatgtttagttctttggcaatctgccgaagttgatgaaattgaaatatattattataagttctttcagcaacgttggtcga

SEQ ID NO: 64604 - DNA, 2291 bp, Homo sapiens
gagatacccgtgtaggcctttttgcactaagtgacattaaagtaggcactgaacttaccttcaactacaacctagaatgtcttgggaatggaaagactgtttgcaaatgtggagccccgaactgcagtggcttcttgggtgtaaggccaaagaatcaacccattgccacggaagaaaagtcaaagaaattcaagaagaagcaacagggaaagcgcaggacccagggtgaaatcacaaaggagcgagaagatgagtgttttagttgtggggatgctggccagctcgtctcctgcaagaaaccaggctgcccaaaagtttaccacgcagactgtctcaatctgaccaagcgaccagcatggaaatgggaatgtccgtggcatcagtgtgacatctgcgggaaggaagcagcctccttctgtgagatgtgccccagctccttttgtaagcagcatcgagaagggatgcttttcatttccaaactggatgggcgtctgtcttgtactgagcatgacccctgtgggcccaatcctctggaacctggggagatccgtgagtatgtgcctcccccagtaccgctgcctccagggccaagcactcacctggcagagcaatcaacaggaatggctgctcaggcacccaaaatgtcagataaacctcctgctgacaccaaccagatgctgtcgctctccaaaaaagctctggcagggacttgtcagaggccactgctacctgaaagacctcttgagagaactgactccaggccccagcctttagataaggtcagagacctcgctgggtcagggaccaaatcccaatccttggtttccagccagaggccactggacaggccaccagcagtggcaggaccaagaccccagctaagcgacaaaccctctccagtgaccagcccaagctcctcaccctcagtcaggtcccaaccactggaaagacctctggggacggctgacccaaggctggataaatccataggtgctgccagcccaaggccccagtcactggagaaaacctcagttcccactggcctgagacttccgccgccagacagactgctcattactagcagtcccaaaccccagacttcagacaggcctactgacaaaccccatgcctctttgtcccagagactcccacctcctgagaaagtactatcagctgtggtccagacccttgtagctaaagaaaaagcactgaggcctgtggaccagaatactcagtcaaaaaatagagctgctttggtgatggatctcatagacctaactcctcgccagaaggagcgggcagcttcacctcatcaggtcacaccacaggctgatgagaagatgccagtgttggagtcaagttcatggcctgccagcaaaggtctggggcatatgccgagagctgttgagaaaggctgtgtgtcagatcctcttcagacatctgggaaagcagcagccccttcagaggacccctggcaagctgttaaatcactcacccaggccagacttctttctcagcctcctgccaaggcctttttatatgagccaacaactcatgcctcaggaagagcttctgcaggggctgagcagaccccagggcctcttagccaatccccgggcctggtgaagcaggcgaagcagatggtcggaggccagcaactacctgcacttgccgccaagagtgggcaatcttttaggtctctcgggaaggccccagcctccctccccactgaagaaaagaagttggtaaccacagagcaaagtccctgggccctgggaaaagcctcatcacgggcagggctctggcccatagtggctggacagacactggcacagtcttgctggtctgctgggagcacacagacattggcacagacttgctggtctcttggaagagggcaagaccccaaaccagagcaaaatacacttccagctcttaaccaggctccttccagtcacaagtgtgcagaatcagaacagaagtagtaccaatcaatgtcacatgaacaaacaagctgcccccagggtaccatttggggaggggaaatcttttctttctttcccccttaaaaaaaaacacatctgccccgaacactttcccactgttattctttcctcatatcccaacactcagaactcttgtgacattagccagtgggggcttatggttgtgtgaaccatgtatgaaaatccagtgggccccaaccaaggagacagacagacttgggtctctttcccccaacttttccacatggtcatcgtgaaataaaaagtcccctctggaaaaaaaaa

SEQ ID NO: 64605 - DNA, 857 bp, Homo sapiens
ttttttttttttctggacatcttccattttatagaaagggaaattgaggccaggggttggggaggcctggcaaggaacatggtgcatggtaggtggcagaagggacctctgtgctcagagctgtgcctcaggacccatcgttcagatgggaagactgaggttggggaggtgtgtcttgggttaggaagctgggctcggggcaggggtcagcgcgggcatggcaggcacggtgaatgtgaacttctcagtctggacaaaggcaacgcccttctcatagtaggcagcctcgttaatgaacacggggtacaccgtggactctccctcatagagcaggtcctccccactgaacatctggaagatgggagcaccaggctgcagtggctggaagtctcggtcctgcagctgaggatgcacagtgcctgccaggtgcccggcctcggtgcgggggaagtccacgacgcccacgggtctataggcttccatctcaaaggcaggaaaggccgtaccctggttgaagagttcgatgaagtccagaactgtggccaccagggtcctcatccttgagaaaatgtcagcccgcagcacaccctgtggctgggggcccagctccagacccagtccatttttggccacagagtccaggttgtagctctcctccccagaccgctggtacaggaagacctggcaggacagctcggggtactgcagctgcagatggcggcacaggtgcatggcaaagacttcgtgggaggacttcgcgattaagcaggtgcccatgttggccgtggtgttgtgcaggtcaaggacaaagtcaaaggcctggcccgaggccttgggccccagcagctggttcagct

SEQ ID NO: 64606 - DNA, 1598 bp, Homo sapiens
tcgacccacgcgtccgcccacgcgtccgaaaaaaaaaaatgttgatcctgtcttggtccccctgggatccgtcttttctgacgtttgccgctgtctcccctcatcccccaggttgctagttaattctctcccctcgtgcctgcaccctgctgccctagctagcctggccacctcactgccgtgtcctgcatcaggccagccacagagtcctacaggtccggggcttgcttgtgggaacggcttgttcttctagactctgggggcgggggcttgggtgtgtttccttacttgtaaaaggtcctgttgtttttgggagcagggagtaatggcggatgagacgctgtgtggaggcggcagctcctggtatggggtaacgccctgtcccctcattggcaggtggtttgcatgaagcatcaggccagagggtgtgagtgccaagccctcaccccacatgctgctcctgttaaaagcaaactccactgacccccccgggaagtcaggatttgggatttacttcctggaatgcttgcctctggctgctgggaattggggcctttccccaaagcctgaaccaggcctcacagtggccatcaggcacagaatggatgggcacagctgagtggctccactggctttaatctgccccacctcttccacaccaacctccaccctctggttccgatgtgcttggttacaaagcacctgattatttaagagaacgaaaaaccaccaccagttcctgtaaagaataagtcacaggtgcacaggtgaagggctgagttgtggtccagccccagggagtgtgggctgtgaggcaggagcgagctaaacctgtaggagcagcgccacggctgccaggatccacttcgctgccttctctttggtcttcaagttaaaggtccagacataggtggggccgcggatgcgtgttttgtacacgggacactcatagatgttcttggtctccatgcggtccacaggaatggccttgatgaagatgacaggcatggccggggtcagctctttcagccgcgcttcagcgatgactccagtctgggtgtcccagcgagcccctgcagggacagtatggctgagggtcaggtgtgctgccagtaagtgagggaggggctggcaggaagggtggggtcctcacactccccgccctctgcagagctgggctctaccccaaaaggcttcaggccagctgccacagctggaagcagaggccttcgtaggtgatggcctgcatgttgtaactaccccgtcccgctgggctcaaggaacagctcagctaaagccctcgggttccatccgtttaaatctgtggcattttcagagcctcatctgtcagccttaatgtcagtggcaggaagtcataactccagctaaaaattacagagtaaagttccctgattcttaatgtgtaatgtctgccctatgtgtacatacacaatataattatacatctgtgcatataaatattgcctttaaccagactgctattatttctactcgccctatttaatggtgtttttatttcctgtctgaaatctcaaaataaacaaacatggagagcttaaaaaaagtcgacgcggccg

SEQ ID NO: 64607 - DNA, 1925 bp, Homo sapiens
atcgtgtggcattacaggagtcctccacttgccactggttatagatatggacacagtaagagtcctcatttcagagagaagagcccagtcagggagccagttgataatctgagtcctgaggagcgtgatgcccgcacagttttctgtatgcagttagctgcccgaattcggcctcgagatctggaggactttttctctgctgtaggcaaggttcgcgatgtacgtatcatttcagatcggaactcacgtcgttctaagggcattgcctacgtggaattctgtgaaatccagtctgtgccactggccattgggctgactgggcagcggttgctgggagtgcctatcattgtacaggcttcacaggcagagaaaaaccgactggcagccatggccaacaacctgcaaaagggcaatggtggaccaatgcgcctctatgtgggttccctgcacttcaatatcactgaagacatgctccggggcatctttgagccctttggtaaaattgataatattgtcctgatgaaggactcagatacaggccgctctaaaggttatggtttcatcacgttctctgattctgagtgtgcccggcgggccctggaacagttgaatgggtttgagcttgctggtcgacctatgagggttggccatgtgactgagcgactggatggtggcacagacatcacttttcctgatggggaccaggagctggatctgggatcagcaggtggacgttttcagctcatggcaaaactggcagaaggcgctggaatccaactgccaagcactgctgctgctgctgctgccgccgccgccgcccaggctgctgccttgcaactgaatggagcagttcccttgggggccctgaatccagcagctctgactgctctgagtccagccctgaaccttgcctcccagtgtttgcagctctccagcctctttaccccccagaccatgtaaatcagtggcacagtatactgcctccttgtgcctctggatcctgccacttcacatctactcttccatggccccatttctccattttgtggaccaagccatcctgagggcatggacattgtctctgaggaaattggggccacccttaagataccaagaaaagctcctgcccatggtcccactggaaatggactctgctgagcaaagccaccagttgaagagaacagaatccacacctgcattgaatacctgtttctccatgtgtatcgtctctgagattaccttcttgccctttccaacaccttagtgattcctcaatttctcccccattgggaaggccatagggcattaactgaaggaactgacctctctccttttcctgtacctttaacctttagtctgtcaaggaaaacccttaggacctctgaatcaagaggactgagtttgtgggtgaaccttgaaggtgctctttctgctacaagggccctgggagatagcatggacgtgcattgagaagccagcctcagaccttagcttgaagcagcttgaggccagacctactgtagcctcagcatcttgctaggaggcatggaagtgatctatcctgccaggaggcctcagagtgatctgtcctgccaggaggtgtgagagtgatctgtcctgtgaggcatttaggggctttcaggaatttagtaaaaggtggagtatgcctttccagtatcttccatcttcctttgtatacttggccttcctcccatttcctccctttggcccgaggtaggaggatggagggaggctgctactctaccacttcctgtgtgcctctactgtggcctcaaccctggcaattatagctactcccatcccttacctgggcatgtgtgagcccttctcactggattttatacccttgtgtctgtgtacataaatatatatacatatatatatacataaaaactttgtacaaa

SEQ ID NO: 64608 - DNA, 990 bp, Homo sapiens
tcagatgacagtaaacctcagagttgttataaattaaatggatataatgtgtgtaaagcacttagcataatgctttatacatcgtagaactttcaaaaataggagtagtaattattacaaagaaatgtgaagaagagtcctagtgggctgcatgttaaaaatagtttttagttaatgaaaattaaatcacatcttagatgtttatcatctgcatggtacttttctggttgctgctttaacctttgtatagttgaaaggctgtaaactttctagtattctttgatttctggcccatttccctcctaccattcacgcttatattttttggttcaagtcaccattccttgcaaaactaattaaatacattcctaaatacataatattgccaatattcattcacatccaccacgtctagatccaagtcttcatcttctttatgctggtctaatttttgctgagccttagaagcaaagacagactccgggggttgatatgggacctccagaatggggattgcacagaataatcttatttttcctctattcttctaggctgttatgttctgaacccacacatgttttcggaaggaccagatggctgacactggctaatgggaaccaaaagacgagtgaaagtaacctgggttgtcacatacccccagcttagaggtgcttcaccctgccccaaggtcaatttcttttttctctagagactttaccccattatatcaaaaacctttactacagcctgactttatctgatgttagagtatcattaagtcaagcagcagcatttattgagtgaaaaaagattgtacacaggactggaagagaagcatctgcctttaaaatacagtagaaggccgggcatggtggctcatgcctgtaattctagcactttgggaggccaaggcaggtggattgcctgagctcaggagttcgagaccaccctgggcaacatggtgaaaccctgtctctcctaaaaaaaaaa

SEQ ID NO: 64609 - DNA, 916 bp, Homo sapiens
ctgtggcggaattcgaacgcgggagaaggacgttgcagtgagccgagaacgcaccactgcactccagcctgggcgacaaatgacactccatctcaaaacataaaaatataaaaaatgtttggctttggaaaccatgccctgctgcttaacctactgcgtcctggggcaggttccttgtcatctctaagctgcagttttctcatcttcgaaatagttctaagcccccctatggctcttttgggtttcagagtttgtaatatagcgcctttattctccacacagagcaggcactcacaactctccttttccactgtcctctcttccctggtctctgatctctcgagccatcctaattcctggaccccttgcagtgtcttgcccagcttgggttccccagcactgtcctccacctcctggccacagccctatgcacctgcagcggggcccactgggcaggtgctggcactggcctccatggtcacagtagcccctactgcacggggacacgcaggtgaagccgctctgggggctgtagaccaggtcgtagcccttgtagccatcgcatctgaagtaagccttcagcgtgctcacgttcactgtcgggaaggacacagattaacacagaaagcaaccgatgaacactaaatcagtaccttttcagccacgaattccttttcgggtgtttatcctgagaaataattggagaagtgcacagatacatatgcccctggacgttcagatcagcgtggtggataatagtaacgtttcagaagtagggtctggttaaataaactactgcacatccttaccaagggatggtgcttcctagggaaaaagtttcctagggaaaaaggttcctgtggaaaaaggttcctatggaaaatgctttcctgaagagcacatgctttgaaggtgg

SEQ ID NO: 64610 - DNA, 1404 bp, Homo sapiens
cggcttccatgatggctgaggaaacgcgcaatcccctgaggaacaaagacttccaggaggtgacactggagaaggagggccaggtgctgctgcacttcgcaatggcgtacggcttccgcaacatccagaacctggtgcagaggctcaaacgagggcgctgcccctaccactacgtggaggtcatggcctgcccctcaggctgcctgaacggcgggggccagctccaggccccagacaggcccagcagagagctcctccagcacgtggagagactgtacggcatggtccgggctgaggcgcccgaggacgcgcctggggttcaggagctgtacacacactggctgcagggcacggactcggagtgtgcaggtcgcttgctgcatacgcagtaccacgccgtggagaaggccagcactggcctgggcatccggtggtaggggctgcaggaccaggactcccaggaggccgtgtccatgtgtgacagcagaaccacatgccccaagaccccagggctccccccaaaattctgagtgagctgcagggtgtgctgggacccgagtaggagctaggactagccaggacccgcagccgcctcgtcacctccagttgggtgcctctgggttcccactggctctgcccaggtggggtggggtggcccaggcagcagaaggttccctgaggtcccagagcctgttccgttggccctgggccgaggcccacaggtgctgcccttgctgctgctggtcgggcacccaagtgcgtgaggggcttcagcctgtcccggggttgcctgaggcagagcaagacgggttctcacccctgacttctggaggcttcccttgaagctctgtgcaaaaggtgggagacagagctggacctgcaggggtggtcccgccacaaccctgcgtgtggaccctggcaggggggggtgccaggcccctggaaagcaggggttaccgttacgaggctgtggtccggggcaagccaagtacgaagcagcagccatcgcgggctgcatcatcccccagccaggtccccaccaggcctgtctcccagcgtttgtctaataaacgcacccctcctaaaacacgcaaaaaaaaaaaaaagggggggccgttttaaagaacccttggggggcccaaattttacccgggcttgcaaggtaaaatttttttccttatggggggcctttttaaaacctacttgggaattttgggaaagaaccttttttttgggggggggacatattgggccaacctccctacaaaaattaaaggctttagggaaaataaaaatttttaaagggtaaagggggtaaaacaacctgcatttccttgctgttgaaaagttttttttccgggttttaatttaaaaaaattttttccccgggggggggttggtttt

SEQ ID NO: 64611 - DNA, 3149 bp, Homo sapiens
  misc_feature (1)...(3149): n = a,t,c or g
caccagctccggttttggagccaccacctataccgccagcagcgggagcagcagctcggtgttgggcagcacaacaccatcacccttcacgtttgggggttcggcagcccccgctggcagtgggagctttgggatcaatgtggccaccccaggctccagcaccaccaccggagctttcagctttggagcaggacagagtgggagcacagccacctccacccccttcgcagggggcttaggtcaaaacgccctgggcaccaccggccagagcacaccgtttgccttcaacgtgagcagcacaactgagagcaaacctgtgtttggaggcaccgccacccccacctttggtctgaacacccctgcgcctggagtgggcacatcaggcagcagcctctcctttggggcatcctcagcacccgcccaaggctttgttggtgttgcacctttcggatcggcggccctttcattttccattggtgcgggatccaagaccccaggggctcgacagcgactgcaggcccgaaggcagcacacccgcaaaaagtagcctttgtcccctgtccctgttccccccaccccttccctaaatctggaccttggcacctgctaggaagagccttggacccttccagttgcgtaaagcaaacctaccccggatctctggcttcagccgccagggggcagtggcagccctggggccctttcccttctggaggaagcacaagcctcagggaaggggaagcaggatgcggagggccaaagcccgggacctctacttgaacagttctactggggaggctggagaactaaggaaacacctgtacatagtgtccgctgccctgactcccgcttagcacacccttaggcaggcgccccttccacctttccccgagaccgtcgtcgctggagggggcagggtccagcccgcctggatcggtggtgtgcacctgatgggatttgggaaatgggctatccgtaaagctttatcttgcttggcttagctgtgagaagtggttctcttcctctggtcccttctggggactctgtttccccatttcttgctgctgtgtccctcaccagttccttgcaggattccctcctttttaaatgcccttgaatctagctttgccttggagaccccagtgggtgctgctcctgccgttttcttcctgccaagcctgaatcaatgtttcatctccaaccctctgccagtttggcccctcagagcttggtggctcaagactgttagcctggcagagccaggggtgaagggagaagctcttggagcaggcaggatgcccaccgctgcttcagctgcctcctcgcccagctaccctttggccccattgggccctcgtctgcctctccaggattgtatgtttcaagccttgtcctgtgttcctttgtctgacgctctgtgtattgctctttgaatcgagtttggaggaagagttgagttgtatgagtggcggcatgttggtagtgccggacttcctgtttcaagttttctggggcctcgctaattgaatgtggaaagtagcaccacttgacggctacaagtgccgactcctgaattttcccatggtgttctgacttcaagggctggcagccagggagaatgggcccaggggaagcaaagacctcttccctctgccgtttctgtcccacttaactgacctcactggaggctacatcacccaaagtagatgttagaaaacctaaattaatgaaccatatttttaaaatcctatttttcccaaacagggccctctgcagcccatcctttccttccgtccttctgaaaccacataccccaggcccaagcgccttgctgccacgcccaacctctttgggagaagtatgaatgcgtgtgtctaaattaaaagaaaaaaatatttaaacgttttttaacaaaaatttatttttgtatttaagctaaattgccttttaaattccttcaagcttggttcattgaggtggttaagtataaatgctattaactaggaattagctgtatagttaagttatgcctgtgcaaagaagaggctcaaatgctgtccccggcagctttcctgggggactagagctccttctggccatgttatatgaaatgtaattcttattttataaataatgtgatgtaaatgtaactggtgccccctccccgatgtgactgagggtgagtgagtggtggcggggctgctccttcccacccctcagaacagctctgatcctcgttaatacctggctgcgtgtgcagctgaggagggagtgaacctcaagcctaaatacctgttaggattggagggtctgggtgggcctgggcctagcaatcaagcttctacctgtaccttatgtaaggtagaccctcctagtgtcagtacctgagctagtttacctcagttccgcaggcaggacagccggtccgggaaccctgagtgagaatgagtgtggatgtgtacagtacacgcactggacggcagcgggaggctgggactttccattacaaatagagacttcattcctgttgagtctagttggaatttttagtatgaatgtgagatttttctcctgcttgtgacattaagaataaaaaactgtgatctatcgtagagtacgttctgcattttatttctgcaggcaacacttttgctcaccagcaagaacacagcccgaggaagggacccaataacctttcaaaacagcaaactgctgcctgcggtgagggcccagggtcctccacggagaggacaggcatcttccttttccaccaggaaggagtgagcccggagcctctgctatgtgcaaggcggtgtgcaagcaccggctgcagctttttgctctcttctttctctttggggcctgggctgggtgtgcgttctggtgctgatgctttggcctgtgaggctgagtcacgtcggcaacttggacccgttcaattacagcaacgaagaagccaccgctaagcgtgggtcttcgggggaagcccggaggcagtgctcggcacccggtaacgtgctcaggcctcggtggggccgcgcaggcagggcgggagctagcctgaaggcgcccgggttctgctgcagcgcatcttgtaccatgtcttcattctcctnctggcagagggagcacatggagtagacgagccg

SEQ ID NO: 64612 - DNA, 2169 bp, Homo sapiens
ttttttttttttgatattttaacaaacgttccctttattaggtttactgactattatcaacccatccataaaatagaacgggagtttcaaaactgtacaagccacaaggctctgggctggtaggaaagaagggtggggtcgagggtcccagggtgtcggggggtgggagatgcagagagagctagagggtcacccggcatctgtgaggacggctgggtcaaggccataagctgggatctgtacaagggaaacattcatcagaatgtgacccacctgaaacaggagggaggaaaatctttaaaaagtcttacaggtaaggtcccctgcccccgaaaaaaaaaaccgtcaaaataataagggggtaatgtacatttctcacccagtcttggcaccaatttttgtgctttaaaaaatatactccactgtaagatttacttaaaaaaaggtactctacagcagctgtttaaaacataattcttacagacaaatatatatatatgtatgtatatatattaaacattttaaacaaataaagtcatctattgtacctgtgcagaaatgaaccaaagttagactctaagagagttaacttcaagctcaaagaaatggcaaaggcggtggcaggtgctggggtacgctacgtggaggggttgccagggatagggcacccctctcttccggcagccgagctacccctcttgaggctctgagaggggttgggatgaactggggctgttaccctgggtccagagccccggctggggtgctgagcagagacccgcgctggcttctgtgaggctcgactctgctcctggtcttccccatcccaccctgcccctggcttctcggggaatggagacccactcgccctcccttcttagttctgggggtcctctggcacacccagagcttctgaggatgcccttgggaaatctcagctagaaaagcaaaagcaaaatcaaaaccccacatcaaaagaccccacagaagactaaagaaatgcaaccctgtgcaagggtgcctgagcccaagagttagctggttacctggagacacaggggaattgctgcagcccttccagacgggcccccgaagacacccagattgcacgtgaggctatttctccctgaggggcccgctagggaacttggagcagagccccctggaaactgcagggcaagggacccagagacatacttgtgcctgggcacgtgtgcacatgtgcccagggagggcgggcgaggcatacatatcccagggagggcacaggtggaaggaaagtaacagaacagccagagagaggggactgaaacagggtttcctttctagatggaataaataaatggcttttgttattgttaaaagaataaatacagggtacggggcaccggcagccaggatgggtgctgggtgcttatttgcctgcagacagttcttggtttctgccttggggtccatggtgagtttttgacgtcctgagctttatctgtgtcttttttcaaagaggggttgtatatggacggcatgcagggatgctgccttccgctgatgtcgggaagggggaaagaggagcctgtgttggaatcggtccttgtcccatggaggcagccacggaggatgagggaagaccagggacctctgtccatggctacggatgccggtccaaggtgcagggtgcggcggccccagcggcaggcggctcagtgagttggcaccaggtggctgtcgcgctggcggtatgatggcgaacgtcactggtagaggaggtaggccttgagggaagccggcagcggcagcgtgtggatctcccccaggcgctccctccccagggccaggcgcaccgagcgacggcacaaatccatgagcggcagcggctcgggatcgagtccgttcaagtagcgcattcggatctcacagtggccccagacggcactcactacaggatacagttttttgcccttgagtccccgaaaagccactcccatgtactgtccatccacaatgaagctcagagtcccgtcgtccatgtccagggctaccaggaaggagtcagggacaatgaatgtctcatctggttccagaaaggctgggtatgttttgcttggctggttcttgccatcgtggtagagccggttgcgccccaactcgtgccgaattcctgcaggcggg

SEQ ID NO: 64613 - DNA, 1322 bp, Homo sapiens
ttttttttttttgggtggtgaaggagtggatttattggagcacaaggcagtgaagcagcaaaagtgaaagtacattccacagggtgggagtgggctagagcaagtggctcaagagccctggtagcaaaatcttctggggcttaagtaccctgtagaggtttcttgatggttacaccctatgtaaatgaaagactgactcacagccaattagagactgaggtgaattggctcacagccaatccaagactggtgtggtttgactccttatgcaaatgaatgtcctggaatgaaccaatcattggccagagtgcaggtctggcccatggccaatcagaggctgatgtggtttgataccttatgcaaatgaaggtcctggaatggaccaatcacaggccagtgttcagactcttcagtgccagggagtgtgtccaagtcatccttagatccctatctctgtaccctattctcctgcctcagtcttgtgtgagattttgcaccctttgaccatcatcatcatctccccattcccccaatctctccctcaactacttctaaccactattcattaatctcttgtattatttaggtgtaaggaagaacagaaggatccaagtgtgagaaagcccaccctgagtctctcagaggtgattatgactgtgtgagcatgggtgagacaaatcctctgttgttgttgatggctacttgaagtgcttcctccattctttccattgtagaatacttagggagggagagaatattatgacaagttattgatgttgggtgatctctttcactgaaagtttcaggacagcgaaatactatttccattttctgtatgcctcttgcatgcagcctatcacgtcctgtaaggaaaaagaggaattttttcttttcatccaaggttagtttgtggaaagccttccaaaacaactgtatagtaggatgtgatttttggtatccttgctcatactttgaattctgttcaaactgtttccagtcataatcagtatttccaatgattgctgtcattagttcttcagggtagaaatgtctaagtatctccttctcacagactctataaaatcctctctgaaattcctcataaactgcttttacagagacgttgaaaatgtaatcaatatacttagaaacatagtctctcttgttggtttggtccacaggtatggagatcccatttggaattaagtcaacatcattttggtcccagtgtatagaaaagcgtatgcagagcgcatctccaatgtcatcagcagcatcatctagaacttcttgcaaactcttccccaaccgaggactgagtt

SEQ ID NO: 64614 - DNA, 1734 bp, Homo sapiens
ggtgccatggcggcagcggcggtgacaggtcaccggtctgagaccgcggaggacgaggaggcctcgaggccgcagtgggcgccgccagaccactgccaggctcaggcggcggccgtgctgggcgacggcgaggacgcaccggtgcgtccgctgtgcaagccccgcggcatctgctcgcgcgcctacttcctggtgctgatggtgttcgtgcacctgtacctgggtaacgtgctggcgctgctgctcttcgtgcactacagcaacggcgacgaaagcagcgatcccgggccccaacaccgtgcccagggccccgggcccgagcccaccttaggtcccctcacccggctggagggcatcaaggtggggcacgagcgtaaggtccagctggtcaccgacagggatcacttcatccgaaccctcagcctcaagccgctgctcttcgaaatccccggcttcctgactgatgaagagtgtcggctcatcatccatctggcgcagatgaaggggttacagcgcagccagatcctgcctactgaagagtatgaagaggcaatgagcactatgcaggtcagccagctggacctcttccggctgctggaccagaaccgtgatgggcaccttcagctccgtgaggttctggcccagactcgcctgggaaatggatggtggatgactccagagagcattcaggagatgtacgccgcgatcaaggctgaccctgatggtgacggagtgctgagtctgcaggagttctccaacatggaccttcgggacttccacaagtacatgaggagccacaaggcagagtccagtgagctggtgcggaacagccaccatacctggctctaccagggtgagggtgcccaccacatcatgcgtgccatccgccagagggtgctgcgcctcactcgcctgtcgcctgagatcgtggagctcagcgagccgctgcaggttgttcgatatggtgaggggggccactaccatgcccacgtggacagtgggcctgtgtacccagagaccatctgctcccataccaagctggtagccaacgagtctgtacccttcgagacctcctgccgctacatgacagtgctgttttatttgaacaacgtcactggtgggggcgagactgttttccctgtagcagataacagaacctacgatgaaatgagtctgattcaggatgacgtggacctccgtgacacacggaggcactgtgacaagggaaacctgcgtgtcaagccccaacagggcacagcagtcttctggtacaactacctgcctgatgggcaaggttgggtgggtgacgtagacaactactcgctgcacgggggctgcctggtcacgcgcggcaccaagtggattgccaacaactggattaatgtggaccccagccgagcgcggcaagcgcttgttccaaacaggagatggcccgccttgcccgagaagggggcaccgactcacagcccgagtgggctctggaccgggcctaccgcgatgcgcgcgtggaactctgagggaagagttagccccggttcccagccgcgggtcgccagttgcccaagatcaggggtccggctgtccttctgtcctgctgcagactaaaggtctggccaatgtcttgccccaccccgccagccgcgatacggcgcagttcctatattcatgttatttattgtgtactgactccatctgccccgtcaaataaaaaaccacaaggttcgaaaaaaaaaa

SEQ ID NO: 64615 - DNA, 1203 bp, Homo sapiens
ttttttttcagcttttcagaagttttattataaagagatttgagagaagcactgggcaccaagacagacactcgccagggccaggaaacagctgcaaacgacgtcaagaacccaaacccaaacgaaaccccaaaaccacacacacggtaggataagctgtaacttcgttctcaaggtttcttcataaatagacaaaagtcgtcgccggcaatttaaaatagatgaatacatgattaaaaggagagcagtgctccggggtggctagcaagcgtccggtccttgctgtgaggatgacgaaacggtttggcagccgcttttgtgcgcgtctcccttaagataaaacttaaaaatgtgctaaggatcatataaaatgctttttaccttaaagggaaactacttttttcccccacaaaatagtcttacagatggtctttcagcacaggttctaaaacacgtaggtcaactacttacacggaacccacaggtttctaggtttcgtaatcttttgttcacactggaaaaccgatggtgcacatctatgccgggggccgggccctctggcccatggcatctggggtgggtgtccgttggtaagcgaccccgccaggggcggcccacctgggctggggctggagctggggccgggtgtccagacatagggtaccgtgcgcagggcgaggacagggtccacagttaccctggagcaagcaggtcagcgggcggaaggttcctgcaggttctttgggctggtggtgggcagtgggctgcctctgcagagtctggtgggaggttgaggaagagactcagcccccgggcaatgggtgtgtcactgctctctccgatgggccaccctgcctctggccagggcctcttttctgctgtcagcccttcaggctctgagcagtgccttccagcgagcctcagggatggtagggaggcgggattaggtgaggtagagcgatttgtccctggggagcaggctgcaggtgctgatgccacactccccactggggtagctgctgtcccagtccccgctgctggtggggttggatgggccaggtgagcaggatcccgagctgctggggaactcagagatgtgcgggaagtcctgcttctgttcctctcccaggctgtcccacatggaggccacgattttggacacgtcaccgaaagtggcactggggttctgacccttgatggcgg

SEQ ID NO: 64616 - DNA, 566 bp, Homo sapiens
aagaagatcctgtgccgccttttccggatctttgtccacgtttatatccaccacttcgaccgggtcattgtgatgggtgcagaggcccatgtcaacacctgctacaaacacttctattactttgtcacagagatgaacctcatagaccgcaaggagctagagcctttgaaagaaatgacgagcaggatgtgtcactaatgctccacctcaccctttggaagaaaggaaagctgtttcctcctggtgccctgagcgggcaggaggtggaccaccctggctgaaatgacacacctactcccaggaacagcagaggtggaggcaagcagtgactcctgagagacattccccactcactttgtgtgctcttaaccttctgagtgctgctagcccagacctgtggacgaggcagaccacaacgtgaaagaaggaccagccccttgaccgttctggctggggaattgtccacgaggaagcctctgcacttccacacatggcacagttctgcctgtgacctgccgcctaagctttactggaattcaggttttgagactgagatgcgtgttcga

SEQ ID NO: 64617 - DNA, 456 bp, Homo sapiens
ataacttctcacagcctggtggcctcactgggcccctcaactactaccgaaacctcttcaggaacttccccctggaaccccaggagctgaccacacccacattgctgctgtggggggagaaggacacttacttggagctggggctggtggaagccatcggcagccgctttgtgccgggccgcttggaggcccacatcctgccaggcatagggcattggatcccacagagcaacccccaggagatgcaccagtacatgtgggccttcttgcaagacctgctggactagtggtccttgctggcctgcccaggaggcatggatactcaggaaggaacacacacccattatctgtgtgtgcctgggagtccatacaatgtccatacatgggtgaactcttgaatcgctcataggcatgggactcctggatcccacacaagcgcacctatgggtgcctcgg

SEQ ID NO: 64618 - DNA, 1257 bp, Homo sapiens
ctgcctggaggatgctgcgccattctcctaccatagcaccttcctgctggctgaccgcactgaggcgtgggtgctggagacagctgggaggctctgggctgcacagaggatccaggagggggcccgcaacatctccaaccagctgagcattggcacggacatctcggcccaacacccggagctgcggactcatgcccaggccaagggctggtgggatgggcagggtgcctttgactttgctcagatcttctccctgacccagcagcctgtgcgcatggaggctgccaaggcccgcttccaggcagggcgggagctgctgcggcaacggcaagggggcatcacggcagaggtgatgatgggcatcctcagagacaaggagagtggtatctgtatggactcgggaggctttcgcaccacggccagcatggtgtctgtcctgccccaggatcccacgcagccctgcgtgcactttcttaccgccacgccagacccatccaggtctgtgttcaaacctttcatcttcggggtgggggtggcccaggccccccaggtgctgtcccccacttttggagcacaagaccctgttcggaccctgccccgattccagactcaggtagatcgtcggcataccctctaccgtggacaccaggcagccctggggctgatggagagagatcaggtatcccccagggagtaggggctaccttgaggggatgatagacctcccccactcccagtgggactctggaaatatgaaggaactagggagtggaagagatttcagagctggggagaggagttcctcccttcaaagccagcaactgcctttggggaatgtcggggggtatctcctttctcctgcttgtgtgagggggtacacagtccccccttcacctggcgggaagcctgtcccggacagactcatctcagctttcccttggggcaggatcgggggcagcagctccagcagaaacagcaggatctggagcaaaaaggcctcgaggccacacaggggctgctggccggcgagtgggccccacccctctgggagctgggcagcctcttccaggccttcgtgaagagggagagccaggcttatgcgtaagcttcatagcttctgctggcctggggtggacccaggacccctggggcctgggtgccctgagtggtggtaaagtggagcaatcccttcacgctccttggccatgttctgagcggccagcttggcctttgccttaataaatgtgctttattttc

SEQ ID NO: 64619 - DNA, 385 bp, Homo sapiens
tcgacccacgcgtccgcttcaaggtctggtgtcctgggggtctgtggggccctgtggacaagatggcatccctggagtctacacctatatttgcaagtatgtggactggatccggatgatcatgaggaacaactgacctgtttcctccacctccacccccaccccttaacttgggtacccctctggccctcagagcaccaatatctcctccatcacttcccctagctccactcttgttggcctgggaacttcttggaactttaactcctgccagcccttctaagacccacgagcggggtgagagaagtgtgcaatagtctggaataaatatccctccctgagactgaaccaaacaaaatccttgacaaacactgaaattataaac

SEQ ID NO: 64620 - DNA, 2551 bp, Homo sapiens
tttcgtgggaaacttgggtatgaacctgggaagagggacttgaggcctcactgggcattctctctgcacctgtggcattggagaagaaatcagaatttgctctgtggggttaagggatgaaatgagtgcccacctgcacagtctaaggatttaccattttcagccggaagtggcctgcctcttcactggtgaacagtccctaaatttccagccttggtctcacaccaactctctggattttctggccgcaggaattggattcaagtacgtggctctgggagacctcatcatcctcatcacttttggcccgctggctgtgatgttcgcctacgccatccaggtggggtccctggccatcttcccactggtctatgccatccccctcgccctcagcaccgaggccattctccattccaacaacaccagggacatggagtccgaccgggaggctggtatcgtcacgctggccatcctcatcggccccacgttctcctacattctctacaacacactgctcttcctgccctacctggtcttcagcatcctggccacacactgcaccatcagcctggcactccccctgcttaccattcccatggccttctcccttgagagacagtttcgaagccaggccttcaacaaactgccccagaggactgccaagctcaacctcctgctgggacttttctatgtctttggcatcattctggcaccagcaggcagtctgcccaaaatttaaggggacaagtagctccccccacgacatgtctccctttcttagaatatattaaagtcagagtctctgaggaaggaatgtgatttggcagtcagggtactaagcatgggtgggaactcctgccttataaaaattgtttttgtgttcttaaagataatatgttgtttttctgttttttgttttttccattttatggggaatttaaaaaccattcttgtatcataaggtgaattaggcgcatggtctttgttttattaataatttccactagagggtgttctcaggtcactttgcggtgaagtggacttagttcctccttgttctgtacaaaatgtctccagactttgtaaaggagctgcccagtttgggcctcctgtcccgaaaagaccctaataactaggcagagtgttgtcctgctttcttcgtctcgtaggatgtgctatgattggtgccaggcctcactaacacaggggctacctgtctcttattctcagcacctgtgtcctgagatacgctgcctgagacagagagagtccctcattaacagcctgtgtggctgtcagctttttgcctaaattgtgattcagatgcttttgttctctctcctttcacttattgccacagttgaggaaaagtgtcagattaccctgcagcaagacaagccaaggactgggagggaaaaaaaaaccactctggaggcaactgagaaaatcactgcttttggataggaatcagtagggtggctgttttccctttgttgaatctactagagtgacaggaaggactcccagccctttcagtaactatcaggagccctgaaacggtagaggcactgccatccttgtgggatactcaaagcccacagggcttttccctccctattgcatcttctgatgctccccacacccaccctccacctctccacctctgtggtgttcccatttgtgtgtttcccatctgtggagccagactgtttgagcaatagcttagcagcgagtcagggacagctgccactttccacagagccacaggatgggcagagcagggacccagggaatgaatagccagtggacaaacagtcttgagctctgttcagccagagtgatgggccctgccagttaaggggctgtgtcttcatccttgaagacagatgtgcaatattgaccctgcctctccccagggctttgtggaaagatagttgagggctttagtgagatcacactcagagtggggcaattccagcatttatcctggctgcgtttcattgcattgtctgtgaagtataatttctgggccagaattgctcagttgcatttgatccaggactatagattggaaatgggtcatcattgttttctgttgtgattatagccattctagtaggcgtttaaggtcatggcctgcagaaaatgatgtaagaactagttcttaatctttcagatcaagctaatgatgatatggaaccttgagttcgaattgattggtttacttggaaaaaaacatgtttgaaaattgcaaaagttccgccgggcgcggtggctcatgcctgtaatcccagcactttgggaggccgagacgggcggatcacgaggtcaggagatcgagaccatcttggctaacacggtgaaaccccgtttctactaaaaatacaaaaaattagccaggcgtgttggcgggcgcctgtagtcccagctacctgggcggctgaggcaggagcatggcgtgaacccaggaggcggagcttgcagtgagctgagatcatgccactgcactccaacctgggggacacagcaagactccgtctcaaaaaaaaaa

SEQ ID NO: 64621 - DNA, 822 bp, Homo sapiens
aaacggagcttccacaaaccagatagaggttctccagcttttctttgattgtctctgctttagcgtctctaaatccggtcaccatgtcggaccccgaaggcgagaccttgcgaagcacctttccctcttatatggccgaaggcgagcggctctacctgtgcggggaattttctaaagccgcgcagagcttcagcaacgctctttaccttcaggatggagacaagaactgcctggttgctcgctcaaagtgcttcctgaagatgggagacttggagagatccctgaaggatgctgaggcttcgctccagagtgacccagctttctgtaaggggattttgcaaaaggctgagacactgtacaccatgggagactttgagtttgccttggtattctatcatcgaggctacaagctgaggcctgatcgggaattcagagttggcattcagaaagcccaggaagccatcaacaactcagtgggaagtccttcttccattaagctggagaacaaaggggacctctccttcttaagcaagcaggctgagaatataaaagcccagcagaagcctcagcccatgaaacacctcttacaccccaccaagggagagcccaagtggaaggcctcgctcaagagtgagaagactgtccgccagcttctgggggagctctacgtggacaaagagtatttggagaagctcctattggatgaaggtttcggacactttgttggcacggggccttgggggaaaggaaatctgggtggatgcttcatgcatgagctgaaggcagaacctgtcatataatattagctgacgtgtacctgtg

SEQ ID NO: 64622 - DNA, 1039 bp, Homo sapiens
ttttttttttttaaaaaacatgaaagcacggtttatttgctcctaaggtttccctgtgtcgtagctctgtagtgcgttgaacgtgaccaaagcaagcaccctgggttagcaccagttctccctgtggccggctgtgtgggagggtgggtggcacggctctgagacccagtctggagggtctgtgctgaggggaagccgtgcttctctgtgtttccgactttgctccagtctcttctgtctctgggaagctcatggcaggatgctgtttggtttcaaagcttcatgtgggttctcttttttttttctctctctgtctctcttttcatttcaacggcgatgatcctttcccgagaagtatcttcagtgtcttagggaggtcacagcaacaaggcaaaacaataattaaagtacaacagaaggtagtgcagttctcgctgtggaaggaagcggtccgcaggcagctggcccgggatgcctgcacccaggtcgaggctgaaggacggggggtctcggtgttcccgcagctctaaggctgtggctgggggctggctcaggaagtcatcttcagggtgatgtgggggatgcaggtggaatgcggtgaggagaagaggagggcgctgggctccgggcccctgtcacagagtggactccaaagaggagtccaagatgtcatcgtgatggctgttgctgttggagtcgctgtcatagctctgggggctggagtagttggctgcctcctgcagcctcatcagcatgttcatcagcgggtcaccttcagcatcactggggggcatctgcttgcttgtcgatccctcccgaggcatggagtagccgtcgaagccgacatcctcaggccgtaactgcagcaggggaggccactcgtgctgttgtgggctggctgcccatggatatgtgtccatcacccacttggcaggatcctcccagggggcgcgccttccatagagctggagtccttctctgacggcttccaggagataggggataatggaatagttccacaagtcggtgaaccactctc

SEQ ID NO: 64623 - DNA, 2061 bp, Homo sapiens; identical to SEQ ID NO: 64112

SEQ ID NO: 64624 - DNA, 1156 bp, Homo sapiens
  misc_feature (1)...(1156): n = a,t,c or g
ttttttttttttattagaaatgacgttgttactaaaaagccacacaatatcncatttagagaatatgcttaacaaaatatacatcttaaaaattcagcactccagaatgctttttcaggtgtttccatttgagaaataaagaataaaaattggtaataattatagacacaacttcatacaataatctggataatatgcaagaagcatcatgttgactttcagatatttctctttgtggctaacgaaccacacatcaaaggatggaccaaagttcagatgtacacagtccagggcacctccaagcacagtggcagtgcccttggggattttctttccctcagtgagagacacgggggatggggaggagcccaggagtgtcaccagaaagtacacaacccagcttcttacccagcctgctgccatcatcaactatcaaaccatttgctcctctttgcaagaggtgctcctttagaaggtcccaataatttctgcttatattgttcgaccagctggttgaagcgggtttccgtcttatttcccttagcttttttcctagatacctgctcggacgataattgctgcttctcctgcttccactggtttatctgtggctttggctttttgggatggacgggcttcactttgcctttgtcccgcaacctgattttggggcctcggtgtgaggggagcgccaggacctttcttctcttctttccatcaggcagctccacctgctccacttcagccttggtctggaacccggtccatgaggtagagcccgcctttctcttctgctctgggggcaccttgctttgttcctctgtgtggtgttgagctgccttctgttgctggtcttttgcaggctctggttgccccttctgaggctcaccagttgcaggcttggatctcattttttgcaagctgcgctggatccttaattccttcattttaagttttcttcgatcttctaaagagaactccactattggtctcttcagaggcccaaagatttctggattgttgttgatgaggcggagggctttcagggcatgctcgtgctcttggaactccgcaaaggcgtagcccagggactgacccttcatgttgccatgaactcctttgaggtatcgcatcactctacactccttgatgcgca

SEQ ID NO: 64625 - DNA, 1766 bp, Homo sapiens
  misc_feature (1)...(1766): n = a,t,c or g
atggacagggcggcgctcctgggactggcccgcttgtgcgcgctgtgggcagccctgctcgtgctgttcccctacggagcccaaggaaactggatgtggttgggcattgcctccttcggggttccagagaagctgggctgcgccaatttgccgctgaacagccgccagaaggagctgtgcaagaggaaaccgtacctgctgccgagcatccgagagggcgcccggctgggcattcaggagtgcgggagccagttcagacacgagagatggaactgcatgatcaccgccgccgccactaccgccccgatgggcgccagccccctctttggctacgagctgagcagcggcaccaaagagacagcatttatttatgctgtgatggctgcaggcctggtgcattctgtgaccaggtcatgcagtgcaggcaacatgacagagtgttcctgtgacaccaccttgcagaacggcggctcagcaagtgaaggctggcactgggggggctgctccgatgatgtccagtatggcatgtggttcagcagaaagttcctagatttccccatcggaaacaccacgggcaaagaaaacaaagtactattagcaatgaacctacataacaatgaagctggaaggcaggctgtcgccaagttgatgtcagtagactgccgctgccacggagtttccggctcctgtgctgtgaaaacatgctggaaaaccatgtcttcttttgaaaagattggccatttgttgaaggataaatatgaaaacagtatccagatatcagacaaaacaaagaggaaaatgcgcaggagagaaaaagatcagaggaaaataccaatccataaggatgatctgctctatgttaataagtctcccaactactgtgtagaagataagaaactgggaatcccagggacacaaggcagagaatgcaaccgtacatcagagggtgcagatggctgcaacctcctctgctgtggccgaggttacaacacccatgtggtcaggcacgtggagaggtgtgagtgtaagttcatctggtgctgctatgtccgttgcaggaggtgtgaaagcatgactgatgtccacacttgcaagtaaccactccatccagccttgggcaagatgcctcagcaatatacaatggcattgcaaccagagaggtgcccatccctgtgcagcgctagtaaagttgactcttgcagtggaatccctagaaccttggacctgagagtttcccttacctgatcgacatattttcctttatctgatcaacccatcaatcatgtggatttcttgggattctaatgttgaaaaggtttatattcaccttttgatgatttggggaatatatattgacatacaaggaagataatctgtttcctaagcaagaaataacaggaaagatcccttatgccaggaggcctgccatactcaggataagatccttgaatatggaacttagttacaggactcantaatggtgggtgaacattagtcatttttaaaagacacctcttatagcaataaggagacattaacatgaatctcatttattctctcagtattttaacttgagaaaatatactgtttgttgtggatagaagatgttgaaaagtaacataagccatggtgctgactaccctttatgtctttcaaagaaggtaatcanaaagatcttctagtgaatatatccctaaaaaagatcatacgatgttatgacaagatcatattaaaaggtatgaagattaaattaaggctttcctgaa

SEQ ID NO: 64626 - DNA, 1136 bp, Homo sapiens
gaattcccgggtcgagcttgagcccgccgactgcggccaggacaccgccggcgcgcctcccggccgccgcgagatccgcgccgccatgcagtttggcgacaccgaaattaaggtcaccgccgtcgacgtcagcaccaatcgctccgtgcgcgcgtccatcgactttctttccaactgagggcgcgccggcgcggtgccagcgccgtctgcccggccccgccctctttcggttcaggggcctgcggagcgggttggggcgggggaaacgatagttctgcagtctgcgcctttccacgccctccagccccgggggagataaggtcatgggagagtgggtggggacacacccagagactggctttgggattgggcactggtccgctgactgccaggctgaagggacccgccaaggactgaacgggtaagagaagaggtttgcaagacagagcgcgcagcccggcaaggggcatgtgaccccgaaggaagaacgcaacagaagagtcctggtctgaacttggccgagtaggggtgggggtgggatggcaggaggagccgcaggaggaaggaggttgtgcagggtctggacctgcagggctgaagttcactcatcgaccgactcagccccaaccgggagccaggcagaaaaaccctgtgccgtaggaaagtgactggaagtggactccagagggacaggtgtggtggcacagtcctggtgtggtgctgaccacccaaatatgactgtgaattgtggaaagggcagtagatctctaatgtggaggtgggaacattattgtggtggaggcaattatgagggtagcatttctttcgagacaaaacacccgtctgggaaggccccaaggtcagcttatgaaggaccccacttgcaccccaccccagccatggaagagcagctggagggtggatggggaggccagagggagcaatgaggggtggtcccagctctgctattgactcggtatgcctttaggacattctcttaccgctcatgggcctcagtttcctaaagtgtgaaatgtcaggcacttccctctaactggcatgcaacagccccacctgcctgagagccctgaggtgacaataaaacatttatgctcaaggggagaatacaaaaaaaa

SEQ ID NO: 64627 - DNA, 1048 bp, Homo sapiens
ttttttttttttaattaaaaaatgttttatttatacaaatggacaatcagaggccagtcccccgtccttgccttccggctccagtgtggtgtaccaggtggccactgcctgctgtcccggcaagcacgtcctcacgctcagctctggcccgcctcgtcgtcactgtcctcaatcagacagtcccggatctcctgcaagccccaggccctctgtgtgcggacgtgggcctcagccaggatgtacggcggcagggggtccagtgagggtcaccaagtccttcatgttcacgcggcagctgtagcacagctgctcctcaatgcaggctttggggtcctccctcctgcaggccccctggccgcagcgctgggcccagcccacccctggagaacagcagggccccgggggtgtccgggtctcagtcagggggatgggtgactgcatctgggagagacgcgaggaggtctgagccccaaaagccgtggcactgtcagcggcgtcgacgtccagggcacacatgcagaggaggcagcgggggccggagtcgccagcagcagggccatcccgggggcccttcaccagcttctcacttgtcctgtacacagtgctgacagtggaggggaactgggtctgcagcctgaggatgaaggcctccatcagccggtggatgctggccttttcaggggccttggtgtcgacggctggtgtgaagacagaaggaacggagaacaggcggttgtagaaagcgacctccttcagggtgtggtcccgcatgggccgcaccaccaccacgtccccgtgccgctcatccgagaagcccgtatcccaggccaggaaggcccctcgacccagcgccaggttggtcatgagcttgatagccaagcgtgtgcagctgtccccagtcatgaccttggagtagccgtgggctcgggccacgtggaggatcaggtgggtccgcagggtctgcagaagctcctccttggcagtcagtgtcctcactgagcagaacagttgggaaagagcctcagtctgggcaggggcaggcggtctt

SEQ ID NO: 64628 - DNA, 1053 bp, Homo sapiens
aaacaatacacctgtcagtttccatcaactatagcaatccatgcagaagacaagaggccccctcaaagcaggaggggtattgttttaggtccaatttttcttattgttctcaaaatcattataaggtggacagtgttttgtgaagattttcttttccccagctctaagaaaccatgtggaaagaattcattgataactgttttgatttttttctttttttaagtacaggttttgctaagtaatcacccttagtgagcctgtgtagttcagctgcctgtgagatgtttggtgaccagctcagtgtattcttgtattcttgatagagaatatttcaggagacaaaagtgcttcttcagaccagacctcaaataacaattttattctttttaataaataagacctcagtaggcggacctgataacagtgacaatgaaaggaaaatagtggcaaaatgtgagtttccagcatgatgtttctcattttattttcttctgtatgaatcaaaagaatgctttacaaaaccatgttcccttaatcacagtgttctctggcttttataggattgtcatagccaggaccacactattgctttttcataacattttctttttgtttctttcttttgaatttcttacagggctgcaaagtatgccaggggagtatgtagcccggggtggtccaatgggtgtgagtatgggacagccaagttatacccaaccccagatgcccccccatcctgctcagctgcgtcatgggccccccatgcatacgtacattcctggacaccctcaccacccaacagtgatgatgcatggaggaccgccccaccctggaatgccaatgtcagcatcaagccccacagttcttaatacaggagacccaacaatgagtggacaagtcatggacattcatgctcagtagcttaagggaatatgcattgtctgcaatggtgactgatttcaatcatggttttttctgcaatgactgtggagttccattcttggcatctactctggaccaaggagcatccctaattcttcatagggaccttta

SEQ ID NO: 64629 - DNA, 2210 bp, Homo sapiens
  misc_feature (1)...(2210): n = a,t,c or g
ttttttttttttctttaaagaaaacaagttttatttttatcatcagaacattctaataaaaatattatgatgagattagctacctttattctctgagccttgactctgtcacaggcctgccctgggngcgcctgcacgctcagctccctgaggtaggtccggagggggggagacccccccgctgccccccgcccctngggcagggataccctttacctttaatggtcccctccttccagacccccaacagcccttgggatgccccattagcagccctgccacgggttgggaagaaactggcctccaccctccaccaacccccaagacaggcaaggaaaccgtctcagggctgggcacaacagcaggtggtgcgggggtagagggaagaggcgcacccttctgcactcaaccgctccagcgggcagagctgagggccactgccccccccaggctggcaccaccatggtctagaccccaagtggcctgaatgctgtggatcacttccttctccccttccacagtgtttggggagttggggaggaagggaagggagaggagtgtcaacgtcgcagtgacggggtcctgagacaactcactctgccaccccggcaggcggcagcagacagtggcccgcacgggcctgaggggcctcctgtctgtggtgcccatcccaccgagaggatcctggcccgcgagccggcagacactttattatacagaaacactatcgtcgtctccacgggcggaaccaacaaaagcaagtctctccaagtcaaaaataggttttggattcttggtggcggcagtatccgctgaaaaaatagactgaacttctgaaattatcttagtagcaaaacaattacaagaaaaaagttgcaacttcagtgctatgactggaaaggggcctttggccggcggcccctgttaccggcggcccctgtgcgcctgggagctcctccgggcttgaggaagccgcccacgtgccctgatggagaaaatgggactccaacaggaggccgtgtcctcacacctcagactgcgctcacagctcgggaggatcaagttacaataaacagtccattaacttcttgctttcaggtttccctggagtcaggcatctctgcacagtccagggcagccaggggctgcagagggtctgtgacaccccgccacgatgcagcagtggggacacaagcctgagggaacctggagtgtggagaggcaggagaaggtgcaaggagaggctgccatggtgtgcaaggaacctgggattgcgtctttaaatagttctcagtcattcttaaagtcctccctcaagacacaatgggacctagattaaagagaagccgtctctccgctgtcccagggcgcaggcggaatgcccgagcggtcttcggaggcacgggtgctggtggcacctcactgaagctcagccgggctgtcgccagcccatcatggcctggcagctctgtctgctgtgaaggtgacaatgccacagtcctcggggcaggaacgcccctcactgcatcctgtcaggctgcagctgcggcgcctggtactgcacgaaagtggtgcccgcgggtgctgcggctgagagggcctggggcacggcggcagggtagctgtagcccacgaagctggcagccgtggcaggcgaggcggcgtatgggtactggtcataggtggccggtgggtactgggcgtaggccgggctggccggcgtgtactcaatgtagggcgaggacagcgacgggacaggggcggctgggatcaccacgctgggctgcacgatggctggtgggtagatgtagtgcggggtcagcccgtaagtccgctggatcaaggtggggtgcagctgctgcaccccaatggcaaagcccgtctggaggctccgcggcttggcgcccagatatgccaggttcacgttggccttgcggccgtcgatgatggggttcgggtctttgcaagccctctcagctgccgcccggtcggccatggtcacgaagccgtagccgcgggacttgcccgtctggcggtcggtgatgaccacggcctcctcgatgtcgccgaagccctcgaagtacttcctgagcgaggcgtcggtagtgtggtacggcaggccgcccacgaagatcttggtgaacgtggtgcccttctgcgagccgtacatgacgccgggggcggccaggggccgcgagaaacccgcgctc

SEQ ID NO: 64630 - DNA, 1909 bp, Homo sapiens
  misc_feature (1)...(1909): n = a,t,c or g
agttcctaaattgggggaaacatagtgaattccacataatgttttaaattattcagccactaaaaataaatttacatatgatttcattaatatattcactatctaaaccatattttttacactacgtaaaatacattgtatatgtacagtgagtgatgctttttgctttagttctcatttttcacattaaggggaggaaagctacccatagatagtattcttactccttttcacatgcttcaaggacagtttgcaagtggatataaatacatacacatcactagtgattatgcttttatgttatttccaacttcttataggtaacataattttcagacaatgttagctggttttaaacccaatcagtaaactggcattaaaggattcttaataaaccaaacactgaaggcctctttcatatttgtatcatctgcatttttttttatatgcttgtcatgtggctttactttcagcctcactcttttcttcttccaaatggattatccttaaaccttttacctttaaagagcctgagatttatatttaactcgaacaacagtttgcctctgttgcccctgtgttcatgttttcctaagccagagtttcccacgcctcctgttcctggcagcccaagtgccttcgctgggctactcccacctggcccttgcttttcattccttagggcagtcacttagcaccttccaaagtgcctgcacatgtttcttatttcatttcttaaacattcatattaccactatttagattgaaggaacagaattggtttgggcttgaagagaatacaaagagatctgtcttcaattatctgatagtagtaaagtttcacgggagaaagaaagatttcggttccacataaggaaaaacttggaaagttttgaatggaaagttcatagagagattcagtaaccacctgtcaggaattttgtaaagacgtctacggccatatcaccctgaacgcgcctgatctcatctgatctcggaagctaagcagggtcgggcctggttagtacttggatgggagaaattttataaagaacacatgaacactagctggcctatgtggcctttaaaatctcttccaatcctgagattcccacaactctggataaaaaggggcaaaagtattagacatttcactcccattaatatgagggaagtaaatgacattgaggtccaatttgtctgtagttcagaattagtccaatacagacccttagaccaactagggaacaaaaagcaagcatttcaagttacctataagcctgggctcatcagaatatagaaacagccatgtgctagctgaaagccattcaatgaggctttctattaatttcctttaaaagcaatggttattattgaaactcctaaatgctaaaatctgaaggacccatccttatatataagttctgatcatactgaaacagtcatttagcaacattgctctgatgtccaggaccctggtctgtaatgaaagcaatgaagggaggggctggcagggcactactggggtggtataggggacactgcttatattcacaaggccacgtggtccaagcatagcggagagcaaccacagtgccatgacaagaatcgatcgccagggtcagggactgggtggagacggtgttcatagaagctggaagccacttgcatcgatggtcactgcaacaggagatctcaaatatcttgttgtcctttttctgcacctggatttgctggtaatatgtgagattgagcagccccttgtgagccaagagttctatcttctcaggcagtggtccttcaaaggtcaaattcttctcaccataagccagagcacgggcccccaaatgcagccgataagccacagtctgtttatctcggcccggtaattccaacccggntgacgtca

SEQ ID NO: 64631 - DNA, 1462 bp, Homo sapiens
tgagggcccctgtcaaggcccccaccctcctttttctgtgtttagtgagggtgtctgatgcataactgagcctcagttgggaggggctgaggggatcgggaacacttccaaggggaagcagctggggtgagagccccaaggtggagagaacttggcaaggttgaagaggaatggtgggcaggggagggagaagagtaaaagaagaggcagttagggctgcccgggtcagtctgggaactttggcttcctcttcaggtcactaggagccatcagagggttaagccagcagagacagcttcctgtttttaagacgttggtctggctgctgtgccgggagcaagagagaaagagacttgggggagttcagaagaggtgacggtggtggaggaaagtggatggatatggggtctctttcagaggtagaacagtggggtctctttcagaggtagaacagtgggaccttctgaccactggcaggtagagggtaagggagaggggaattgggttgcctgctagtttttgctttaactaactgggtagatgctgatgtcattcactgaggaggaagagggcaggttgagggtaggtagaaattcacagttttggtttggttgtagtttgggatccctgtggacaagaaaagtttccatgggtatattatgaatgccttctgaatcaagggtttaaatcacatcctctgatttattctccccaaagaccactagatgccgctgtttacacgggagcaattatgcagtacaagactcctttcctgaggagagggcacggatgccggagagggtactgatgccggagaaggcactgatgcctgacaggggaacccacagagaggggagcccctgcctttgagggggttactctttactgggagacatcacccttcagtgtggtcttcagacacatgtgatagcagtgtgacttcatatgggatagaaagctagggactaggtagtgtttgagctgggtcttcagggttgcaaggcatttcaggtgggggcaggacgctccaagcagaaggaacagccgggcaacagagcgcatctccctgcttatggggtagatggtacagtgaagaggttattggcatagggggttggacttttcagtgtttctcaacaaaggcacagttagccttttaaagaaggacggtttttggctgggtacggtggctcatgcctgtaatcccagcactttgggaggccgaagagggcagatcagctgaggtcaggagttcgagaccagcctgaccaacatggagaaaccctgtctctactaaaaatacaaaattacccggccatggtggcacatgcctgtaatcccagctactcgggaggctgaggcaggagactcgcttagacccaggaggcggaggttgtggtgcgctgagatcacaccattgcattccagcctgggcaacaagagcaaaactctgtctcaaaaa

SEQ ID NO: 64632 - DNA, 1689 bp, Homo sapiens
ttttttttttaggcagaaggagtcagagaggttgcctttaatagctcagttactattgtttatgttgataaagggtctgttaatgtattgccaaaagagaaccaggaaaagaggtccagttttgggaagcacttgccttacttgtaccccgctcactctcaactgaggctcctgtgatgagcacagtgggcacacaccccatccccaacctgtccacgggtccctgggccatggtggggttgggagtgacactgctatgaggggaacgtggagagctggtggctcactcatggtgagaggctcaagggcggcagtggctctgcagcaaagttggcagctggagcagcgtgtggggcccgggaaggaactgggaaggagcagacagggtggggctgggggaactgccaaggatcccgagccaagccactgcgaaactgagaagggtgcttgccacatgggagccacttcgtttggctaagcattgggtctgggttcaggagccacgatgctgccccgggtaccccccctgccaccgtggcaggtgtggcacagacacaggcctctgccaacagggcagctgggcacgctgggcactcaggttgccttctccttcccgctttccattggttcctccttcaggttctcggtcacgagcttcatttgctgctgcttgagtgcctccaaagactcaaattccagtctggctagtttcatctggatatgccgtggcttatcaggtatggcaaatgcaagtataaactttaaagccaggagtgcgtgctccactgctactacaatcaaaatgaggtctgcttttgattctggaaagactgcattcacttgtggtgacattccaatcagcgcacagttagtgaccacagatataacactcatcatttcaaaagccaactgccacacaccaatattggctgaaggttctgagaatggacgtttgaagaccctgcacatttttaaggcatctgaatttacttcagtgaagttatttaacacagcaaaggcagctgctaatgggtaaacacaggagaaaaggctcacataaccaaactgcaggaataactccaagtaatcatcaaaggtgcccaaataagttcccatttctttttccaggatgacttgttcatataatgtagcatcaatgtctgcctttaaagcctgcaccttcctcttcacctgcacaccatgcttcctttggagccaataaggaagaaaagattccataatttggttgaggatctgggaggtaattaggagagtggccaagctctggcgcaaaagcttcatatctttcaagacaaaggcaatatagaagagtgaggcaaagcaattgaggaagttgaacactaaaactttcagaattagatggttctgataggcagattccaatctgtgattctcccatgaagttaaaaactcggcagcatatcgatagagacgattcatgatctcaatcacaatggcatagatgatgctgggcacatacaacaggacactggtccactcagacccgctgttctcatgtagacccaaggcccaaacctccatgtcgaagtaaatcatcatgacatacagtgagaaatagaggcagaggcacacgaatggcagggagaccaggtaaatgcgcaactgtctcttgtagctggggtacagaggctcctccttcccagtgat

SEQ ID NO: 64633 - DNA, 458 bp, Homo sapiens
gagaatcccagcaagaatcacattacttttttctaataaaacaggtcttactgtttctaagccagaactgattagccgtctggagcaaagacaggagccctggaatgtgaagagacatgagaccatagccaaacccccaggtaggttggatgaatgaaacacatgccacaggtgaaagctccaaaggccaagaaggaagacagacttcaagagttatttgagaagctctgctccaatggagatgatttttgaggaacgtgattgtttattcttgctcttgtacagaggcatcttctgtctaatgctcctaaattctctaaaaagtaaccttactttgaggttatagtgagagccaaagtcctcttcatggcttataagagactttattatctgactgccctttcattgtcttggggcacacagaaatatatgtgtatttttgaggaactctatgttaa

SEQ ID NO: 64634 - DNA, 689 bp, Homo sapiens
gggctataccccaggtgaatcaattcagatatttgctgagattgagaactgctcttcccgaatggtggtgccaaaggcagccatttaccaaacacaggccttctatgccaaagggaaaatgaaggaagtaaaacagcttgtggctaacttgcgtggggaatccttatcatctggaaagacagagacgtggaatggcaagttgctgaaaattccaccagtttctccctctatcctcgactgtagtataatccgcgtggaatattcactaatggtatatgtggatattcctggagctatggatttatttcttaatttgccacttgtcatcggtaccattcctctacatccatttggtagcagaacctcaagtgtaagcagtcagtgtagcatgaatatgaactggctcagtttatcacttcctgaaagacctgaaggtaatttgataatacacgtctaagcttaatctcttactactattatcaagaaaattattttgcctctgatattttatgaccctagatgaacataatcttttcctaaagaaagtagatgtgcccctaatattcagttttgattatatgtcttcatagtttcgatcaccaaacaataattattttaccttgacgttgctttttaatacctactattctgtgtattttgacatgcataagaacatgctgttcgaattg

SEQ ID NO: 64635 - DNA, 2950 bp, Homo sapiens
ttttttttttttgtgaaaattttatttttctttttattgcaaatttctggtaaaggaaagaacatggaagctgattctcatttgagctttggtgagaagagaactgcactgtggctcgacagctcaccacctcggctgcacacccaaacacgcggaggcctcgggcacgcactgatgcctgcgacccacctcccagaggttctgacttaatcggtctgggaggcacagcggggcatcagtagatttcccaactcctctggatgatttcaacatgtagccaaggtgagcacacctgcggtggctcatctcaaggggctggcaatgtcagaagcacctgagaagctcagctgacagccaagtgtcacctgcttacatcactccttggccagagtccagctggtgttccccgcctccctcttcccaggtgtcgatgttctgattccttctcctcaaagaccccacaagacagagatgctggagggggtgtggcttcctgtgctgtggtttgtgcttaaacgtggagaaccacatgaaccacgtgtacgctaccacaaaagaaattcactttctgattgcaaaacagcattcgcctttttttatttgttaagtggaaatttgtggcaaaataagaaaatatgtgttggataatatagtccctatataacctctcatgtccaaatttgaaaaaaaaaattgtcaagccattgacagcaaaatatgtactttagcagcatattttatatgggtaaacagtaatagccagttagacacttcatttgtgatttgtcctaaaaatagaaaatgctttttattttcctgagtccttggcaaacaaaaaacatttttttctttttaattgttaaagtattcctgtttttctttttcctgggacaccctcacagttcagaacgttgtgtctcactgtcagtttttacatacagagatgaacaaacagcactggggccaattttcaatgactgatcaaatatggcgattgaaaataaaacacccatcatctacaaagttgctcaagatgaaagtttcttacagtgctataaatgcaatatcaatttgaattgttgtccatacaaaagtatgaatttctattccattagtaatactgaatgattaataccttaacagcgataaaatttttagaacatttaaaaaatacagaggattccagttttacatcatacttctgacggattatcatactttctattttgtctgcaaaacttttacagagtacagtgcattgacatgataaaaccaaggcacaaaaatacagttacgataagtgtatataaaccctagcactttgtgccaattttggaaacagatcataaagtctgaaaaattaccacattctatttgattagtgaacaattaattgtgcagtaaatagactgttaaccaccattccattattaaatatatggctatcactatacaggttgtggataattcaaaaatagttttaaatattaaaacctgtaatatctaggtggtcaacgcagatattgagccttacgttatctaaataagtttccatttaatttgcaatccacatggcagttagcaatttttaaactatttccattacataaatggtggggtttattctaaatgttaaatcctttccccttacaaaagacagaagatttacaagaagataaccaatataagaagtgcatagacaacgataataaaatccaaattggactcaaaggttgaagtctaatctactgggacattctcttaatttagggtgaggagcaacacattcctgtgatgattcattagtttcttaattaaaaaaaaatccccatgacatttttcaaaatagtaaacagtcttcattagtgcatcaagcattgaagaaaaattgtcgtctttccattcgtaaaatgaagaagataaaagcctttcaaaatccagggcgggggatttccattgaatttagagaagtgaaataaactggtaaaaactgtatttcatacttttaacaaaagagtattttcaagactcaaggtaaacatttagacccataaaaacacatttcttggcacatgcacgccatggatggaacaatcctgaatgcagcgatggcctggctacagaggtatccggctcctagccccactggcaaaactgtcttttaggaccttgtcccagctcccttcacatgggggtctctggcttctgcatcagctggatttgcttctgtagctggtccctgtccagcttcatcttggcctcgagaacttgcctgagggatcctatgctttcatagacggctgtaaacccagcattaacttctgctttcatttccttgatgttctggttcatctgtaactccagcttggtgattcgcccgtgcatcttctcctcttcttgccttgttctctgaccatcaaaagtcttcttttgaccctcttctattttgtcaagcctggctgacatctggctgagcttcttctccatatccctttcactggctccactgttttccttaacaatcaaggaaagctgatcaattttctgtaaaagctctttttctatccgttcttgttcctgttgcaaccaactccgtgcagataatatctggttactgagttcctcaactgtacctttaaatttagtgtccaaaagctgaagctggtggttactgtctctgtgagacatcttcagtttggtgctctgctctgatattgacaagtccactctgttcaaaagctgagaaatctgtccctctgcatctttgattttcgtttccaagataagtttggcagcctgctgttctttgttcaagtgctggagcccctcataggtcgttttgtgctctgcagaaagactagctatgctggcatcacatctgtccagacaaagaacaaagcttgccactcttcctcgaagatctcccacaccggagagctggcgcatctcc

SEQ ID NO: 64636 - DNA, 1414 bp, Homo sapiens
ccataggcagggtaggcatgcagcagggagccggaatccaatccctcgccattaatttaacttagatgagctactcctggtccctggagccactccccaggaaggatcctgtgaagacacatctggctctcgtgcccatgctcctgccactttgcccaaccaacgaagttagcaaatagtaaagtgttcatcattacctagttttgtattataaaatggaatcaggaacataaataggaacaagtagcaaaaccccagccctgcgtaggaccattatcctctcagccacctctgcgtaggccaatgagtttggaaagtttctcacagttttcaagtttcagcgactctgctttctgtttcaatcgttcatctctgtataatcctgccaaatttgtcagctctgacttttgttgtttctccttccaacaactagtctggatataatcaatgtaatccttctctattgttttctccaagtcatgcagagaagctcctctgtaggccttgtcaaagtttttatccacaaagtaaggcacctgcaggttctgagtttctctagaaatggtgtagcccaaggtcgatttatagaacagactatatgggggattagtagccagcagctgagtaatgacagatataatcacaatcacaagaactggaagtagctgaataaatgcagaatatgtagtctgaggtttctcttcttcctcctccttctgagtctgtgtcctctcatgtcggtgccgtcgacggtaatagtaagtgtcatctgtcacatttgaaaacatatgaatatttcctgtaggaaaatgtcctccaaagaagacgttgaacagctcttctggagtgatgtcagcttcaaaatccctgtaataattataaggtctggctcgaggggcagtgaaagtcacctgttcatctccgtattcatcatagcgaagtctcttatcaggattgctcaggactgcaaatgcatttcctattgctttgaaagcatctgttgctccaggagcacagttcttgtcagggtgaaatttcagggcgagttttctgtaagctttcttaagctcttcgtcactagcatctcgagaaactcccagaatttcatagtaatttctgcatttcttgatcctttgtaccccaagcagctgttcctcactgtacgtggagttcccctcaccctgccgggtctgagtccactcattctcagacttcttttccttttgtgccttcatgcagttacagcagccacaggggtcatgactctcaggaggtgtgtcttctgggtatttgtttcttctaactgcgtcaatgtaagcttccgtccagcgctccccgctgcccagagtcgccgccatatcggttcccaatcagcaggtccgccgagcctcccccgcgcccgcccacgcgtccg

SEQ ID NO: 64637 - DNA, 206 bp, Homo sapiens
cagtttgttaaagggggattttggcccccccccccaaaaccccaaaagtttttttgggggtttaaaaagggggccccccccgggccaaggggggccaccccggggtttccccccctttgggggtttaaaaagggggcccccccatgggtttaagggtttccacacccggtccacggggtggtatacccccttttttaaaaaaaaaa

SEQ ID NO: 64638 - DNA, 429 bp, Homo sapiens
gagagaccaggtggactggagtagactgttgagagacgctggtctggtgaagatgtccaggaaaccacgagcctccagcccattgtccaacaaccacccaccaacaccaaagaggcgaggaagtggaaggttcccaagacaacccggaagggaaaagggacccatcaaggaagttccaggaacaaaaggctctccctaaaagaccgccgcttcaaaaaaacctgaggaatggagtgggccaacactatccagccactctgaccagccgaacgaggaactcaatcaaaatgagccatagcgggaccacaagggcaaggagaccaccaccttctccagtctctcttcggacagccagtaattcccgggcaaggccagagacttcaagtctatctgaaaagtctccagaggtctaaccccagataaatagcc

SEQ ID NO: 64639 - DNA, 2318 bp, Homo sapiens
  misc_feature (1)...(2318): n = a,t,c or g
ccatctagcccatcaagcctttctgctgccagcagtcttgacaacttatctgggagtttttcagaactgtcttcagtagttagttcaagtggaacagagggtgcttccagtttggagaaaaaggaggttccaggagtagattttagcataactcaattcgtaaggaatcttggacttgagcacctaatggatatatttgagagagaacagatcactttggatgtattagttgagatggggcacaaggagctgaaggagattggaatcaatgcttatggacataggcacaaactaattaaaggagtcgagagacttatctccggacaacaaggtcttaacccatatttaactttgaacacctctggtagtggaacaattcttatagatctgtctcctgatgataaagagtttcagtctgtggaggaagagatgcaaagtacagttcgagagcacagagatggaggtcatgcaggtggaatcttcaacagatacaatattctcaagattcagaaggtttgtaacaagaaactatgggaaagatacactcaccggagaaaagaagtttctgaagaaaaccacaaccatgccaatgaacgaatgctatttcatgggtctccttttgtgaatgcaattatccacaaaggctttgatgaaaggcatgcgtacataggtggtatgtttggagctggcatttattttgctgaaaactcttccaaaagcaatcaatatgtatatggaattggaggaggtactgggtgtccagttcacaaagacagatcttgttacatttgccacaggcagctgctcttttgccgggtaaccttgggaaagtctttcctgcagttcagtgcaatgaaaatggcacattctcctccaggtcatcactcagtcactggtaggcccagtgtaaatggcctagcattagctgaatatgttatttacagaggagaacaggcttatcctgagtatttaattacttaccagattatgaggcctgaaggtatggtcgatggataaatagttattttaagaaactaattccactgaacctaaaatcatcaaagcagccagtggccctctacgttttactcctttgctgaaaaaaaatcatcttgccccacaggcctgtggccaaaaggataaaaatgtgaaacgaagtttaaacattctgaccttgataaagcctttaaataatgtaccagtgttttcctaaatatttccctgttttttccagcactttaacagatgcccattccccggttaaactggggttgtctgtacctaaattataaacagagttaacttggaaccttttatatgttatgcattgattcctaacaaactgtaatgccctcaacagaactaattttactaatacaatactgtgttctttaaaacacagcatttacactgaatacaatttcatttgtaaaactgtaaataagagcttttgtactagcccagtatttatttacattgctttgtaatataaatctgttttagaactgcagcggtttacaaaattttttcatatgtattgttcatctatacttcatcttacatcgtcatgattgagtgatctttacatttgattccagaggctatgttcagttgttagttgggaaagattgagttatcagatttaatttgccgatgggagcctttatctgtcattagaaatctttctcatttaagaacttatgaatatgctgaagatttaatttgtgatacctttgtatgtatgagacacattccaaagagctctaactatgataggtcctgattactaaagaagcttctttactggcctcaatttctagctttcatgttggaaaattttctgcagtccttctgtgaaaattagagcaaagtgctcctgttttttagagaaactaaatcttgctgttgaacaattattgtgttcttttcatggaacataagtaggatgttacatttccagggtgggaagggtaatcctaaatcatttcccaatctattctaattaccttaaatctaaaggggaaaaaaaaaatcacaaacaggactgggtagttttttatcctaagtatattttttcctgttctttttacttggttttattgctgtatttatagccaatctatacatcatgggtaaacttaacccaggaactataaaatgtaggttgtctcagtcccctccagggcntccggatggggcaagtgcagttgaaacagggtgcttcttgctcccggggtttctctncctggatgttatggcccattgggaattngccgtcagtttgtgcaccattgggggaccngggcngtgctcagttt

SEQ ID NO: 64640 - DNA, 1464 bp, Homo sapiens
aaccctcttctgttccaagcactgtgtgagaccctgccttggataagtcaaatgcatgagcttaggaaagtagagtaactgctacaaataataaaaaacagatacatctgcagtcaagacagtcaccaccgaagagtacctggtgaaccctgtgggcatgaaccgctacagcgtggacacctccgcctccacctttaaccacaggggctccttgcacccctcctcctcgctgtactgcaagaggcagaactctggagacagccaccttgggggtggtcctgctgccaccgctggtggtccccgcactagccccatgtcttctggtggcccctcggcacctgggctgaggcctccagcctccagccccaagagaaacacgacctctcttgaaggaaacagatgtgcctcaagcccttctcaggatgcgcaggatgccaggcggccacggagcaggaacccctccgcctggactgtggaggacgtggtgtggtttgtgaaggacgccgacccacaggctctggggcctcacgtggagctcttcagaaagcacgagattgatggcaacgctctgctgttgctgaagagtgacatggtcatgaagtacctgggcctgaagctgggacccgcactgaaactctgctaccacattgacaaactgaagcaagccaagttctgacgtttttaaaaagacagaagcgaaacccaaaacaacagatcccaagattatcttctgccttaccaatatcccgccaacatcacaaaatagactctcctcttaaaattaacagccacagagacgtggtctttttataaaacttgtgaatctttgccttttgaagaatttaacatggaccttttcgagaggctcctctgtgttcataatttgccaaaaaattacaaaagcctgtgatttttaacatccctgttatgctgatttctcttaaagtgggtcctatttgcataacgagagagtggggaactgaatgcttatgcccaaggagagttctggagggttcaaaggatgaaagaaggacctttgtccctgcggtctctgcagggacacccccctcaacaccatctgcctctaactctgacctggggacctatccctgtgagccttgtttgcctcagctctggaagctgacttctgaagatgactgcctcaccttgcactgtctggaaaacttgaattattttacgccgtgaaagaaaaaggaaaaaaaaaaaaatcttttctgttcctaaaaaatctgaagaactgggtttctccgctagagggcaaactgctaatgaaatttcaggaccctcactgactgcagtagcaggattgttcagtactgagtggatgggttagggtgtctgtgaacaaaatctaccccacacagaaacaggggatttattccacagttagcaccacagattgcgacttgggaagaaaccatcagctagaggggtctagttcgt

SEQ ID NO: 64641 - DNA, 1306 bp, Homo sapiens
ttttttttttttccaatgccaaaaactggtgatttatagaaattcaccctggtttatttttttcaaccaaaggaaaaaaaaaacatggttcaataattcagcatttgggactctggcaagtactgtctgcattgttcaaaataagtgttcctggctgtgacgctctgcaaccacatactgatcgcgcccaggaaccttcttccatggttctaataaaacaaaggacccacacatggagcgttacgtgagtcaacaaaagatgctctatcacaatggtgcgtaaaaagcaagtctttgaaaaatatccagatctctaaagcgaatacaaacactcctatttgggttttgtttttgttcatcttcagtatttatattttagttgttgaggaaaattttttttactgtaaggaaggagttatatggactttataaagtgggaaccaacaggctgccggctaatacatacgctttccctccaagtcaagtagctttttccccccgaaagcctctttcatgattttcattatggttcagaaaagtaaagaaaatgatttcaagtattcaattcctataaaaattggtatcaaaagtaatagaggacctaatttctttataattccatgttttaaaaaataacttaagaagcaagaggtccggccctttacttgtataaatacagcagcagaactagagtttcttaagacaacgtggagaagagtctgtgtttagcacctcaatcatcgatcttaacgttggaaacgtttctgaaactgatggaagagtcttataagaaggtgaaatacttttcaagttcatccagcttttggcgactttgctaaaggcctctgaaccaggggctgtcatagcttcaaagtcgactaacttccctttgggaatttttcctgctacttcttttccacttgccatcagtgctcccacgatgaccgagtaagcaattacactggatcctcgagagagtggcattaaattataaaagtaataaactaaggataagattaagttgcagacagcatcagcctccccaaattctgatgaaagaatcaatacttttccttttgctgtcaaatctttataaagtgcatctatttcagcatgatataattgtgtcctttcttccgtggtttgagtttccacagaaaataatatattgccaactttgtctcctgtaatcgtgattgtgaatccatcatattccttcccttggtctttaaggctgggaacttttgtgttcacggtgaacccatccttcgttttagtattaaactgcttcataatcggaagaagg

SEQ ID NO: 64642 - DNA, 4260 bp, Homo sapiens
gccggcttcaatcacgggttcaactgcgcagaatctaccaacttcgccaccctgcggtggattgactacggcaaagtggccactcagtgcacgtgccggaaggacatggtcaagatctccatggacgtgttcgtgcgcatcctgcagcccgagcgctacgagctgtggaagcagggcaaggacctcacggtgctggaccacacgcggcccacggcgctcaccagccccgagctgagctcctggagtgcgtcccgggcctcgctgaaggccaagctcctccgcaggtctcaccggaaacggagccagcccaagaagccgaagcccgaagaccccaagttccctggggagggtacggctggggcagcgctcctagaggaggctgggggcagcgtgaaggaggaggctgggccggaggttgaccccgaggaggaggaggaggagccgcagccactgccacacggccgggaggccgagggcgcagaagaggacgggaggggcaagctgcggccaaccaaggccaagagcgagcggaagaagaagagcttcggcctgctgcccccacagctgccgcccccgcctgctcacttcccctcagaggaggcgctgtggctgccatccccactggagcccccggtgctgggcccaggccctgcagccatggaggagagccccctgccggcaccccttaatgtcgtgccccctgaggtgcccagtgaggagctagaggccaagcctcggcccatcatccccatgctgtacgtggtgccgcggccgggcaaggcagccttcaaccaggagcacgtgtcctgccagcaggcctttgagcactttgcccagaagggtccgacctggaaggaaccagtttcccccatggagctgacggggccagaggacggtgcagccagcagtggggcaggtcgcatggagaccaaagcccgggccggagaggggcaggcaccgtccacattttccaaattgaagatggagatcaagaagagccggcgccatcccctgggccggccgcccacccggtccccactgtcggtggtgaagcaggaggcctcaagtgacgaggaggcatcccctttctccggggaggaagatgtgagtgacccggacgccttgaggccgctgctgtctctgcagtggaagaacagggcggccagcttccaggccgagaggaagttcaacgcagcggctgcgcgcacggagccctactgcgccatctgcacgctcttctacccctactgccaggccctacagactgagaaggaggcacccatagcctccctcggagagggctgcccggccacattaccctccaaaagccgtcagaagacccgaccgctcatccctgagatgtgcttcacctctggcggtgagaacacggagccgctgcctgccaactcctacatcggcgacgacgggaccagccccctgatcgcctgcggcaagtgctgcctgcaggtccatgccagttgctatggcatccgtcccgagctggtcaatgaaggctggacgtgttcccggtgcgcggcccacgcctggactgcggagtgctgcctgtgcaacctgcgaggaggtgcgctgcagatgaccaccgataggaggtggatccacgtgatctgtgccatcgcagtccccgaggcgcgcttcctgaacgtgattgagcgccaccctgtggacatcagcgccatccccgagcagcggtggaagctgaaatgcgtgtactgccggaagcggatgaagaaggtgtcaggtgcctgtatccagtgctcctacgagcactgctccacgtccttccacgtgacctgcgcccacgccgcaggcgtgctcatggagccggacgactggccctatgtggtctccatcacctgcctcaagcacaagtcggggggtcacgctgtccaactcctgagggccgtgtccctaggccaggtggtcatcaccaagaaccgcaacgggctgtactaccgctgtcgcgtcatcggtgccgcctcgcagacctgctacgaagtgaacttcgacgatggctcctacagcgacaacctgtaccctgagagcatcacgagtagggactgtgtccagctgggacccccttccgagggggagctggtggagctccggtggactgacggcaacctctacaaggccaagttcatctcctccgtcaccagccacatctaccaggtggagtttgaggacgggtcccagctgacggtgaagcgtggggacatcttcaccctggaggaggagctgcccaagagggtccgctctcggctgtcactgagcacgggggcaccgcaggagcccgccttctcgggggaggaggccaaggccgccaagcgcccgcgtgtgggcaccccgcttgccacggaggactccgggcggagccaggactacgtggccttcgtggagagcctcctgcaggtgcagggccggcccggagcccccttctaggacagctggccgctcaggcgaccctcagcccggcggggaggccatggcatgccccgggcgttcgcttgctgtgaattcctgtcctcgtgtccccgacccccgagagggccacctccaagccgcgggtgccccctagggcgacaggagcccagcgggacgccgcacgcggccccagactcagggagcagggccaggcgggctcgggggccggccaggggagcaccccactcaactactcagaattttaaaccatgtaagctctcttcttctcgaaaaggtgctactgcaatgccctactgagcaacctttgagattgtcacttctgtacataaaccacctttgtgaggctctttctataaatacatattgtttaaaaaaaagcaagaaaaaaaggaaaacaaaggaaaatatccccaaagttgttttctagatttgtggctttaagaaaaacaaaacaaaacaaacacattgtttttctcagaaccaggattctctgagaggtcagagcatctcgctgtttttttgttgttgttttaaaatattatgatttggctacagaccaggcagggaaagagacccggtaattggagggtgagcctcgggggggaggggcaggacgccccggtttcggcacagcccggtcactcacggcctcgctctcgcctcaccccggctcctgggctttgatggtctggtgccagtgcctgtgcccactctgtgcctgctgggaggaggcccaggctctctggtggccgcccctgtgcacctggccaggggaagcccgggggtctggggcctccctccgtctgcgcccacctttgcagaataaactctctcctggggtttgtctatctttgtttctctcacctgagagaaacgcaggtgttccagaggcttccttgcagacaaagcacccctgcacctcctatggctcaggatgagggaggcccccaggcccttctggttggtagtgagtgtggacagcttcccagctcttcgggtacaaccctgagcaggtcgggggacacagggccgaggcaggccttcggggcccctttcgcctgcttccgggcagggacgaggcctggtgtcctcgctccacccacccacgctgctgtcacctgaggggaatctgcttcttaggagtgggttgagctgatagagaaaaaacggccttcagcccaggctgggaagcgccttctccaggtgcctctccctcaccagctctgcacccctctggggagccttccccaccttagctgtctcctgccccagggagggatggaggagataatttgcttatattaaaaacaaaaaatggctgaggcaggagtttgggaccagcctgggctatatagcaagaccccatcactacaaattttttacaaattagctaggtgtggtggtgcgcacctgtggtcccagctactcgggaggctgtggtgggaggattgcttgagtccaggaggttgaggctgcagtcagctcagattgcaccactgcactccagcctgggcaacagagcgagaccctgtctccaaaaaaaaaaaaaagccagggtttattttaaaaaggggggctcaaacgcccccgggcttggggggccctggggaaccccagagggggtcccccaggaccaaccctttttttttttttgggggggggggggggggcctgccgtacaaggagctggccaggataaggcaggaggatcacataaaataagggggtcgaggtttaagcgagaaaccaatgcccggagggccctccaaaccttggtttactcaagtggccacctcg

SEQ ID NO: 64643 - DNA, 1211 bp, Homo sapiens
aggaatgggtccctgccaacaccgagcccgtggagcgctgtggcttcaccgtcaagaatctcccgaccggagccagaatcctcttccgagtagttggggtcaacatcgcggggcgcagcgagccggccaccctggcccagccggtcaccatcagggagattgcggagccacccaagatccggcttccccgccatctccgccagacctacatccgcaaagtgggcgagcagctcaaccttgtcgtccccttccagggaaagccccggccccaggtggtgtggaccaagggcggggccccgctggacacctcccgcgtgcacgtgcggaccagcgacttcgacaccgtgttcttcgtgcgccaggcggcccgctccgactccggggagtacgagctgagcgtgcagatcgagaacatgaaggacaccgccaccatccgcatccgcgttgtggaaaaggctgggccccccataaacgtgatggtgaaggaggtgtggggcacgaacgcgctggtggagtggcaggcccccaaagatgatgggaacagtgagatcatggggtatttcgtccagaaagcagacaaaaaaaccatggagtggttcaacgtctatgaacgtaacaggcacactagctgtactgtgtccgaccttatcgtgggcaatgaatactatttccgagtttacaccgagaacatctgtgggctcagtgactcacctggtgtctccaagaacacggcccgcatcctcaagacaggaatcaccttcaaaccgttcgagtataaggagcatgacttccggatggctcccaagttcctgacacctctcatagaccgcgtggtcgtggctgggtactcggcagccctcaactgtgctgtcagaggccacccgaagccgaaggtggtctggatgaagaacaagatggaaatccgtgaagatcccaagttcctgataaccaattaccaaggagtcctgacgctgaacatccgtcgcccctcgcccttcgacgctgggacttacacctgccgggccgtcaacgagctgggcgaggcgctggctgagtgcaagctggaggtccgagtgccgcagtgagacctgtcccctacctgccaagacaattggtggtggagtcctgaccccaatccccaacctcccaggactgtgttctttctggagttttcgctgagaacaaaacagtgttgtctggaaaaaaaaaaa

SEQ ID NO: 64644 - DNA, 2018 bp, Homo sapiens
gaacgctcaagtcgaccatccgtatcaagcacagcgggaatgacttcaagtgtcctcattgcgccttcctgggtgacagcaaagccaccctccggaagcacagccgcgtgcaccagtcggagcatcgtgagaagtgctcggaatgcagctactcctgctccagcaaggccgccttgcgcatccacgagcgtatccactgcaccgtccgccctttcaagtgcaactactgcagcttcgactccaaacagcccagcaacctgagcaagcacatgaagaagttccacggggacatggttaagactgaggctctagagaggaaggacaccggcaggcagagcagccggcaggtggccaagctggatgccaagaagagtttccactgcgatatatgcgatgcctccttcatgcgggaggactcgctccgcagccacaagagacagcacagtgagtacaatgagagtaagaactcggacgtgaccgttctccagtttcagatcgaccccagcaagcagcccgccacgcccctcactgtgggacacctccaggtgcccctccagcccagccaagtgccccagttcagcgagggaagagtcaaaatcatcgttgggcatcaggtgccccaggcgaacaccatcgtccaggctgccgccgctgcagtgaacatcgtcccgcctgccttggtggcccagaacccagaggaactcccagggaacagccggctgcagatcctgcgccaggtcagtctgatcgccccccctcagtcctcgcggtgtccgagcgaggcgggcgcaatgacccagccggctgtcctgctgaccacccacgagcagacggacggagccactctgcaccagactctcatccccacggcctcaggtggcccccaggaaggctctggcaatcaaactttcattaccagttcgggtattacttgcactgactttgaaggcctaaacgccttgattcaggaggggacagcagaagtgacagtggtgagcgatggaggccagaacatcgcagtggccaccacagcgccaccggtcttctcctcctcttcccagcaagaactacccaagcagacctactccatcattcaaggggcagcccatccagctttgctctgtcccgccgactccattccagattagtgcttaaaaaaacaaaaggagtgggggaaaggaattgagaaaaagaaatcttaagtagaattctctaaaaggtttgctcttaatgttttctttgttttgttttgtttttgagacggagtctcgctctgtttcccaggctggagtgcagtggcgctatcttggctcactgcaacgtccgcctcccaggttcaagcgattctcatgcctcagccctccgagtagctgggaccacaggtgtacgacatcatgactggctaatttttgtatatttagtagagacggggtttcatcatgttgaactcctgacctcaagtgatctgcccacctcagcctcccaaagtgctgggattacaggtgtgagccaccatgcctggccgtggtttgctcttaatgtttttaaggatggttgtgaatccccctggccccataataaattgtaattttatactgcttactataatttttttaacactgtaacaactttgagaccacctctgaatcgtcgcattataactgttgtagaatcttaaatgttaccaagatgattccaatgaggggttggaattaaatgcattaagtagtgaattcatgtgtttgtttccaacttgattttccaactctaataaaggtttctgtccatcttattacatttgtgtagtaaatggtacttcccagcctctcttttgccccattctggaatactccccagagtttgggggtgttcatgttttatacatgtaagtctgttggcatgaaggaccattttctacataatatgacatggatacttgacccaaaaaaaaatgtttagtgctaatgagcagaaaatgaatggttccataataaattgatatctgattaaaaaaaaaa

SEQ ID NO: 64645 - DNA, 2159 bp, Homo sapiens
aaccacgcgtccgctcacctccaagattctcttccgggatttggtccttgccgtgcgcgaccatgccttcacggggtccccttaccctgtcatcggatccctggagaaccactgcgggctggagcagcaggctgccatggcccgccacctctgcaccatcctgggggacatgctggtgacacaggcgctggactccccaaatcccgaggagctgccatccccagagcagctgaagggccgggtcctggtgaagggaaagaagctgcccgctgctcggagcgaggatggccgggctctgtcggatcgggaggaggaggaggaggatgacgaggaggaagaagaggaggtggaggctgcagcgcagaggcggctggccaagcagatctccccggagctgtcggccctggctgtgtactgccacgccacccgcctgcggaccctgcaccctgcccccaacgccccacaaccctgccaggtcagctccctcagcgagcgcaaagccaagaaactcattcgggaggcagggaacagctttgtcaggcacaatgcccgccagctgacccgcgtgtacccgctggggctgcggatgaactcagccaactacagtccccaggagatgtggaactcgggctgtcagctggtggccttgaacttccagacgccaggctacgagatggacctcaatgccgggcgcttcctagtcaatgggcagtgtggctacgtcctaaaacctgcctgcctgcggcaacctgactcgacctttgaccccgagtacccaggacctcccagaaccactctcagcatccaggtgctgactgcacagcagctgcccaagctgaatgccgagaagccacactccattgtggaccccctggtgcgcattgagatccatggggtgcccgcagactgtgcccggcaggagactgactacgtgctcaacaatggcttcaacccccgctgggggcagaccctgcagttccagctgcgggctccggagctggcactggtccggtttgtggtggaagattatgacgccacctcccccaatgactttgtgggccagtttacactgcctcttagcagcctaaagcaagggtaccgccacatacacctgctttccaaggacggggcctcactgtcaccagccacgctcttcatccaaatccgcatccagcgctcctgagggcccacctcactcgccttggggttctgcgagtgccagtccacatcccctgcagagccctctcctcctctggagtcaggtggtgggagtaccagccccccagcccacccacttggcccactcagcccattcaccaggcgctggtctcacctgggtgctgagggctgcctgggcccctcctgaagaacagaaaggtgttcatgtgacttcagtgagctccaaccctggggccctgagatggccccagctcctcttgtcctcagcccacccctcattgtgacttatgaggagcaagcctgttgctgccaggagacttggggagcaggacacttgtgggccctcagttcccctctgtcctcccgtgggccatcccagcctccttcccccagaggagcgcagtcactccacttggccccgaccccgagcttagcccctaagccctcctttaccccaggccttcctggactcctccctccagctccggaacctgagctccccttcccttctcaaagcaagaagggagcgctgaggcatgaagccctggggaaactggcagtaggttttggtttttattttttgagacagggtctcgctccatcgcccaggctggagtgcaatgttgcaatcatggctcactgcagctttgaactcccaggctcaagcgatcctcccatctcagcctcctgagtagctgggactacaggcacaggccaccaaacctggctaatgtttaaattttatgtaaagatggcggggggggcgggggtctccctatgttgcccaggctggtctcgagctcctgacctcaagtgatcctcctgccccagcattccaaagtgctgggattacaggtgtgagccactgcctggcctggccgtaggtttgtaactgtttcatagaagagccctggagaagacagtagaatgagcctatctagtttaaaaaataaagaagcacgttgatttcaaaaaaaaaa

SEQ ID NO: 64646 - DNA, 1148 bp, Homo sapiens
agtcatgcgatgaccatgattacgtctagcctggccgcaggcctagcacgcacctattgctgacaccctgagtttaattttgttacccgccgtgcggcacacgtgggataaaagctgaaggaggactgtaacaacactgacaacaaagaacggaagtccttccagaaggagcttgggatggccctactgaagatggactgccagggcctggtggtcagactcatccaggactttgtgctcctgaccacggctgtagaggtggcccagcgctggcgggagctggctgagaagctggccaaggtctccaagcagcagatggacgcctacgagtctccccaccgggacaggaacggggttgtggacagcgaggccatgtggaagcctgcgtatgacttcttactcacctggagccatcagatcggggacagctaccgggatgtcatccaggagctgcacctgggcctggacaagatgaaaaaccccatcaccaagcgctggaagcacctcactgggactctgatcttggtgaactccctggacgttctgagagcagccgccttcagccctgcggaccaggacgacttcgtgatttgaatgggtcccctcccctcctgctgctctggagtgcaagccctcttctgccctgcgtgccctgctgtcaccgcggagctgaagagggaggaaggggcggctgctcagacagatttagggcccgccagctaggctacacccatcatgcgccgccctcctccatcgagggagaggcctgaagggactgcctactgcagctcgttgccaatcacatagctttctatttgttaagtataaatttaaatttaaaatcacttttttaacgaatggggggaagggatctatgagaaaggtggtatctaatttttttatggaccataaaggtttaaaagaaaataggggcacagggtgttgaggtttttatgttgttatagacctttttaaattatgttagagatgtatataggtatttaaaggtcactgggagcatttctgattcccgggccacacttttgcatttcaacactcaagcccgggaaaagatgctcgttcggatgttgtacctctttcactccctgcgagtagcactgtgaatgacgtattaaaaagtggctttt

SEQ ID NO: 64647 - DNA, 3675 bp, Homo sapiens
ccatcatggagcacctgcgggaattcctgttaacaggccgtgaggaccttcagcctgtgcagatccagagcctggagacactgggggtgctggcacgagcagtgggggagcccatgaggccgctggctgaggaatgctgccagctgggtctgggcctctgcgaccaggtagacgacgctgacttgcggcgctgcacgtacagcctatttgcagccttatcgggtctgatgggtgagggcctggcgccccacttggaacagatcaccacgctcatgctgctgtcactgcgttccaccgagggcattgtgcctcagtatgacgggagcagctccttccttctgtttgacgatgagagtgatggggaagaagaggaggagctcatggatgaggatgtggaagaagaggatgactcagagatctcagggtacagcgtggagaatgccttcttcgatgagaaggaagacacctgtgctgccgtgggggagatctctgtgaacaccagtgtggccttccttccatacatggaaagtgtctttgaagaagtatttaaactgctggagtgccctcacctgaatgtgcggaaggcagcccatgaggctctgggtcagttttgctgtgcactgcacaaggcctgtcaaagctgcccctcggaacccaacactgctgctttgcaggctgccctggcccgagtcgtgccatcctacatgcaggcagtgaacagggagcgggaacgccaggtggtgatggccgtgctggaggccctgacaggggtgctccgcagctgtgggaccctcacactgaagccccctgggcgcctcgctgagctctgtggcgtgctcaaggctgtgctgcagaggaagacagcctgtcaggatactgacgaggaggaggaagaggaagatgatgatcaggctgaatacgacgccatgttgctggagcacgctggagaggccatccctgccctggcagccgcggctgggggagactcctttgccccattctttgccggtttcctgccattattggtgtgcaagacaaaacagggctgcacagtggcagagaagtcctttgcagtggggaccttggcagagactattcagggcctgggtgctgcctcagcccagtttgtgtctcggctgctccctgtgctgttgagcaccgcccaagaggcagaccccgaggtgcgaagcaatgccatcttcgggatgggcgtgctggcagagcatgggggccaccctgcccaggaacacttccccaagctgctggggctcctttttcccctcctggcgcgggagcgacatgatcgtgtccgtgacaacatctgtggggcacttgcccgcctgttgatggccagtcccaccaggaaaccagagccccaggtgctggctgccctactgcatgccctgccactgaaggaggacttggaggagtgggtcaccattgggcgcctcttcagcttcctgtaccagagcagccctgaccaggttatagatgtggctcccgagcttctgcgtatctgcagcctcattctggctgacaacaagatcccaccagacaccaaggccgcactgttgctgctcctgacgttcctggccaaacagcacaccgacagctttcaagcagctctgggctcactgcctgttgacaaggctcaggagctccaagctgtactgggcctctcctagactgcaggctgcagccagtccagagagaatagagcctgcccaggccttaagaccacctctcagcccagttcagttctgccttaccaaagattctgagactcatacccatttggagccagccccacttgctgccttacagggctgtccctgaggctggatctgttacaaatgagtcatgacatcatactgtaataaaagcagcttgttttctgcttgaacaatagctctgagagcaagaaggctggaaatgcacattcagaaatgaggtaagcaggacccagtgaggcacgacgtggtttactagaagtggccggtttcctggcagctttgtaaatggactctaacctcagtggaatctgggccccggctggatcaggaggcgaccatatggcttttcttgtttcacgtgaagaatctgttgcgctgagagcaccaggagcaggtagaagacccgggcagccatcctgcgggggctgagaggtgacaccaggctgctgaagtcgggctccctgttagcctgcagctccagtgccactgccctgtgcactgcttccagtgagagcagctcgagctctgggggcagcaccaaaggcatctccatgggcacctcagggagttcaggcaccacgggcaatgcaggagcttctggcgcctccacctcaggccaggcccaccgttcttctggtgggatgaggctgatgcgggacttctcctcttcagctgcctctagggagatctctaaagacaccataaggggaacactgggctccagggcctccctcgggacctcaatctcacttggaacttcaatctttctcctttcctcctcagcggctgcctcctcaggcagctctcgcctgagggcttttgggggtggctgggcacaatgggtccagagacccagtagttcagggggtagccagccagagagagttggggttctgaacaactccgcagggcctctgatggtcctctcgggcggctgcaccatgggacattcccagcagtgggctctggtttgcagttgttcctggaatttctccggggagatctgagtctccttgtcccagaacagtaaccggcgacgacggcggcggcgaggaggtggggggactgggggcctcctctctgggctgggtggggctggcagacgcagctcctccgggggggtcacctccatgagtagggccccaggttcccagcctgtcagcctcagctcctcaggacccagtgcctctcctattccttccacctctgcaggagctggaggtgggagccgcgggatttctaacaagatagcttcttcttcctctgcgatcagcaggtccagttctcggcggctgacctctgggagctcccgttcaccctcaatctccagcatccgtatgggctctgcctccaggatcgtgatggcctcaggtggcagcacagtgaccggaatcctctctggctccctgggctctgtaggaacttcaggagggatctcttcaactctctctgggattgcagcctctaagaggtgtcgaatctgagggatatcgaaaggactaggaagtctgggatccacagacatcatcccaaaaaagggatctggagcatcttctagggtctccatcatggccaggtggttaggaagcagcaggctgggtagctcagtctccatatctattcggatctgcagctgggcacggtggaggcgctccaagatgtgctggatgtcctccacgaggtactggcattgttgagaatagacgcggatcacaccgatctgaagttgggctgagagatagagggagaagcggggccgcggcaggccgggctgcgggggttgcactcgtaccagcacgtaattgaggatttcctcgcaggttttcaccacattcaccctcaggtattcgcgcttcaccaaccggctgccgcgagtcgccgccagccagatggtggcaaagcagccggtgtggcgctgaagcacgttgggatagtagaacat

SEQ ID NO: 64648 - DNA, 1747 bp, Homo sapiens
gcgaccgccaactggacggcgggcttcagccgtgggcccacgccgcccgcgcttgtgggcatccggcccgcatggccgggccgcggcgcgcgccgcctcctcgtgctggaagaattcaagacggagaagaggctgtgcgagatgttctacgccgtcacgctgctcttcctgctcctctgggggccctacgtcgtggccagctacctgcgggtcctggtgcggcccggcgccgtcccccaggcctacctgacggcctccgtgtggctgaccttcgcgcaggccggcatcaaccccgtcgtgtgcttcctcttcaacagggagctgagggactgcttcagggcccagttcccctgctgccagagcccccggaccacccaggcgacccatccctgcgacctgaaaggcattggtttatgagggaggccccgccacatagacccccaacccagcctttccctttggctcggacggtgacgttgtatcttttccttctggcccctgtttaattttctaagctgccttcaaaatgactcgaagtggacagacacttggattgtactgactcctttggggggggggtgggtgaggagtaagatgctcagcccactccagctccgcacattcgtcctcctaactcgactttcttcctgacaataggccctgcagtctttttgtagcggtactgacgtcttttattccatgtgtggttcctttttttctttttctataaaggctgtactaattttcttcatgcaacgtttcctaaagaccatggccagttttctacagaagctattttttgacaacctcaagtgggcattacattttgcagtgaagtagagggaacctagggggacttcttcacaagttagatttcttgaggatcttctgttggaagcaggagaaagtggggggtgggggaagttgtccgaaatgccctctgaattgccggctgcagggtccttgtgctgcgctggttctttgaaagtctcagtgttgatattgaacttaaagagcagagatggagatcagtagcaaggcagtcatttttttaaagcagtaagtaacaagtaagatttggttcccggtttactttctgctgctaaaaaccacgtcagtgacaactgctctctgtattatagcaatcttgaatggaaacatttctgtcaagttgtaagttttaaaagagtaaagtgttttggttagtaatgatgtggagaaaaatacagtattgcatgtgttcgtgtgtatagattgtggttcgaggattgggagggctctgagaagcagagtactacatcaaaattgttttaagtattttttgccaataaaaaattaattttatggaaatggcttgtgctttgagaagcccagttttattctgtcttatgaaactaatttccactttgaaaattgttcttctgttgtttatggtataaatgaatggaatataatgatatcctccttctaggaaacaaagcatttccttaaaatgtttgctaggttaagctgtgctgttctactgatggttgttttaaattaataatgagaactataatttaaataatatttctttgttagacattataatgttaaactgaaagactaaattctgcaagtactatataatatttttggcttataatgctacatttttattaatgtaccttccgttttgaggatttatatctgtatttctctttgcattatacaaatataccagtattttcattctggaaaaaaaaaa

SEQ ID NO: 64649 - DNA, 856 bp, Homo sapiens
agtgtataacagacaaaccatccaggtcagtttaatgcagaatggctacccagtgatctcggcctttgcaggagaccaggatgtcaccagagaagctgctagcaatggcgtgctgctgctcatggaaagggaagacaaagtgcatctcaaacttgagagaggcaacctcatggggggctggaaatactccacattctcgggcttcttggtgtttcctctataaacacagagccccctagatggtgggggaatggcaaactggacccaggactccgccctttaaaacaccctgaacttactggaattggacaccttgtttccaacctccgtcagactgttgcagtagaagaatgatttcctttgaaacctccagtacttttgtttttgttttttggaatactgacaattcctcgggaacctggcctctaattagttttagatgacaaggtcttaaggagaaatgaaattatcgatttgagcaatttgtacctgtgattgtaaagtcaatatcggattttattgttgggaccatggacctcttttgtttgtatgttgtattgtcgtcccaacggaaggagagctcctgactccaggatgggctgcaggttgcagtcagggcttgaagtaggagcccagcaaagaaccacctgctggacagtcctttgacatgtgttctgtgtgtgtctgtatagccttaagaaaaagaatggcttcactttcattctgtattcttccccccaccatgtggctgggaggacttgggagggggatggggacattggggaacctgttcaagaagtgctttattccagaggaagcaaatttttgcacgattgggactgcaatttttgttttg

SEQ ID NO: 64650 - DNA, 4451 bp, Homo sapiens
ttttttttttttgcgtttcctcttcgtaagagaagcctgaggcagccagggagagggtccccaggcccctggcagggagagggtggcaccctcctcccgggccctcccaggaggggcagctggcagtggggcgcagtgccgggggctcagacataatactccttgtctttgttcttcttggccttgctgggcgtcttgggggcagccggggccttctctttcaccaccgccccattgctctgggccgagttactgatgtagtttcggctctggtccacctggtaggagccctcatcacgattgcggtacttatacatggcgtagaggaggatgaggatgcagagcgccgccgccgccacaatgcccaccaccatgcccgtggtgctgctggactcccggatcacctccactgcgcccggcgggccccgctccccaggccctgtggggttggctgtgggcagatgggggaagccgggggctgaggtcacgccggggcgcaggggagggggcctccgcggctcaaaggacgtgggggccccgggccccaagggcgggttctccagcaagggctgaagcgggtctcggtggttcatttttcccgccggcaggttgggggccggggcggagggggcaaacagcaccccaggggcgcccgtggccccatctgtcctgaggttgggccggggagcgggtttgcggggtgacaggagggtggtgcggtccgtgaccaggggaaaggtggtgtaaaagtcctcgtcgtccgtgggggggaggctggagtcaaagacctccccggaggcgaagcccgaggcctcgatgggctcctcgcagtcgctgtcgtcccgctcggcctggcacgggcccccagagggcgggcggcgcgcggcgggcgggggcagcgtgtcttgggtggcgcccactcccgtgaggaaggggtagaaggtagggggcgggggcacgaagggggatcgggtggccacgggaggggggtctaaggagtcctccgtgataatgggcaatattaactctcctccagtactgggctcacactcctccaggtcctcatcatcgcttggacactcagcagaggccaccagcaggtcatctgtgttctgggtggtgctgtccctcagtgtgggggagcggccccggcgcgtggtggtagtggccatggtggtggtagtctccatgatggtggtggccatgtcagccagcagggtggtggccgtggtctccgcactgagcagcacggacggcccctcccccaccaggcgcaggtgaccctcagtccgcacattggggtcgctctcggcggccagcgccagcaccttgagcccattgtagtagaggccggacacctggccctggaaggggcggccctgatcccggcccccgatcttgatggcagcctggctgttgaagatggtcagctggcggcctttgtcgagcagccactcatctactactcgaccaagccggtaggggattctctgtctagcaatcgccaggcgctcgttatcaaagtttcctgccgggtaccgctcgttgaccggccagctgtccacctgcagggtggcgttgccgccgcttcgagtgaagcgcaccacgtggtatttgccgtcgcttactatggcgttgggctcgtcgatggtaatgtcgtccgtgcccacgttaaagatcacccccacggtgccctggtcgatgtgcagctgcaggtagtctccaaggccggaggcgctgtccacccgcaccagcacagcgctccgctggtgggtgctgaagcccacggccaggcgatccatcctcgtgctgggcctgtcattggggggccacgtgtaggtgatgagcgctccccccttcccaaagatgtatgtggtcccgggatcattgcagacagggcctccataggaagtcatggtgcagtcgcaggtgaagccatcccactgctgcaagcagacgccctggttggcacaggactcttcagtgcaggtggtgctggggccatcacagcccctctccacctgcccaatgcggtgcagggcgtcggcgatgaggtctgggagacgtccgttgaggtccactgaggccaggcagccctgaaagccatcccgggaggccaccagcttgggcaggttgctgaacatattcttgctcagaccgccaatgtacaactcccctttgagatcgaggtttcgggcgccattggagtgctgcgtgacagtgcgggagtcaatcttgagcgtgtgcacgttgcctgggtccctggacaccaccacgttgtgccactggttgtcattgactggtttgtctgagttccccttcatcaaggacgggccattccccaggtcaaacacgtagtggatgtaccccttgaccagctcgatgacaatgaagtcattgccgttgcccgagttgaacagaagaagcccatcaggggccgtggtcttgaactggaagaagaggtgcatggaagcataggcttggagcgtggcgagtgccaggtagctgctgcgactcttgaaggtgacgggatcggccacaatggcacgcaggccaaagcgagcattgagctcacagtaggtgatgtcaccatccttgcactggtccatgtagggctggccattgaacacgagcccactcagatgcccgatgaagttggagggcaccacggagataaaccgccgctccgtcatgatgcccgtctcaatgttgtggaactccagccgcatatgggctcctgccatctgtccctccacagtcacgttgtccacagacagctgcaggctcttgccacgccggaccaccctcaccgtgtgccactcattgtcattgagcttgtgccccgcaaacagcgtttcggggcctttactgggtgcgcagccgacgcgcaggcagtcgaggttgacagtgagcttcatctgccccccatccagctccaggcgtagggtgtcggcagactccctggaagtggtggccatcatgagtccgtaggcccgctgggacatgaaacgcagggacacatcctctgcctccgtgtgcatggcgttaggcagcatgatcttcatgtacatggagccatcgtagctcaggaccgtggcctctctctcacagacccgcccaagaaagccggtcccgatgcagtcacagatgaagcggttccagccttctcgacagacgcccccattgcgacagggggcagatgcacactgcttcagcgtctcccgggagcaaaagggggcaacgcccacagccccctgagcctcagccaggccccggaggtctcggctacgcccatctatgaagaggtcccgcacacagcccacgtagcctgcccggagtgctgctgtccacacctctgggggcaggggcaggtccacccggcccccctcagggagaccgcccaggtacagctcactctccaggtccagaatctcgctgtctccagtggccaagaacggcgtgctgcgactattcactgagatggagccttttcgcccatccctctggaagtccacgtgacaccactcgccatcattgaccttgcggctggatgcccgcagcttgatgcccccagatcccatgtccagcagaagatagaggtggccgtccaatagctccatggcaaagtagtcggcccgctgagcagagctgtggctgccagctccacccccagcccgccggccctggctgaagagcagcagcccattgggctcggtggtgcggaagtctagggagatggagccagtgcgcttagcgctccagcggggcagcgccacaaaggcctcgggactctcaaaggtcacagggtccagggcagccacatcctcacagcggaatgacaagtccccctgcagcttcatcttggggtccccttcctttgccaggcgggatagttccaatttgaagtcattgttcttatagaccacgtccttgaggcagcccatgaagttgttgctgacgggcgagcccggcaggtcagctgtgttggggctgcccccaatgtagaagaagtcatcagagcccagcatggtgtaatcctcctgcgtgtagcctgtggtggtcaggatcccgtccaccgagatggtcaccatagcgtgtccaatccctgcgtgctggcgcaggtttcgggtgacccggacgtcgtgccaggcgttgtcgttgaacttgccattgacgggttccacaagggcctcgaaggcacctgagcctaggttgatgaccagccagacagccccagacttgagggacaggttgacgtagtcggccgacttgcctgtatgcagcatcaggccgttgcgttgcagggtgcggaaggccagtgtgatctcatcagtgctgctctggatggggttgtgtgacaggtcgtagcagaagaactcattgcctttgaaggtcgccacaaactcctccttgccttttgttggctggtgcacatcgccggctcctcctct

SEQ ID NO: 64651 - DNA, 1230 bp, Homo sapiens
ttttttttttttgggatttcaaaagtttatctcaatctcctcattcccagacttccaggtgggaggcaggccgggcagtaatgtgagcatctcaaggacaccacagtcactgcgaccaagccagtctgtgtcctcatttacacaatgaaggcgatggaccacatagtctctgacgtcccactgcaccctgacagctgacaaatctgtttgtcctcaaagacaggtctgagagggaggaaaactgatggggatgatgagttagagctccgggctccctggggctggaggctcatccatcagctgccggaggtgagaggctgccttgtccagttttgacaattccagctggagggaagaaagcttttgttgcctctgagtccctgcctccccttctgatggggtcctggctgtgaggctatcaagctgcttctgcaacttgtaccttcgggcggctaacagaggtagctggatctgcgggtccaccaggccctgcagctccatgtagacttgagccgtgtcactgagtggagcctgggcccagccggagggagctgctgtgcctgggggtaacaggcccacagccccacagtagcccagggtgcccaggggctccaagaaggcctcgaagaggccctggtccccaggctctgagctctgcagcagcactcggggccgggctttggtgagctggtacgtggcttggagagcccttagcacctgcacgacctcttggacccgggagaagcgccgctccagctctggctggcgccagtgctccaagctgcaggcgctggggtagggggcaaccgagatgctgggggcaggggggcaaccaggcctggggggcagcctctgccagagctcttcagccaggaagggcatcagtggggccaggaggcggaggccgaggtcagcgcaggagaacaggacctgagggggccccagggggcggggcgagtgccacagcacgggcttcacagcctccaggtagacgtcacagaggttgtgaagccagaagtggtgcagggcatgagtgacgagcgagagctctcgggtgaggaagccccgctcacactcctgggcagccagggcaaggcggctcaggatccaggcatccatcggggaggagggagacagctcctcagcagactgtggcacaaatttctcccctaaagcattgaggataaagcgaagagccctcgtgccaagcttggcgtaagcatgaacagc

SEQ ID NO: 64652 - DNA, 2222 bp, Homo sapiens
aatggagggcagtagaaagaccacagctcgcctcaacctggggtttatggggctcaattattatcccccgccagcttccaaattgtttttgtttactttttttttgtttcattttctagttattttattttgtttttttttttttaaaaatatgtttatctttaatgatccaagattctgcaagtcacgctgatatacccagaattgggtggaaatacagcatctcagcagtgctactgccagcctgggggtggggagctggatgctggctgaaggacccccatggtgaagtcgattccaacctcacgggagcctcagtgccctatctccatggaaaccagcctggcactgggatggggccctagggagcctgcatgaacatctctgagaggtatttcccattaaaaacaaccacaggtgcccacccccaccccaagctactgcccagctccccctcctctctgtgttgtcggccaagataaaggaaatgggagtgaccacttaacgacaaacaaaagcagattgtacctcctattagggaagaaaaaggaagggaaagggtagtaagggagctgcacttcaagctcagaattctgccaagaccctagagcggctatggcagacagcggtgcatgactgccagagggcagcgctacccaaacccctggaggtaccctttgttactgctggggcccctgctgctgtgggggaaagacgggtcttcaaggctgcttcctgccatctagcgctgcccaatgtttggaccaaaaggggatggcacctaggatggctctacaactccatactcagtacgaaaagagggctcccaggatctcaatgtggtatcagggatgagagtttgcccaaactccctccttcccaccctgctggactgtcagagctctgggctaggaagaactccagggaaggccaggatgagtgggggaaggagacaagaaaatggtctccaatttggcatcaaaacagagtaagttcaaagaaacaaaaccttgatttttttatagcaggttctcctggccagctcatgacagcaggtctccacccactcagggatggcccaataaaaagttgggcaaagcaagggcatggctaccctcagggcagtgcatggaactcagaaaagtgagtctacaggatgcaggagagaacagcagagcccacagctctgccactctgatatgtcctccatcagtcccacgtgccctaggcactgacctcatacctgcctcaggagcagcttccttcaggctgagtcctggcaggggaaagttcccaggcaggtgtcccagaaggaacatgagtgttctctgcagggccctgcctgagctcttcaggggatggagaggaggccacccactcctcatgccaggtgcaatgctccccagtcccttttcaagagggggaagaagccagcactgtgggccccaggtggccccatctcaggaatgacagggcattctgcaggggtggcacattctgaggctcttaggccctgtgcatctggatgaaggagaggacgtcctccttggacagcttgtcctggtcctggggcttctgggagtcatgcacacgaatgccatccccccactcccagaagagccggccatagtagcaaatgtgaaatggggcaatggagtctgcagggaggtcaaaagtagagtccttggttttcttgttgtagaagaacttcttcttgaagcttttgctgaatcccatagtccagggctcattcactgtcctgacgatgtagaggcccatgggtacaaagtgccggtcatcacgccctgtgtagctgagctttggggtgccactggagcccttgatgatcttcatctccaacctgacaaaaatcttctccatctcttccagtctgtacacctccttcaccctgatgggattcatgtcgggccgactaggcttggaaacggctttcacaaatttctcggcaagctgaattctacaatccaaacagtctctctgagaggcaagccaaggatgcctccaccagcacccctacccccagggcattttcacagctccagtaggagaaccttctgaatctgcggcaagactgctctaagaggcagcacccatgtcccccaggaagcccgccctgcccttctccaccgacgtctttattcctgcgcctcgtgccaagttgggcgtaatcgtgttctactgtatcaatcgcaccccccccg

SEQ ID NO: 64653 - DNA, 2842 bp, Homo sapiens
caagggctttcaggtcttcattcttttggagaacgccctagaccatgagggtatgggaagtctcatggcaccaggagagccacctccagggtgaggggatgtcagacaggaggggctcaggagggcgccctccaggctgaggggatgtcagacaggaggggaccaggagggcgccctccaggctgaggggatgtcagatacgaggggaccaggagggcgccctccaggctgaggggatgtcagacaggaggggatcaggagggcgccctccaggctgaggggatgtcagacatgaggggatcaggagggcaccctctaggctgaggggatgtcagacatgaggggatcaggagggcaccctctaggctgaggggatgtcagacaggaggggaccaggagggcgccctccaggctgagcggagacttttactctgtgattgacaacagttcctgggcaatcctagatcagtagtcagaaaaccttaactggaaaagagaatgcatggcgttttcatttctctgaggaagccgagaaactttaattaggtgacggggttccgagcacttaagcagatggggtgcggtgaaggcccagggaggaggagggcagggaggtgcacgtcctctgtgccccacacactttcaaccactgcaacaaacaagcacccaagagaggctgtgcggcagagccctgcacccacaggcctttgacagcacagtgaggggcctccgcacgtggcctcgggacgctcactcgacgcacacccggtgcatcacactggcacctaaagacaggccgtgcagctaaaaggagcacgtgtggccaaggagagcaatcagctgtcccgcgtttctaaaggcagggaccgaggctgtggaggggcgagcagggcaggccggcggaggctacttgagcagcttggccacgttcaggctgggcaccacaatgtccttgaagaggggcacgtagctggggctggcctgtgctgggccctgctccagggtctccatgatggtctgcttcatgtcacggctggcgtccccacgcacagccagcagcgcaccgatgtggtcatccctgatgtctggatacttgctgaccagagtggagacctccaggtagagcagagaagggtctgtcagcttgatcacttcggccacagccacgatggtgtcgcagtatccgtccacgtcttccccgaaaccggacgccagcttccggaacaggaagcgcagctgctctgcctccctaaccatcttctcggcaccctccttgcgctcctccgggctccggaaggaaatgcgcttctgcatgaccgcccgcaggtactccaccaccacgcgccggtgcgcctcggccgtcatcctcttcttatacggctttttaattttggcaaaatcgttgaaatagtcttccacggtgacacagataatgtctacagcgtttgaccctaatagccacttcttcgtcatcaattcattcagatgttgctccaggtccaggaagacctcctccagcaaaccgctgcagccctccttcgcgatggcgtctaaaatcccgtccatgctgggctggctcggagacacaccctcttccacttcattctttaaatactttctttttaaactgactatggattccttgaaggtctggcagttgttgatgatggcgatcatgtactgaacgtagcagtgagggtgctgccgattcctcaggtgctcttctttatacagctgcgcttcatctttatatctgcttaggaaagaattcatctgctgaagacataaaactagtacctttgttttcaaatcttcacttatctgagcagcaacttgaagattctgttcaaacatctggaagacaatggcagggagtgtggtctggtagtacccgtcctggtcggcttctggctctgtctctttgacccagtctttcttgtctgtctccagcgctttccgcagccaggcgatgatgtttgaagtgagcgtggacatgtacgtgtcaagcagctcagagaccacgtgtggagaaagcaatggctccagggtgccgacatccacttccggggccagctccacgttcctcatcatctcagtacttgtgtaggtgtttaagacccacgtcaagaggctcacgatctcattggcttccaggtcttccgatgcgaggtcctgcatccgcgtgctcagggcttggtggtacatgttcaggaggttcttaaagatctcatagtggggaggaaagcactgaaccatcaggtttttggcgacaatgaggtcatccaggacgtacttccttataatttccaggtggcggacaagccacatcttgtcagactctctggtatctgcctgtgtgccctcaattctggtggtcacagtcctctccaagatggtgaacattttctccttccaattcttgggcctcccaggaggaacaaagccagtttgctttttccggtcaagtatgcgcctgtcaattttctcttccctttcaatgatcctgacaactgagaccagcaaggtggggtcacggcggacagtgaccagtgacctctgcagcaccatccacagctgcttagccagctcatcagagagcccctgcgtgctgccaaagtagccatggatgagggtcatgtcacgcgtgttcccactgtccatgcggtactgctcgtacatcagcccgtcccgggagcattccaggtccatcagcttccggtgggcttgcaggagtgccccttgttcaattaggtcctgggtctccctcacaatctcaggcactgagaagatgttcttgaggttctccacggctgcggcgagctggctgtgctgcaccacggcg

SEQ ID NO: 64654 - DNA, 1299 bp, Homo sapiens
cccacgcgtgcgatgtttggttgcccctccctgtagccttttcctggggggtggggcccccgcaggtgtgattcgctcactgcacagcctgggccgcctggagcatgccttctgcacagagacccggccctacaaccagggagcccggctgacggcctttgagctggtctatgagcagatccccgccacccttatcaccgacagcatggtggctgctgccatggcccataggggcgtgtcagctgtggtcgtgggagctgaccgcgtggttgccaacggcgacacagccaacaaggtgggcacctaccagctggccattgtcgccaagcaccatggcattcccttctacgtggctgcccccagctcttcatgtgacctccgtctggagaccggcaaggagatcattattgaagagcgaccgggccaggagctgaccgatgttaatggggtccggattgcagcacctgggattggagtttggaatcctgccttcgatgtcaccccccacgacctcatcactggtggcatcatcacagaactgggggtctttgcccctgaggagctccggacagccctaaccaccaccatctcttccagggatggaaccctagatggaccccagatgtaaccaactcaactctccctagcctgcctctctaggtttttcaatacatttcttgaatggctacccaaaagctgaccgtccagcccctgaccacacttgttcctagtgcagggagctcagacagggccttccatctagagcccagcacctagagccaggctgcccagattcaaatcctgactccgccacttttcccactgtatgatcttgggcaagtcacttcacctctctgtgccttggtttcctcatttataaaatgtggataacaggccgggcgcagtggctcgcgcctgtaatcccaaggtgctgggactacaggcatgagccactgtgcctgaccttacagcagtattttttaaaaatcaaaattaatgcaaaaatccatgatgaggccaggcttggtggctcatgcctgtaattccagcactttgggaggatcccttgagcccaggtgtttgagaccagtttgggtaacatgggaagagcttgtctctacaaacaaaaatttaaaaacaatgagctgggcatggaactcacacctctagccccagctactcaggctgaggtgggaggatggcttgagcccaggagttcaaggatgcagtgtgctttgattgcactactgcgcttcaccctgagcaacagagtgagaccccatctctttaaaaaaaaaa

SEQ ID NO: 64655 - DNA, 728 bp, Homo sapiens
ccgggtcgacccacgcgtccgcaaatatatgtgaggtgtgcaacaaatggggacggctgttctgctgcgacacttgtccaagatcctttcatgagcactgccacatcccatccgtggaagctaacaagaacccgtggagttgcatcttctgcaggataaagactattcaggaaagatgcccagaaagccaatcaggtcatcaggaatctgaagtcctgatgaggcagatgctgcctgaggagcagttgaaatgtgaattcctcctcttgaaggtctactgtgattcgaaaagctgctttttcgcctcagaaccgtattataacagagaggggtctcagggcccacagaagcccatgtggttaaacaaagtcaagacaagtttgaatgagcagatgtacacccgagtagaagggtttgtgcaggacatgcgtctcatctttcataaccacaaggaattttacagggaagataaattcaccagactgggaattcaagtacaggacatctttgagaagaatttcagaaacatttttgcaattcaggaaacaagcaagaacattataatgtttatttagccattcttatctcctcccttcagatcctctggcagctagctacgcaatgtgcctgtggtcccactaatctgtgactgctcctgtggaaactccacatcacaattctccaaaatttatcattgccattttaaaaccgtcttttcagctttcaat

SEQ ID NO: 64656 - DNA, 1922 bp, Homo sapiens
atgggaagtgtcacagttcggtatttctgttatgggtgcctttttacatctgcgacctggacagttttgctttttgtttatttcaacttcagtgaagtgactcagccacttaagaatgtgcccgtcaaggggtctgggccccacggaccatctccaaaaaaattctatccccgtttcactcgaggcccaagtcgagtgctcgagccacagttcaaagcaaacaaaattgacgatgtgatagacagtcgtgttgaagatccagaagaaggccacttgaaattctcttctgaattaggtatgatttttaatgaacgcgatcaagagttgagagacttgggctatcagaaacatgcttttaatatgcttatcagtgaccgcttgggctaccacagagatgtgccagacacaaggaatgcagcgtgtaaagaaaagttctacccacctgacctgccagctgctagtgttgttatctgtttctataatgaagcgttttctgccttgcttcggacagtgcacagtgtcatagaccgcacgccagcacacctgcttcatgagatcatccttgtggatgatgatagtgactttgatgatttgaaaggagaactagatgaatatgtccaaaaatacctccctggaaaaattaaagtcataagaaatacaaagcgtgaggggttgattcgagggagaatgattggcgcggcccacgcgacaggagaagtccttgtgttcctggacagccactgtgaagtgaatgtgatgtggctgcagcccttgctggccgccatccgtgaggaccggcacaccgtggggtgcccagtgattgacatcatcagcgccgacacgctggcctacagctcgtcccctgtcgtccgcggagggttcaactggggactgcacttcaaatgggatcttgtccccctttctgagctaggacgagcggagggagccactgcaccaataaagtcaccaacaatggctggaggtttgtttgccatgaacagacagtatttccatgaacttggacagtatgatagtggcatggatatctggggaggagaaaatttggaaatatcatttcggatctggatgtgtggcggtaagctcttcatcatcccttgctctagagtaggacacattttccgaaaaaggcgaccatatggatctcccgaaggccaggacaccatgacacacaactctttgcggctggcacatgtctggttggatgaatacaaggagcagtatttttccttaagacctgacctgaagacgaaaagctatggcaatatcagtgagcgtgtggaactgagaaagaagttgggctgtaaatcatttaaatggtatttggataatgtatacccagagatgcagatatctgggtcccacgccaaaccccaacaacccatttttgtcaatagagggccaaaacgacccaaagtccttcaacgtggaaggctctatcacctccagaccaacaaatgcctggtggcccagggccgcccaagtcagaagggaggtctcgtggtgcttaaggcctgtgactacagtgacccaaatcagatctggatctataatgaagagcatgaattggttttaaatagtctcctttgtctagatatgtcagagactcgctcatcagacccgccacggctcatgaaatgccacgggtcaggaggatcccagcagtggacctttgggaaaaacaatcggctataccaggtgtcggttggacagtgcctgagagcagtggatcccctgggtcagaagggctctgtcgccatggcgatctgcgatggctcctcttcacagcagtggcatttggaaggttaaggtggatgctgtggcgggaacgttgcttcatcaggcgttgcctccggtgtggagtttggggctttaggaaagcctgggttgggtggagcagaacc

SEQ ID NO: 64657 - DNA, 2234 bp, Homo sapiens
gctatgttcccaatttattaggtatcataccttatgcaggcatagatcttgctgtgtatgagctcttgaagtcctattggctggataattttgcaaaagattctgtaaaccctggagtcatggtgttgctgggatgcggtgccttatccagcacctgtggtcagctggccagctacccattggctttggtgagaactcgcatgcaggctcaagccatgttagaaggttccccacagctgaatatggttggcctctttcgacgaattatttccaaagaaggaataccaggactttacagaggcatcaccccaaacttcatgaaggtgctccctgctgtaggcatcagttatgtggtttatgaaaatatgaagcaaactttaggagtaacccagaaatgatgttgcattttttgctttagcctgataattgaaactttcaacaatctctggagtgactttttctcctcgaattgaaacaagtctatggcaaaagaagctgcatttttttcacaaaagggaagatggtaacaatggtcacttcaaacttttgggctaaattatatgtacacagaaatgttcaaaatcatagttttaatgtgttttgaaaaggccacacaattatactttatcttttcttaataatcctgcaaatctctgccctgaatccgaaatctgaaaatgtactggcttgaacaaaatttgttttgtgtgttagagttataaatcattaatctttatttcgggtggtttacgtttatgccagttcctttatatttaaatttcttgttttatatattttgaatgtctttatagatttctttaaatttccttatagaaccattaatagaaaatcattacatttaaaatataccttacagcaaaagcatccaaataagtatagggtttatgtccttatttttctttcagctgaatacgaatgaacacagtggtggaatttctgaagggaagtgatgaaattatatttatttcagtgggcacttttccattttaccactgtaccattatttggttcctggagttatacactaattttcagtatattactgttaaattaccaacacaaggcaatttatttgaaagattccgtttatcctgccattgctttgaaaagcagcaggaaacgaaatcctttgacttgtatcagcttctgcagagcatctttgttttcctttgtcctttgtttcctaccttttgaatcagattccgttttagtcaggaagacttcttgggaccattcttagtaacctgaaatttcttttttaattgcatgaagtggattgatcatgagcaaatgatgtgcttatttctccctcactgttgaatatctttgaacttgctgttttcaatatgggcagcacaaaggtgagagatacatattaatagtagtatgtattactcttatacattagatacctatatttaaatgaaaggcccaatttgtaaacatatacattcatattctctcttgccccaagttttaggaacatgttaggatataggagacttaatttataataatgagagcatttttttattttactaaagccatttttatagtcaactatcttttcttatttgtgtgattagaacttagaaaaatatttactagttgaagttattatcagtttttaatttagttcttaaactcatttcacttctaataatttctgttataaatttccagcattttaatgaaaatctaatgatgtaataggcattttctttatttgaacctacctcttttattttctgaaccaaagagaaagatggactggtgtttgtgaaacatttttaaaaatgtagtttcatttatattagttatgtttgataaatgtctcagtatttttataatatgataagcctgggattctacttttagggttatttgtacttttgagtaatatataaagtgacaatattaaggtacatgatcagctctttctatttttactcgtaaaaattatggaaatgaataattttgctaacaactttgaaatttcaaacttctggaaaatatgaaaatattcattgttcattatgaatttaaattgtaaggtatgaatgtgatttgtctgtacatcttgtatcttttccaaaaaatgattctgtatcttttggaaaaaagccgagagttgaagatagtatatttctggtagtactgaatatttacttacagtttctatcaaaaatatatatttgtttctaaaaaaaaaa

SEQ ID NO: 64658 - DNA, 1017 bp, Homo sapiens
gccaagcttggcacgaggccatcctctgcattgacttgggcactgacatggttcctgccatctccctggcttatgagcaggctgagagtgacatcatgaagagacagcccagaaatcccaaaacagacaaacttgtgaatgagcggctgatcagcatggcctatgggcagattggaatgatccaggccctgggaggcttctttacttactttgtgattctggctgagaacggcttcctcccaattcacctgttgggcctccgagtggactgggatgaccgctggatcaacgatgtggaagacagctacgggcagcagtggacctatgagcagaggaaaatcgtggagttcacctgccacacagccttcttcgtcagtatcgtggtggtgcagtgggccgacttggtcatctgtaagaccaggaggaattcggtcttccagcaggggatgaagaacaagatcttgatatttggcctctttgaagagacagccctggctgctttcctttcctactgccctggaatgggtgttgctcttaggatgtatcccctcaaacctacctggtggttctgtgccttcccctactctcttctcatcttcgtatatgacgaagtcagaaaactcatcatcaggcgacgccctggcggctgggtggagaaggaaacctactattagctccccggtcctgcacgccgtggagcatcaggccacacactctgcatccgacacccaccccctcttttgtgtacttcagtcttggagtttgggaactctaccctggtaggaaagcaccggcagcatgtggggaagcaagacgtcctggaatgaagcatgtagctctatggggggagggggaaagggctgcctgaaaaccatccatctgtggaaatgacagcggggaaggtttttatgtgcctttttgtttttgtaaaaaaggaacacccggaaagactgaaagaatacattttatatctggatttttacaaataaagatggctattataatggaaaaaaaaaa

SEQ ID NO: 64659 - DNA, 1011 bp, Homo sapiens
  misc_feature (1)...(1011): n = a,t,c or g
cccgggtcgacccacgcgtccgaccagcaggcggagaggcaggtgagggacatgttccgggaggacgtcctaaaatggatggtcatcgtcttcaccaggaaggaggacctggccgggggctccctgcacgattacgtgagcaacacagagaaccgggccttgcgcgagctggtggccgagtgcgggggccgggtctgtgcctttgataaccgggccaccggccgagagcaggaagcccaggtggagcagctgctggggatggtcgagggcttggtgctggagcacaagggcgcccattactccaacgaggtgtatgagctggcgcaggtgctgcgctgggcaggccctgaggagcggctccggcgggtggcggagcgcgtggcagccagggtgcagaggaggccatggggcgcctggctgtcggcccggctgtggaagtggctgaagtcccccaggagctggaggctgggcctggccctgctgctggggggcgcgctcctgttctgggtgctgctccacaggcggtggtcggaggccgttgcggaggtcgggcctgactgacagcgcaggtcctaaaactgaaggcaacttggttaagggaggctgaattcttggagctgaagggaaaacttcattccaacggaaggaatcctgtagtttcaggcatagttttaatgacacagaaaactttgctgcatcacctttgcaactttgccaaagctcagagttcactttttaagtttttaactcattttaaatgatgtgtatgcagagttttaaaataaattcgtctaacaataacttcctttggtagttttggtagtctaatgtcaagtagcttgtagtggggacaaacgcatggcacagggaaaacaagtgccattattttcgagctttttaaaaaatttagactgcccctccttgataattttctagttcttatacatgggtagataggttcctttgtgatccttgtagacttttagcatcaataaaagaaatgtggnggta

SEQ ID NO: 64660 - DNA, 1201 bp, Homo sapiens
ttttttttttttcattctaagagcagtttttatttagaaatgtgcttccacaacttggtggccacctgggggcaggtagccccggcttgcttgttctctctttcctagcccaggaatcgggtccttgggtctaaagcacagggccaagttctcaaggatcaacatcccagacagctcccatggtctggggcttggagctggtatgaagggtgaaccaggttccatcctggactgtttatggttggagggcctgggcccctggcaccaggacctcagctccctctcctagtaagagctgggatcacccacaggccagctgtggccaggtcctggtggatatgacattgggaagaacaaggggctaagagaggctaattttctggtgctggatccagtttatcttcctgaggggtggaagccggggcaggagcctcatccccaccattgagggacttctgctgctcattgctgttgggcgagggggtcctgttgccctgggatccccagcgggtcaggcgctttagggaggagtcacggtgggcaagcagagggggctggaagcctgagaaggagctgctggtgaccggacgcttatctccaggctcaattggatgcatcagccggttcatctggacattccagtgtttcacgttggtgctggcctggcgcagttttctctgggcagcctccacatcctcgtcagccctctgccggttctgccgcacctcctccagctgctgctgggcctgctgcagggagcggctctgctgtgccatctcctgctgcagctcttccttctcctgctgcgcccgttcgatgtagcgctcctgctcctccttcagctgcatcaactgcttcagcttctcttcctcctcttccagcagtctggtctgagcgattcgcacagattcttcatctcgccgagctttcacctctagttgcagggcctcctgcaaccgctgctgcatctcctccagctccttgatgcgctgccgctgccgggcagcctcctcctccttcagctccatctcagcctgcatggaggcccgggcctgctccgcctcgcgcagttggccctcgagcgcctgctgcagctcgcggtgctggctgcggcgccgttcctcctcctcctgcagcagccgctcggcctgccgatgcgcctcctcggacgcgtgggcggacgcgtgggcggacgcgtggg

SEQ ID NO: 64661 - DNA, 1605 bp, Homo sapiens
atgggcatcgtggagccgggttgcggagacatgctgacgggcaccgagccgatgccggggagcgacgagggccgggcgcctggcgccgacccgcagcaccgctacttctacccggagccgggcgcgcaggacgcggacgagcgtcgcgggggcggcagcctggggtctccctacccggggggcgccttggtgcccgccccgccgagccgcttccttggagcctacgcctacccgccgcgaccccaggcggccggcttccccggcgcgggcgagtccttcccgccgcccgcggacgccgagggctaccagccgggcgagggctacgccgccccggacccgcgcgccgggctctacccggggccgcgtgaggactacgcgctacccgcgggactggaggtgtcggggaaactgagggtcgcgctcaacaaccacctgttgtggtccaagtttaatcagcaccagacagagatgatcatcaccaagcagggacggcggatgttcccattcctgtcatttactgtggccgggctggagcccaccagccactacaggatgtttgtggacgtggtcttggtggaccagcaccactggcggtaccagagcggcaagtgggtgcagtgtggaaaggccgagggcagcatgccaggaaaccgcctgtacgtccacccggactcccccaacacaggagcgcactggatgcgccaggaagtttcatttgggaaactaaagctcacaaacaacaagggggcgtccaacaatgtgacccagatgattgtgctccagtccctccataagtaccagccccggctgcatatcgttgaggtgaacgacggagagccagaggcagcctgcaacgcttccaacacgcatatctttactttccaagaaacccagttcattgccgtgactgcctaccagaatgccgagattactcagctgaaaattgataataacccctttgccaaaggattccgggagaactttgagtccatgtacacatctgttgacaccagcatcccctccccgcctggacccaactgtcaattccttgggggagatcactactctcctctcctacccaaccagtatcctgttcccagccgcttctaccccgaccttcctggccaggcgaaggatgtggttccccaggcttactggctgggggccccccgggaccacagctatgaggctgagtttcgagcagtcagcatgaagcctgcattcttgccctctgcccctgggcccaccatgtcctactaccgaggccaggaggtcctggcacctggagctggctggcctgtggcaccccagtaccctcccaagatgggcccggccagctggttccgccctatgcggactctgcccatggaacccggccctggaggctcagagggacggggaccagaggaccagggtccccccttggtgtggactgagattgcccccatccggccggaatccagtgattcaggactgggcgaaggagactctaagaggaggcgcgtgtccccctatccttccagtggtgacagctcctcccctgctggggccccttctccttttgataaggaagctgaaggacagttttataactattttcccaac

SEQ ID NO: 64662 - DNA, 662 bp, Homo sapiens
attttttttttgtgtttttcttcattctaatttcatttgttctgttatgcatgtcttttcccacacatattccaaatcttttaggggagtaaaagcagtgaaaataacaaaattatgttccacatgcccaagtcacaaaatgtattaaatatgataaagtagcggctgtacaaaattggacaaattgacaaataacaatgggtcaggaacactgtatctgtttgatacaggagtgatattgaaaaagggttctgtttttactttctcttatttgtcatcaaaaaagaaaattgcatcttccataaacagattccagaaaaagaaatttattgttacctctgcgaagttgtggatagcttctggtggtaaggatggtattgaacacgtttacgtctgtcccctttctcctttctcctgcttcatacaaggcctgtcaagaaacacaaaagtaaacacttcactatctgctgaaatgatatctgcacaataatgttagaccttgtcaaagattatataggcaatcgctttgtgcccaatacaatcagagtagtcaacaataagattgcaagttctttaaagatagggaccttattttgtttgtcaaatatcttccacagtttctctcaaggtgccttgtaaacactagagtctgaatatatgtt

SEQ ID NO: 64663 - DNA, 1116 bp, Homo sapiens
caacttcagattaccagaatgacaaggactagaattggatatttcaggccactgctctcagccagaccccacccaggcccagcctcaccctgcagggtctagagggcactctgatggttctaaaacatccctacccaagaaaagtggaagaaccctccatttatgaatctgtccgggttcacacagcaatgcagacaggaagaacagaagatgaccttgtgcccacagcaccttctctgggcaccaaagaaggttacctcaccaaacagggaggcctggtcaagacctggaaaacaagatggtttactctgcacaggaatgaactgaaatacttcaaagaccagatgtcaccagaaccaattcggatcctagacctaacagaatgttcagctgtacaattcgattattcacaagaaagggtaaactgtttttgtttggtatttccattcaggacattttatctctgtgcaaagaccggagtagaagctgatgagtggatcaagatattacgctggaaattgtcacaaataagaaaacagctcaaccaaggggaaggcacgatccgatctcggtcgttcatctttaaatagatctttcttgccaaggaatgctctggcccaggagcaaggtggaatgtttccctgacgctgtgatctgcagcaggcttcaaatgaaaaccgactaaggattttctttcaaaaacaaatcagaagcagatgctgattgggacccatataccacgttgctgactcacgttgctgcccttccatgatgttgccatctccttgagaacactgaagcaatcaccattctgatagaaagtgcttaaaccaccactcttaggtctgctcactcttagaacacacaatggaagaggaagggtttttgttttcactcattgtggtccccaagcctattgacactagttgcctagagtcccactgtgagtcatggtcagcctgtctgacatccaggttgtgctattaaccaagaaggaaacagatacttggaggcttagatgacttctgcaggatttatattcagatagaaaacatcaaatattttcaggggagaggtttttttttttaatttttccccctttatacaaaaaaaaaa

SEQ ID NO: 64664 - DNA, 1189 bp, Homo sapiens
agggaggaagagagagagaggagtgtgtgtgtgtgtgtgtgtgtgtgtgtgtgtgtgtgtgtgtcagggttgggaccagagcaggaacacacgcaagaagggactgagaattgtatcaacagcgcaaaagaagtcaaaggaattacttacgcataaaatgaggactgttcctcagagatgagtcagtcctgagaagccaaccaagccgggtactctgagtctggatccgaccttgctagaaatacggtctgaggcagcagaggttctatgagagtccacagaaggtcagcacaggctaaggtaaaagcagggcaatagggttcttgtgttctattggcgaaagtagaatagaatagaacagaaaaactgagtgggcaaaatgagaattggcaaaaaggtatcattaggctcatacctaccacaactctacagccctaccacttaccagaatggatagattcctagtcgtgtaaccataaaaacagcactgaagatcacaaaaagggtgtcacagagccgctgatacttggcataattggccagtttggctgcctggagaaaggaagaaagaattgagctggggagaaagtcattcctctcataggaagaaaagaagagaagaagaagatggagaaagagagattgggtttttacctccagcaagaagtctgagacatcatgtagacacatgatcagagttcccactcgaatcatattgttgatgtaggagaaggagataagcccaatggtgaccaagtgatgcacaaacatgatcaggaagtcctaggaaggaatggaaatagaagagggaggtaaaagctgggccctagaaacaccagccaacccaacgtcctgcattattctctgagaatcttaccccaccccatatagaatagtttccattggccgggcgaggtggctcatgcctgtaatcccagcactttgggagggcaaggtggtcggatcacctgaggtcaggagttcgagaccagcctggccaacatggggaagccccgtctctactaaaaatacaaaaataagccgggcttggtggcatgtgcctgtaatcccagctactcgggaggctgaggcaggagaattgctcaaacctgggaggtagaggttgcagtgagctgagatcgcgccactgcactccagcctgggcgacagactgagattccgtctcaaa

SEQ ID NO: 64665 - DNA, 1311 bp, Homo sapiens
  misc_feature (1)...(1311): n = a,t,c or g
cgttgctgtcgacagcggtggtctcattcctggaaaatctcttgtgtttgcaactatggagctgctgatgttcattttagtacggcatatgccacatctcagtaccaaggtgtcagactctccaagtcacatagccactaaaactcgactatcagaagaaagtgctcgtttggtggcagccacagttaccatactctctgatttaccatccctttgttcacccgctggatgtatgacaatcctgcccacaattctgttcttaattgcaagaatattgaaagacacagcaataaagtctgcagataatcaggttcctccaccagtcagtgcagctcttcaagggattaaaagtattgtgacactttcaatggccaaaactgaggctggcgttcaaaaacagtggacagctctgattcgtagcacgcttgcttgcatcctggaatattctcaaccagaagactctgtacctacacctgatgaagtaagcatgctaacagcaattgcactcttcctgtggtctgctagtaatgaaataataggagtccagtcattacagaatggctgcatgaacagatttaaaaatgcattaaattcatgcgacccatgggttcaagccaaatgttaccagcttctcctctcagtcttccagcattccaatcgtgccctttcaactccttatattcattcattagctccaatagtggttgaaaagctaaaagctgttgaaagaaacagaccagccagtaacatagagcttttagcggttcaagaaggaataaaagttcttgaaacactggttgctcttggtgaagaacaaaacagagtccagctacttgctcttttagttcccactttgatatcttacctgctggatgaaaattcttttgcctcagcaagttcagcttccaaagatcttcatgagtttgcactccagaatttaatgcatattggacctctgtatccacatgctttcaagacagtaatgggggctgctcctgagttgaaagtgcgtctagaaactgccgttcgagcaagccaagcgagcaaagctaaagcggctgccagacaaccaggcccccgccatacattctggcaccaacaattaaagctaaaaaacaaagttttttttaatttgtaatttcatttaatttgtatntatggttggcaactaagcccctaattagtganggccactgtatcattccaggctanctaatgggtctggtttaatttggaatattgggattaatagtgcttccaaggtagggtaaagtggaaataatgctcacaccacttattggatttttaagg

SEQ ID NO: 64666 - DNA, 3024 bp, Homo sapiens
ttttttttttttttattttgtattggttttatttaaattttacagaaacctgatcagagttaagtatgtaattataagtccagtaacaatttctacaaaaatgcacatacaatgccagaactccttaaaagcaactaatatcatatttgtgttttgcataaaacatgcattaatatgttggccaaaatcagtctctacaagaagagacagtccaatacagtcaataagaaaactagttgtgaacaacaggtaaaaaaagaggtttccagttaatgtgaaagaaggaatagtacctttcataaaacaagcccttcagcgctgagttaactgatcggtactattgtgctgcacgtaatgtaacacatcacctccaagacttggtcctgattggtcataggaagtaagggactttctggtagttacatcagatatttgagaagattaaaagttttccggacatgatggtatactaatagtgcaaccttgcaaaaagggttcgaaacattgtcagacttggaagagttccccagcttgataaacaacctcaaagacaccccgagcctttgaacggagccctctgcacaaggccagctcagggctcaccagcatgtcctgtggccacaagaccttccagctccacataccacccttcgtgaggatctgcaattaggagcctgagtgccgaagaacatggttgtgccatttctttgaggctttgactttttataaggcctagttcatctcatccagggattgggcactcgaatgaatacacagatgctggacacataaggagtattaatatacatggtggccccacagcctgaaatgcttttattaacatacatcaaggtgtgtctccgactgtcaggaaagaccttggtcctccagaggcagagagaagctgagggttctctatgtatcacaaggcatttcctacatagactgaggggtgttaaagagatctcatatcaactgaaaggacttcccctcaaatgtggggctctgtacaaccttccatgaggatcttcaaaaaaaagatctcatagtcgttagggaagtggcggtggacattaacattatatacacaaaactcatcattcgtgcagcctcgggccttgtttgtaatctcttccacagtctgtctcttccaaaacagggctccctgccctgcttatttcaagtaagctaagtcaggatctgttttctttagcagattcaagggggaaaaataataatttattggggttctaataacattttcataacagaatatcaaaataggtccatttttgatatatgcttatgaatatccctgataatatcaagaaatccagaggacttcgtaaaccaccaagatttcacaggggtgagacccggtctgttttctaggcagcagagaagggactagtatacgggcaaatgttctccaggaagccctgtgagcactacagtactgaaattctaattctagtgccaatagaatcatgaacgaaaatttcacttgaactgtattagtaaaattcataacaaaggcttgcttcctcaaccctgtcatctgttaatctctccgcctgtgacagacatccagaccagaaaaccatcagtcctggctactctggaggttgggcctagagaaaacaagccccaagatcctttctaagctatgaccaaacctcagaaaacagggacgtgaaagaaggagcagaccaggcttgaggaagctttgacccaaggcaccacgatcataggggcgaggggacctgtagaggttttaggtgacgggaagagagccttccgtgatgcctgcggaggaggttctggaaggcaacagctctgtggcaaaacacacacatctgggagtgaaataacagatcattaaacaagaccccaatttgctttctcaaaacaaaatcaaacttaaaaactatgcaaataaccctgggtgcactggagtaggagtacactggagaagtctgtggaatgagctgcatcagctgagtcacagaggacgctggctgtgaagtcagcatccacacggtggctactgcagctaaagagaatgaagggagcgcgaggcctctccaaacagaggaggacggaaagggggccaaatgtgaaccacacctcttttattccaagaatgggaagcgcattttcattggcttgaatgagaaagcttcatactccactctagctgcagtaatactgcatcccatccactcttcttctcttttttgactgaaactcttcaaagaactgctgaatgtcctctctcttaacaaccgtgccttcatcagcaaatctcttgagatagtctttaagttcagtcttcaaatcattgtattcacaaatgagttccacttgctggactctattcatgctgctaagggtatccattaggggatcgctcctgtcagtggcctgggcaatcttccctttgttttcataagccagaactgtgtcgtattcatctgtcaggaataagacatctagatctccatacattttcatacagtcttggcaggtacacaacttgctacgccagttcaggggccaataggtggcagtgtctttctttataagctgcttagctttaagctcctgaagtttgcagccagattttgattctgcgttgaggctttcattcttaaacactgtctggagatcagattcagaactagagccggcacatggttcactgttctgctctactttaacctcccggacatcatcctttccctgttctggaacatcctctttgagggtactatcttgatgctctccattttcaggtttgataacttcctgatcacctattccatcaatgttccgcaccaatccatcatcctcagtggatattttggttactgccaattgtgcagcataagcccacaaaaaagaacaacgtttcatgcaggcctggcataccatctcctgaaaatccccactctcagggggaatggcaccaagatgccttccatggaaccagtcttcacagactacgcactggatcctcgtgcc

SEQ ID NO: 64667 - DNA, 1286 bp, Homo sapiens
cccggcagagccgcttccccctcctccctgtgctgtctgcaccgaggagagcggcctgccgggtgagtaggtccggggcctctgggccctcgggggcccctctcctgcaggctcgaggtgggcggggagaaaggggacgggcgcggacccgggtcccaaggccaggcctcccttgtgagtagactatgcaaagaaaaagtgggccaccatatctggaaactacagtctatgctttgaagcgcaaaagggaataaacatttaaagactcccccggggacctggaggatggacttttccatggtggccggagcagcagcttacaatgaaaaatcagagactggtgctcttggagaaaactatagttggcaaattcccattaaccacaatgacttcaaaattttaaaaaataatgagcgtcagctgtgtgaagtcctccagaataagtttggctgtatctctaccctggtctctccagttcaggaaggcaacagcaaatctctgcaagtgttcagaaaaatgctgactcctaggatagagttatcagtctggaaagatgacctcaccacacatgctgttgatgctgtggtgaatgcagccaatgaagatcttctgcatgggggaggcctggccctggccctggtaaaagctggtggatttgaaatccaagaagagagcaaacagtttgttgccagatatggtaaagtgtcagctggtgagatagctgtcacgggagcagggaggcttccctgcaaacagatcatccatgctgttgggcctcggtggatggaatgggataaacagggatgtactggaaagctgcagagggccattgtaagtattctgaattatgtcatctataaaaatactcacattaagacagtagcaattccagccttgagctctgggatttttcagttccctctgaatttgtgtacaaagactattgtagagactatccgggtcagtttgcaagggaagccaatgatgagtaatttgaaagaaattcacctggtgagcaatgaggaccctactgttgctgcctttaaagctgcttcagaattcatcctagggaagagtgagctgggacaagaaaccaccccttctttcaatgcaatggtcgtgaacaacctgaccctccagattgtccagggccacattgaatggcagacggtaagtctttgtttctattctcttgcactggcacaggtgatccctgaaaattaaataatttttgagtgtacacttgagcccaggtgttcaagaccagcctgaggaacatagcaaga

SEQ ID NO: 64668 - DNA, 1380 bp, Homo sapiens
atgggctccaggctgctctgttgggtgctgctttgtctcctgggagcaggcccagtaaaggctggagtcacacaaactccaaagcacctgatcacagcaactggacagcaagtgacgctgagatgctcccctaggtctggagacctctctgtgtcctggtaccaacagagcctggaccagggcctccagttcctcattcagtattataatggagaagagagagcaaaaggaaacattcttgaacgattctccgcacaacagttccctgacttgcactctgaactaaacctgagctctctggagctgggggactcagctttgtatttctgtgccagcagcgtcaaagtaggcaccggggagctgttttttggagaaggctctaggctgaccgtactggaggacctgaaaaacgtgttcccacccgaggtcgctgtgtttgagccatcagaagcagagatctcccacacccaaaaggccacactggtatgcctggccacaggcttctaccccgaccacgtggagctgagctggtgggtgaatgggaaggaggtgcacagtggggtcagcacagacccgcagcccctcaaggagcagcccgccctcaatgactccagatactgcctgagcagccgcctgagggtctcggccaccttctggcagaacccccgcaaccacttccgctgtcaagtccagttctacgggctctcggagaatgacgagtggacccaggatagggccaaacctgtcacccagatcgtcagcgccgaggcctggggtagagcagactgtggcttcacctccgagtcttaccagcaaggggtcctgtctgccaccatcctctatgagatcttgctagggaaggccaccttgtatgccgtgctggtcagtgccctcgtgctgatggccatggtcaagagaaaggattccagaggctagctccaaaaccatcccaggtcattcttcatcctcacccaggattctcctgtacctgctcccaatctgtgttcctaaaagtgattctcactctgcttctcatctcctacttacatgaatacttctctcttttttctgtttccctgaagattgagctcccaacccccaagtacgaaataggctaaaccaataaaaaattgtgtgttgggcctggttgcatttcaggagtgtctgtggagttctgctcatcactgacctatcttctgatttagggaaagcagcattcccttggacatctgaagtgacagccctctttctctccacccaatgctgctttctcctgttcatcctgatggaagtcctcaaacaccatttccatacccaggcattctgggtccccactggagggttagtctgaagggcaatggctgggctttggaaaaccag

SEQ ID NO: 64669 - DNA, 982 bp, Homo sapiens
ttttttttttttgagacggagtctcgctctgtcgcccaggctggagtgcagtggcgggatctcggctcactgcaagctccgcctcccgggttcacgccattctcctgcctcagcctcccaagtagctgggactacaggcgcccgccactacgcccggctaattttttgtattttttagtagagacggggtttcactgtgttagccaggatggtctcgatctcctgacctcgtgatccgcccgcctcggcctcccaaagtgctgggattacaggcgtgagccaccgcgcccggcccttttttttttttgagacggagtctcgctctgtcgcccaggctggagtgcagtggcgcgatctcggctcactgcaagctccgcctcctgggttcacgtcattctcctgcctcagcctcccgagtagctgggactacaggcacccgccaccgcgcctggctaattttttgtattttctggtagagacggtgtttcaccgtgttagccaggatggagaactttgaaaactttacagagaaaatagtattgaaaatattttagtccagaaatgccttaaggtatacttttcccattgttcaagatcagagattacagtaactggcaacaacctgctctaatgacgtgaaactgtctaaaaagtcctcttcttcgattccaaattttgtgtactgatgaatgtaggcttttgaagcaaacatattccatgccttcccaacaatcatatcaagtggttttactaagaactggctgttgctgaccaacactgcagacttctcatatttgctaaaggcccgctgggttttccacacgttgaaagcattaacaggcttcaaccaggaagtatacagagctggatctttaaatccctccacatctgcactttgcacatctttcccacgaagaatgaccaagttagcaatggaagtgttaaaatgcaggtccttgttgagagacattttactaagagg

SEQ ID NO: 64670 - DNA, 829 bp, Homo sapiens
tcggaattcccgtgtcgacgatttcgtatacagcctcctgagtagctgggattacaggctccaaccaccatgcccggctaatttttgtatttttagtagagacagggtttcaccatgttggccaggctggtctcgaactcctgacctcgtgatccgcctgcctcggcctcccaaagtgctgagattacaggcgtgagccattgtgcccagcccaacctctatttttttggtggtttcaactttattcactgcggagctgaacttaggaccattatcagaacaggatctcaattcttttcttactgaaccatccttgcgatgtactcgtcgaggtaacagctattgaatttgaccaagttcaccagcaccagaaggaattccgaggacaagccaacatccatccactgcaggacaaagtcagctgggggagaagcggcggcagtttgcgaggacgccgaatctacatctcccactcacctccccctcccgccgcaggacagtgtgtccaaacccgtcactgccagaaaccccatcatcagtcccccggcagcaacagacagaccacgcactgggcccgaagaggctcaggggagcccagggcaggccggctacgcacggacactaggatctaccgcccctggggctgcacagagggtctgtgccgaggcggcagcagaagtgtgtatgccgtacactcagggcccaacccgaggctgggagacgccgacatcaccagactcctgggcgttccccacccccagcagagaacggctcggaggagacgtgtgcacacttggctgccggccacgtcacctcagacaggaaaccc

SEQ ID NO: 64671 - DNA, 3271 bp, Homo sapiens
ctcagaccgtgcagaatgttacattgtcgctcactctgcccatcacgtgccacatttgcttggggaaggtacgtcagcctgtcatatgcatcaacaaccatgtattttgttcgatttgtattgatttgtggttgaagaataatagccagtgtccagcttgcagagtccccatcactcctgaaaatccttgcaaagaaattataggaggaacaagtgaaagtgaacctatgctaagccatacggtcaggaagcatcttcggaaaactagacttgaattactacacaaagaatatgaggacgaaatagattgtttacagaaagaagtagaagagcttaagagtaaaaatctcagcttggagtcacagatcaaaactattctggatcctttaaccttggtgcagggcaaccaaaatgaagacaaacatctagtcacagataatccaagtaaaattaacccagaaactgtagcagagtggaagaaaaaactcagaacagctaatgaaatctatgaaaaagtgaaagatgatgtggataagctaaaggaggcaaataaaaaattgaaattggaaaatggtggtctggtgagggagaatttacgactgaaggctgaagttgataacagatcacctcaaaagtttggaaggtttgcagttgctgctcttcagtccaaagtagaacagtatgagcgtgaaaccaatcgcctcaagaaagccctggaacgaagtgataagtatatagaggaactagaatctcaagttgcacagctaaaaaattcaagtgaagagaaagaagctatgaattccatttgccagacagcactttctgcagatggcaaagggagcaaaggcagtgaggaggatgtggtgtcaaagaatcaaggcgatagtgccagaaagcagcctggctcatccacctccagttcttctcacctagcgaagccttccagcagcagactgtgtgacaccagttctgcaaggcaggaaagtaccagcaaagcagaccttaactgttctaagaacaaagacctatatcaagaacaggtagaagtaatgttagatgtgacagatacaagtatggatacttatttggaaagagaatgggggaataaaccaagtgactgtgtaccctacaaagatgaagaactttatgatcttccagctccttgtactcctttgtcccttagttgccttcagctcagtactccagaaaatagagagagctctgtggtccaagcaggaggttccaaaaagcactcaaaccatctcagaaaattggtgtttgatgatttttgtgattcttcaaatgtttctaataaagattcttcagaagatgatataagtagaagtgaaaatgaaaagaaatcagaatgtttttcttccccaaagacaggattttgggactgttgttccacaagctatgcccaaaacttagattttgaaagttcagaggggaacacgatagcaaattctgttggagaaatatcttcaaaattgagtgagaaatcaggcttatgtttatccaaaaggttgaattctattcgctcttttgaaatgaaccggacaagaacatccagtgaagcatcgatggatgctgcttaccttgacaaaatctctgagttggattcaatgatgtcagagtcagacaacagcaagagcccttgtaataacggttttaagtcactggatttggatgggttatcaaagtcatctcaaggcagtgaatttcttgaggaacctgataagttggaagaaaaaactgagctaaacctttccaaaggttctctaactaatgatcagttagaaaatggaagtgaatggaaacccacttctttttttctcctctctccatctgaccaagaaatgaatgaagatttttcactccattccagttcttgtccagtaactaatgaaatcaaacccccaagctgcttgtttcagacagagttttcccagggcattttgttaagcagttcacatcgactatttgaagatcaaagatttgggtcatctttgtttaagatgtcctcagagatgcacagtcttcataaccaccttcagtctccttggtctacttcctttgtgcctgaaaagaggaataaaaatgtgaatcaatcaacaaaaaaaaaaatccagagcagcctttccagtgccagcccatcaaaagcaactaaaagttgattcattagaaaggtgtcatttgtggttttgtcctgagagaaatagaaaagttgttaaagttaccttttttcctcataaaagttctatacaaattggaattgataatctttagtcaagtatcaagtcaggatggtggattaaccctgtacccagaatacttattgttcattttgaaaagactttgttcttttcatttttatttgggagtctttgtgaccagagaagttagggaggaggttatttttgtgttttggggttggttggttggttggttttgtttttggttttgtttttttactgaatttgatatgtatctcggttggatatacattgtttttttaaaaaatgttatttaactgttagatacagtggcctgttgataagcctcacttgtcttcagaacttgggatttcttaaataaaacttttaggtgttgtctatacactgctcaataagacacttgagtttaagcttttcccagggtgggaaattattttacctgtccctttttatttatgtttagtgatggcctagtttttctgcagggccatgatggagaaatagcactctagccttagtccaatattgatttactttctttttttaggttttatgtatatgtttgcattttttagcattgtgttttgtccagttttgtgaaaatgttctgctagtatgaaagaaaacattttctatatgaagacatttgttttatgttaggtagcttacattttctcctctgcgtgtgtgtgtatgtgtgtaaaatcagaaatttagcatactatggaaagaaggcatggagcacttgggtttagaggaacctaaaacatcatagcttcattgttccagatgtaacaggtttgaaagagctcatcgccaagttcttgatccacttgcattccaggggagttttcttttgagtagtatgtttcttgtttgcatgttcctgttctttgtggaaactatgcatggtagcatttttgcttgctgtgttttccatacttaagaaaaagaggtttcagttggctgatagaatatcttttatgtaggacaaaacttttctggtcgacgcggccgcggtcgacgcggccgcg

SEQ ID NO: 64672 - DNA, 8519 bp, Homo sapiens
tttcgtagacgagaggaaagtaaaccgcattcagcaagtaaccaccaatggggagatctacatcatcgctggtgcccccactgactgtgactgcaaaattgatccaaactgtgactgtttttcaggtgatggtggctatgccaaagatgcaaagatgaaagccccttcctccttagcagtgtcgcctgatggaaccctctatgtggcagacctcggaaatgttcgaattcgtaccatcagcaggaaccaagcccacctgaatgacatgaacatttatgagattgcttcacccgctgatcaggaactgtaccagttcactgtaaatggaacccacctacacaccctgaacttgataacaagggactatgtttataacttcacctacaattctgaaggtgacttgggcgcgattaccagcagcaatggcaattcagtgcacattcgccgtgatgcaggcggaatgccgctatggcttgtggtgcctggcggacaagtatactggctgactataagcagcaatggagtcctgaaaagagtgtcagcccaaggctataatctggccttaatgacctatccaggaaacacagggcttctggctaccaaaagtaacgaaaatggatggacaaccgtttatgagtatgaccccgagggacacctgaccaatgcaacgtttcccactggagaggtcagcagcttccacagtgacctggagaagctgacaaaagtggagctagatacttccaaccgtgaaaatgtcctcatgtcaaccaacttgacggcaactagtaccatatatattttaaaacaagaaaatactcaaagtacctatcgggtgaatccagatggttccctgcgtgtcacttttgccagcgggatggagatcggcctcagctcagagccccacatcctggcaggggcagtcaaccctaccctgggcaaatgcaacatctcattgcccggagagcacaatgcaaacctcatcgagtggcggcagaggaaggagcaaaacaaaggcaatgtttcggcttttgaaaggaggctgagggcccacaacagaaacctactctccatagattttgatcatataacccgcacaggaaagatctatgatgaccatcgaaaattcacccttcgaattctttatgaccagactgggcgacccattctgtggtctcctgtaagcagatataatgaagtgaacatcacatattcaccttcgggattggtgacgtttattcaaagaggaacgtggaatgaaaaaatggaatatgaccagagtgggaaaattatttcaagaacttgggctgatgggaaaatttggagctatacctacttagaaaaatctgtgatgcttctcctacacagccagcggcgttacatctttgagtatgaccaaccagattgtctgctctcagtcaccatgcctagcatggtgcgtcacagcttacaaaccatgctttcagtgggctactaccggaacatctacaccccaccggacagtagcacttcttttatccaagactatagtcgagatggccgattgctacagaccctgcatctggggacagggcgcagagtcttatacaagtacaccaagcaagcaaggctttctgaggttctctatgataccactcaggtcacattaacatatgaagagtcttctggagtgattaagacaatacacctgatgcatgacggattcatctgcacaatcagatacaggcaaacaggacctcttattggacgccagattttcagattcagtgaagaaggccttgtgaatgcacggttcgactacagctacaacaatttccgagtcacaagcatgcaagctgtaatcaatgaaacccctttgcctatagatctttaccgatatgttgatgtctctggcagaacagagcagtttggaaaattcagtgtaattaattacgatttaaatcaggtcataactactacagtgatgaaacacaccaaaatcttcagtgccaatggacaagtcattgaagtccaatatgaaatcctaaaggcaattgcctactggatgaccattcaatatgataatgtgggccgcatggtaatatgtgacataagggtaggagtagatgccaatataacaaggtacttctatgaatacgatgctgatgggcaacttcagactgtttctgtaaatgacaaaacccagtggcgttatagttacgatctgaatggaaacatcaacctcttaagccatgggaagagtgctcgtcttactcctctccgatatgacctccgagaccgcatcaccagattaggagaaattcagtataaaatggatgaagatggctttctgaggcagaggggaaatgatatttttgaatataattctaatggcctgctgcagaaagcctacaataaggcttctggctggactgtgcagtattactatgatgggcttgggcgacgtgtcgcgagtaagtccagcctagggcagcaccttcagttcttttatgcagaccttaccaaccccataagagttactcatttgtacaaccacacaagctcggagattacatctctgtattatgatctccaaggtcaccttattgccatggagttaagcagtggtgaagaatattatgtagcctgtgataatacaggtaccccactagctgtgttcagcagccgaggtcaggtcataaaggagatactatacacaccttatggcgatatctatcatgacacttaccctgactttcaggtcattattggttttcatggaggactctatgatttccttactaaattagtgcacctggggcaaagggattatgatgttgttgctggcagatggacaacgcctaatcatcacatatggaaacagttgaacctccttcctaaaccattcaacctctactcctttgaaaataactacccagttggcaaaattcaagatgttgcaaagtataccacagacatcagaagttggttggagctatttggtttccaattacacaatgtactacctggatttcccaaacctgaattagaaaatttagaattaacttacgagcttctacggcttcagacaaaaactcaagagtgggatcctggaaagactatcctgggcattcagtgtgaactccagaaacagctcaggaatttcatttccttggaccaactacctatgactccccgatacaatgatggacggtgccttgaaggagggaagcaaccaaggtttgctgctgtcccttctgtttttgggaaaggtataaaatttgccatcaaggatggcatagtaacagctgatattataggagtagccaatgaagatagcaggcggcttgctgccattctcaataatgcccattacctggaaaacctacattttaccatagaggggagggacactcactacttcattaagcttgggtctctggaggaagacctggtgctcatcggtaacactggggggaggcggattctggagaatggtgtcaatgtcactgtgtcccagatgacttctgtgttgaatgggaggactagacggtttgcagatattcagctccagcatggagccctgtgcttcaacatccggtatgggacaactgtcgaagaggaaaagaatcacgtgttggagattgccagacagcgcgcagtggcccaggcctggactaaggaacaaagaaggctgcaagagggggaagaggggattagggcatggacagaaggggaaaagcagcagcttttgagcactgggcgggtacaaggttacgatgggtattttgttttgtctgttgagcagtatttagaactttctgacagtgccaataatattcactttatgagacagagcgaaataggcaggaggtaacaaaaatatctctgcctttgcgtcaccaaagactgcctgtttttaaaacataaaatggtttattgtattggttttctagatcagaactctgtatatgtaaatatggaggaaaaacatatccaactgcctttcaatgtgacggaagatggtattttaatattgtttgtttaaactctttaagaaatgacagagatttttagttcttgtgtggcagtattcaaaataacacaaggtagaactcaaacagctaaaaacagttttcagaaagcaccactttcaatttgccgagccatgcatatgttccaatatccagaaagaacccaaggttctctatctctattgtgagaagcagtttcatccttaactgttggcagaacttacgggctatttgaataggtggtgcaatagtatctgaaacttgcctttcgaaagactgccagccctttgacgttttccagatctgttataggaaacttaaaaacaggtgtaaaatgtcttcagccaccatctcctagagtgaggacccaattgcccttccttcttgattattcctccttgcttgttaaagtaaatgccatattgttgtgctgtgttttggcgtgtggtggctgggttctgtctaccatgcttccctgtgggtgtggtaaccagactgtatagccgctatttgctcgtgtgtacatgataccaaagcagctggccagcgtgacctctctcacacgacctgttttgactcaattttttactaaaagttgttcagctgtattggtatcatgtaaacatagcttttattaacctgggtaggaatttctcatttatatataggatgtgttttggtcatagtttcacattagtgattcagtatctatacactgacccaatggttttgtgcacatgaacggtaatttacttaaaagtatgattctggtacaaaaacaaacaaaggctttagcaggcatacgtgtctgggatgccgatacatacattaactactactgcagaaattcataagagccaaaaccttaaaaaaatagacctgggtacttaagtgaaagtactaaagggaagaccagaccaaacatcacagcagttgctgcccacattgtttcagcccacttaggatttatctttccaaatgttacaattctgtattggaacatctcccagccatcttcagggaaatcggatccagtaaatcctttccaaccgaaaacatttcaactaactatagagaggcagactcatttttactaaaataatttatacagttagttattttcgttctccgtacttacccatttatctttatttaatcgtctctactgcctaggaaaataactattttccaggacgggttatttgttctgcgatcatttaaaatttggagaaaggtcaggattagtgttaatatcagctgcagtttctcaatctctaggaatcctgcagtaaaacaagccccttggtgagctggaagatttgtgcccagtgacaaagagatagtttgtaaaatgctgtgtaattgtaagttaccacaaatgaaaatacatgacagcacaatgtggcccgtagaaaattcccctgagccagcttctgcactttcatcaccgaatctgaacatttgctatgtctgaaggcaaatttatgatggaatgttagtttggattctttccagatgctacctaaatgcagtgtggggtcattgccttgctttgcgatgacagtttctttgaaaatatgcaaagtcataagctcatgttaaggtttttcaagagtctgcctcctactacacaaaggaaagcaagggaaaggaaatgaccctggcaaacagtagggaagggtgtattcaaacatttcattttcaaaaccttcgggttagaataccacttacacatgtattctgagagacagaattcatgaggaactcatctctctttataactggaaacacaccagcttgatatattgctaatccatactaaaatcatattattgggttttttctgaatcaggcctgtattaatggtacagtatttattcagaatggaattctaaaattactaacaaacttgttgaaaatttgaatacctccacaccaacctaaaaatggaccttaagttcctagaacctctgatgttcttttaaattaatggaaaaataatttgtgaactgtatatagagagtgcattcataaatgtgattatgtattttatcacaaatccaaaatgtcaatattagagtctattttgcttatattttaagcaattatacgtttttgcaattcattgatgatgtatcattttcaaactgctttaaatatccattagaaacaaatatttgaagcttttacttaatagtgattaccttgaactgtgcatttctagtttgtaatacgtatttggttggttcgtgcctttagtttgttaaagttacatttgtattatattcaggaaatgcactttttattacttacagctgtggttttaatactgccttgaactattattattctttttacaactcctaaagcttgagggaggaaagaaaaaaaaaacaaaactactaatcagtagtaaatcgaagagaaacattttggcatttcttaaaaagaagatggagatattgagtatatcacttcctattcagctgaatagaaagaatgccttcattgacttgcagttctgcagtttaaattattgaaagaacaattcgtttgcatttcctgatgaaagtaaaagcatttttcagagaaacatatgaatttctcatacccagcagacagatggctgacactgcacagccacacaccattcgagtaagttaaagtgagagcatagtagttggactctcctatgaagaacattctgggctggaggcagggaatactccatggttgtttctttttcctacttaagcccattttgtttgtgcttttctgttttgttttgttttcactcttgcactacagtctagagatccaaatgaactgaaaagttcaaagtttaacacatttaaatatgtttacttttagttgtcattctaatcgttattgattagaagcatgactcctgaaggaaagggaaataaatctcaattcatactaacttgcaacaaaacacttttaccatataaataagtatatgatttatttttaacccaaaaaatgtataaaataagtgtgtcctttactgtcaatttatcgagaagatctataatatatagactacatatatataatatatacaacatagccaaatgtatgaaaacttgacaatgtataatttggaattcacatgctacctatgtagacaggtatgaaattaagttataattttcatgagacattttcatcactgttgacacagtttcaagcattccatcatgttattttgactctttttcttttttttttctttaaaaatatatttttaactagaccaggccccactataatatcacttaagagagtcagggcaaagtttttgcatttatgaagatgtgttcatgtaagggtgattgtaatggagttcattggtaatagaagcaaaagtacagtaacgaagtattgaaaagaaaattttggagacattggagcatattatatatagcttgtggaaagacataaggctacagatggaatggaacattcctgttttcttgaagaaattcacatacacatagctgacctgactagtacttcagctcttccacagccttctataaaggttctttcttctgcaaagaaaacaaaacaaaacaaaacaaaacaaaaaaaacaaaaaaagcgcaaaaaacaaaaaaacaaaaaaaagcaaagtaaaatttaaaaatacagaaaacaaacaacaaaaaagaattcaaccataaatagtgactattattttcagtgtgtccttcatgtgaaagctattaaggaccaaatatactactgttcataagaagaaattactttctaaacagtaactgaaaatacttagagttaaacttgctgtggattttgtcttggcagttgtcatcttacattatttgtcaaaggaaatgtgtttggcagttaaaaatctttccttagatttagtggtggactttaacctcttaaataaatgttagtatatcagattgtgtccttgaaaaatattttacttgtatgaatcatgacaacgtctaaatctttactattcttctggcaaaagcatcagtaagaaagaaggcgaaaaagagaagtatagcctttatgtcagaaaaacattctttttagctgcttactttctcatgaaaagtaaagatgtttacagtgtatgccccaagttttccagtttcctgtaataaccaacaggtaagaggttcctaatccatattgaaaattgtgttataatggtctgagcccatgttgcctaggaaacaataggttcccaaatttgtaaatccctgcctctcctgtgcctgaaaagtgacctggatactgtaacaggttccatgttcctctggctgcagttaaatggtcttttgcattttgctctggctttcaggccagaagcatgcatttttctacaagagcatcacaacaacatgctgtaaatatttaaagttaaacattatgtgttgatatttgaaagaaaagcactttgaatatttcatttttaaaaaataaaattgccaatgaaaaaaaaaa

SEQ ID NO: 64673 - DNA, 2536 bp, Homo sapiens
gaattcccgggtcgactatttcgtctttgagggtcatacctccaaagttaactgcctcctggttactcagacctccgggaagaatgctgccctttacactgggtccagtgaccataccatccgctgctataatgttaagagccgagagtgtgtggagcagttacagctggaagaccgggtcctctgcctccacagtagatggcgaatcctctatgcgggactggcaaatggcactgtggtcaccttcaacataaagaacaacaaacgacttgagatctttgaatgccatggccctcgggcagtcagctgtcttgctacagctcaggaaggtgcccgaaaactgctggtcgtggggtcttatgactgcacaattagtgtacgcgatgcccggaatggactgctcctcagaactctggagggccatagcaaaaccattctttgcatgaaggtggtgaatgatctcgtgttcagtggctccagtgatcagtcagtccatgctcacaacattcacactggtgagctcgtgcggatctataaaggtcacaatcatgcagtgactgtggtgaatatcctaggaaaagtgatggtgactgcttgcctggataaatttgttcgtgtctatgaattacagtctcatgatcgattacaagtttatggaggacacaaagacatgattatgtgtatgaccatccataaaagcatgatttacactggctgttatgatggcagtattcaggccgtgaggcttaatctgatgcagaattaccgctgttggtggcatggttgctctctgatatttggcgttgtagatcatttaaaacaacacttgctgaccgaccacactaatcccaacttccagactctgaaatgtcgctggaagaactgcgatgcttttttcactgctaggaaaggatccaaacaggatgctgcaggacatattgaacgacatgctgaagatgacagcaaaattgattcatgaagttttttgcctcccacgttgggaagtcattagttgaactattttcacattggccccccacacaggccactctcttccctttcttggtgaagtaaggaaggagaaagtggttactagccaggcatacccctagcataagtctgggcagctctatgggatgataaattacacttttaagttcttgctggaggttttaaatagatttagacaaatgttaaggaaccatacttctctgggacagcatggcatatagtgatatatgctatttgcgttctccagatgtttattgaagatacagatcctaattggttacccagtttgaccctaatcatatgtatattttattgatttcagtttgcaatttttaatttatgttcttatgatggtttaaacctatagtcaggcttttaagtacaagtttgtttaagtgccagactttgaggatcagttttaatttctccatttgtaatagctgggtatttaaactggaagcaaatagttttctttcttaacaattatgtgcagtgtgtgtcactgttttcttgctttatagatagagctggctttaagtgctaaaggacacagtagatttttgacaaacagtggctgctctgctgactatcttttaggaattcaggaagcaaatcacatagtgacaagtccttacagacaccacttctagtaaatctctgtaaatgtggatagaaagctcagtgtgaggcagtgcgtagacctaacgtctacctttacatctgctgttgaacctgggcactacctgttacagatcctgtcaggctgttgaactggaggtgtacctttatcttcctttctagtgtctgaccctgcaagcctaatgttggtttgaacccttttggtttgttcagttgccagcctccatctctcccactgtatggccgtgcctagaccgatggcagccatcgaatattcctctgggctcacggggtgttttccacccccctgcagcaactaagatggtgggggagagggggttagaataaagcatctgaatacagttttcaggacctcaagcagacttcctagagacttgtttctgagacagttctttgccttcacttccctgctagctgggaaagaagagtggagcagagactctgcctggccactgagaacagccaaattcacaaaccctcagtggggctttgtttttggattttctccggactcatcagtaaacctgtagaagtgtcgctttccagccttttgtttctggatcctcaaaactcagaacgtggccgggcgtggtggctcacgcctgtaatcccagcactttgggaggctgaggcaggcagatcacctgaggctaggagttgcagaccagcctggccaacatggcaaaaccccgtctctactaaaaatacaaaaagccgggcgtggtgggcgcctgtaatcccagctgctcaggaggctgaggcaggagaatcgcttgaacccgggaggcagagattgcagtaagctgagatcgtgccactgcactccagcctggtgacagagtgagactccgtctcaaaaaaaaaa

SEQ ID NO: 64674 - DNA, 4201 bp, Homo sapiens
atgttacgacgctaccgccctgacatcaccagttgccatggtagcaccgccgagagtaaaggaggggtggtgctagacgtttcgggcagagctcggccgctgcggaggacaaggaactctccctctcccactagtctgacttcttccaaaatgagcggcctggatgggggcaacaagctccctctcgcccaaaccggcggcctggctgctcccgaccatgcctcaggagatccggaccgagaccagtgccaagggctccgtgaagaaaccgaggcgacacaggtgatggcgaacacaggtgggggcagcctggagaccgttgcggaggggggtgcatcccaggatcctgtcgactgtggccccgcgctccgcgtcccagttgccgggagtcgcggcggtgcagcgaccaaagccgggcaggaggatgctccaccttctacgaaaggtctggaagcagcctctgccgccgaggctgctgacagcagccagaaaaatggctgtcagcttggagagccccgtggccctgctgggcagaaggctctagaagcctgtggcgcagggggcttggggtctcagatgataccggggaagaaggccaaggaagtgacgactaaaaaacgcgccatctcggcagcagtggaaaaggagggagaagcaggggcggcgatggaggaaaagaaggtagtgcagaaggaaaaaaaggtggcaggaggggtgaaagaggagacacggcccagggccccgaagatcaataactgcatggactcactggaggccatcgatcaagagttgtcaaacgtaaatgcccaggctgacagggccttccttcagcttgagcgcaagtttggccgcatgcgaaggctccacatgcagcgcagaagtttcattatccagaatatcccaggtttctgggttactgcctttcgaaaccacccccagctgtcacctatgatcagtggccaagatgaagacatgctgaggtacatgatcaatttggaggtggaggagcttaaacaccccagagcaggctgcaaattcaagttcatctttcagggcaacccctacttccgaaatgaggggcttgtcaaggaatatgaacgcagatcctctggccgggtggtgtctctttccactccaatccgctggcaccgaggccaagacccccaggctcatatccacagaaaccgggaagggaacactatccctagtttcttcaactggttttcagaccacagccttctagaattcgacagaattgcagagattatcaaaggagaactgtggcccaatcccctacaatactacctgatgggtgaagggccccgtagaggaattcgaggcccaccaaggcagccagtggagagcgccagatccttcaggttccagtctggctaatctctgtcctgtgagaagcttctgcacaagtttccttaccacctcctcttggacctatgcttggccaacagcatgcagtcttccatctgctttctcttcatactgtggattatcttttcctttggttctaaatcttcagtaatcggttgcaagattgttggcttacctgcctgtgccattcttcctctgggccttcatgcttttctgcattgtgttaacatgtttcaagtgcatggccttctacggcttctatgccaagcgtatgatactatagatatagtgtaccatactgcctttctttgcatggcttggaccctatctgtgaccatgctcttctcccaatttaagtggttctgtaccacaaagaatcttgatacattttcacaaataactgattgggcttcatactttatgctggctgtgtcctgatacccatgtacttatggtaagctatttgggtattaccactgcaagacaaaactgatatcttaacccggccatcaacccaaattggacattccagactaccaccaactggatcccagctgccttcctgggcttgtgccatccaccctactggttatctgatagaacaagctggtggctgatgggtgactgctaggcgtgactgaggtaatagatgaaaagtgttctatgttatcacattggttttcctgtacctttggttactctacgtcatggaccagctgctggtgagtatgaagcctgtgctatagcccacccctactcactctcaccttctggttgaactttgcttaggccaccattgtctgcctcatcaggaactatctgtagacgtagctcccagggagctcacagcaacaccccctacccccaggatgggcagtaatatgtgacagagcccaaagcaaggctgggaacgcagtcccttccagcttagtctttctgactcctagccaacaaaccatccttaatgtgagcaacttctttaggcatttcctcttttccccgcctgcacccactctgaacatgacaaaagttgccagagttggggcattgaggaagagatatttctggaatgtgagacttgttatgcctctgtctctttctctccctcctcctcccctctccctccccctctccctcccatcccttttcttccctttcactctgaagcagttttagcttattaacagaaaacaaaactggcaaagcaggctttttgtttaatttgctctttccctgattgtgttcagagagaaaggttatgattaaatgggctccagatctcttattgcccttattcctccaccccacttcttttagcaaggtctgaaagtttcaaagggagacctataggttaattgtttagttataggcagtgttaaattaggcagattttgacatatttatctttttaccccatccattctaccaaaacctgtgtatttcttgagtttttagtttgagaagctggaaagagagagaagggcctcacagtgatgggttcaggacgggtcaaaggcaaaggcctttgtgatgtgagcaaaggcaaccaaaacttagcctcactccacttttctaaagatggaaattcttttttgggccttggactgcttctagggtagcattttgtaggtcactcttctcctttgtactattttgtttctgccctgatgtcccttgggtctccatcctactgcctggctttcttggccctcatttctcagcttctgcatttccttccctgctcctaacaaatgaagaagcaggctgcagcctgcattgtggaagatctccagcctccttgtaggggataaggggatgtgcagcatctgtgtggattttcacggacaagttccagtaggtgggacagtgatgccgtcaaggcttagttatgatcatgtgtggtgataaagaccatccaccatcacccttttcccctttggttttgaaggccttgccctaagctacctgagggtttaggaggtctgaacacacacagtggagaggttaatctaggttgggaaactgagtaaaagtccagagcaggaatgagcctgctgtggcgtgggtttggaaaggctcacaggaaagaacctgcaggatcaggggtgggaggggaggcccctgaggtgctctccagggaagaggggctggggtttaaatagcatgcttggaggaagattttccttcaatttttcctaagtccttgaattcaccagtagatttttgtaaacaaaatgtaagtcgatgttttctctcaattatcctaggagtgacctttatatgtgtggaagattaatggtatatgctccttatgtcactgtttttgagtaaaatccatttcctttctctgtttcagcctatgacaaaattgatgtttacaggcctgctttttgcttataattgacaacatgtgcaaaaataccaaatttgtgtcctgtgcagtatgaagaattcagtgaatattcattaatgtattagcttgttttgctctctgttcatatatggctctattcttagaaatataatttgaatgtgatctttcaatagtctgaatattttacaaattatagctatgtcttgtgaaaataacctcaaaaagaaaaatacgactctgttgtcttacttgatatttcttgccctagtaatgtacttgacatttatgttcctaagcagtgtaagtactagtagaatttctctgtcaaactcaatgatcatttagtacttttgtcttctcccatgtgcttgaaggaaaaataaagtgtcactaccgtatttcttgttttcatcaaaaaataaaaataatttaaaaaaaaaa

SEQ ID NO: 64675 - DNA, 1385 bp, Homo sapiens
aattaatacattttgtgcttttattcagctcatcttgtggtaaaaggagtttgctcaggcaatgaattatgtcagattaggaataggtcttgaccgatctacagatatgcagtattgatggaaaaaggatccctacttagaatagtttctctggagtgagtataactgcctttattaaaatgtttctatctcttgtaacaatttcataattgtatagtttataggcaagcaataaacagcaagatgtttgaggtggatatgaaaattgctgaaatgcatgtaaaaagaaagcaactccatcaactactacctaatcatgtgcttcagaaaaagaaaaagcattcaacagaaggtgtcaaattgacagctctcaatgacagcagcctcgacttgtctatggacagggataacagcatgtctgtgccttcacctactagggctacgaagaccagtccattgaacagttctggcagctctcaggggtaaggaaaaagagggaaatagaagtggaggggctgtttgctaaatcaatcagatacattctctttttgctattaaagtcatctatttagaatgttattttcattccatctactaatttttttttaaatagcaatttaattcccaggtttggggatagtactttttggttttgtcttgtcatacttaacattttatttttgagactgataatgtcttcagtcagatgtgaatgaatgttagcacataacccctccaaattcatgtatttagatagctactgctacagtgcactgtatggtgtgctgatgagaacagacaaaaggaacaaaaccacctttctgtcccagagctgcttatacctttgtaacagggaatgtgtctatgatagttagggaaacctgttttagaagagctagatatctgtctaacatttacagcagttaaaattttaaaaatttattattattttgagaaatggggtctggctgtgttgtttaggctggccttgagttcctggatttaagcgatcctcctacttcagccttctgagtggctgagactacaggcgcatgccactgccctgggtatgaagcagtgaaaaattttcagccaggtgcagtgactcacacctgtaatcccagcacttggggaggctgaggtggtaggatcacttgaggccaggagttcaagaccggcctgggcaacgtggtgagactcccatctctagaaaaaagtaaaagaattaggtgtggtggtatgcacctgtagtcgtggccactcaggaggctgaggtgggaggattgcttgaacctgcaaggttgagactacagtgagctgtgatcccactgctgttgcccccagcctgggcaaccagagtgagaccctgtcttaaaaaaaaaaaa

SEQ ID NO: 64676 - DNA, 1077 bp, Homo sapiens
ttttttttttttgggagttgagattttaatatcataaatcggtgtggggccacacctctcactgccaggcccgtgggcctcctatcttcatattgcctggaaggctgcctgcagccagggcttcccccatcccctaggaaggatccagcaccagcctgagaagggaggcaacagcagctaaaggggtgggaggaggaggagacagaagcatgtgctgcaggcgcatgtgtgtatgtacttacatgtgtgaacacatataaagtgtcaggtttacagaccctggctcaaggacagtctaggatgggaaaggaggtagggcgagaagaagcacatattttctccctggtgcttcagcctcaccctatccaagggacagacatatggggtgtgagaaacccatccccaggtcccagccttcaggactggagtccttttgagtctggtggagtcacagatccagtctttgggggacactgggtctgtctccttttgaaagccctggaaaggtgggaggtaagaagtaaagggagacaggtccctgctagaagaacttgacgcctcggccatcgctgacagtgatgatctcggccttgtgctcctgctgtagggcctgcagagcccgcagtagagtggcttcatccagcccgtggaactcctcatcctctgtgtcttccccattagtcagttcatacagggtaaagacggagttgttctggccactcctggaaacccactgatagatgagtttcccccattcttctggcctccgccacatgatcaggaagctggacttgctcttatccaaccactcgaggttccctttcttcctcagttcctctaatacaatctggatcgactccacaggaagctttcgctgtagcttgacgttgttgaagagcgggctctcctgagcttccatcaccgtcatgctggactgtttgtgcaggcggcagaaggacaggaccagcgagcaccaggcggccagctgcttctgccgagtgtccacattcggttgtaacgtaaagaagggtgggaagcgatactgccacggccactcgaaactcatcgccatcgtag

SEQ ID NO: 64677 - DNA, 455 bp, Homo sapiens
agcggccggcctttttttttttttttttttttttttttttttttatgcttatgaatctatttaattgctcagactgtgctagagaatacgtaccatgaaatacatatatttcataaggttcagttacaaaatggattgtttcaaatggcaatttcttacactaacctgattatgaaaaaaagaagtctgtatcatctgcttccaagtctgttatgtccaaatatattttaattatgcatttattttgctacttttataaatattagagatttcaccttaaattatttttgtaactagttctagaacatgttttccaattattatttttctaatggagacatataattgacctatgtttatgcatatatgttctctacacagtgaaactttttttaaaaagaatagtaaagaaaatgcggaagctctggctctccaaggcaaagtcaaaaaaaaaa

SEQ ID NO: 64678 - DNA, 399 bp, Homo sapiens
tttgtgctgcaaccaggtactgtgatttctcacctagtttccatagctcttgtgaaggtgttttcgtgcatggatagtgttcaaattgatgtttctgttaggggacaatcactggagagtcctattcttccatcttattctgcccctctcctccaaaaaggtcaacttgtaactgcttttttcaaaccaatattcaatcagtttatgaaccacatgagtcagaatcatcagaatatcccaccaacaaatacagagagaagatcaagatcctgtacaatactataaatatatatttatgttttcacagtcacccagtgtattgtaatgtatacttgaaaaatgttataacttatgaaggacagtttctgatgagagtctttataagatataagacttaat

SEQ ID NO: 64679 - DNA, 2255 bp, Homo sapiens
ttttttttttttactttcattaagtgctcatttattatttatgtagaaaagtttaaaatgctcccaatgagttcatcagttatcaagctcacatgagttaggacacaatcacctttggtttttcatctcataataagtcagcaaaagttgacatttatcttactagacatttcccattagccctaactgaaacagatatcaaacaccctagattctcttcagtgcaaagtatctggagtcacagcaattttagagacaagctagtgcaatctagtaattttcatagtcgcagaaactgaggcctagaagtgatttgtacatgtgagcagctagaaccaggacaagaactccagaacctgggaccacgtgagagtaaaaagaaagggcaccgagtacaggaacaacaactgacacatttcaggtggaaaaaacaagtcacataactgaaaaccaaaatcacagttacataactattttatattagcttcctacatataaagtataaaaactcagctatacatgttatgaaattgtacaaacttacacttgtttatggcctaaaatttgtataaggacacacttatacagatttcataaacaatggccatttttagaaaaagttatatttgtccctgaacataatattcataatttgctttcaaaacaaactcgaagtaaggattggactttaagcttccaagctgatccgcttgtagcaggtctttcacctccggtaagtactcactgagctgaatgccatcttttaaaagtttctgtaagatcttcacaaatatactgtctttagatacttcaattggatcatctttgccatcagaactggaccagttatctctctgaagagctttgcaaaggatttccagttttagatcatttatatttatatcttcttcctcatcaatatattccaacaagtccaaagctttcttgaaatcatattcattagctcttctattttcttcacagatatatagaccaatgagttgtggtgcagtcaatactggcatcgcactgagatttagctgtttctccgccagcagctgttcaggtagggtctcctgatgcagtagaaagcgctcctgctcagccatttcttcaattttttcttgtagcatatcctctgaaaagtctgaagctaatgcagccaatttactcaagccaagaagggttttcttctttgcaaagtaacgagtttccatatttgccaaacccagaagtgttgcatgagccttttctaattcttggctattaatttcatgtaaccagctgagatgttcatgagcttgcaaaaaatttgccaactgtccatgctgagaaatgggctgagataataatttgcctcgctttcctttctccagataccaacggaagagaaagtctgaaaaattctgatcagcaaactgggtcatgtagcgctggagtcggctctggttgtcagtctgctcacacatttgtaccaatatatcaaagtcacagtatttctctgctagagaagcagcccacaggtactggcctagtgaaagaagaggagataagagatctgatcttttctgtaggtattccatctccagattgtcatatctttcccgattactggatttatccacagacttaagctgagaaacataaccatccaggaagcaatcgatcagggctaccagctgctcggtcacgatgtttcggaggttgctgtctgcctgtggataagccaccttcaggacaatctcatgctggcgtattattaccgttcggatgccaccaggaccacttgttgccgtccatggaacatattcaggttctttttctagtgattcttctcttctatacaaagagtttctattttggcgataatgactagcagcctgcagcatatcctggaaaaaaagttaatgtgttatcacatgcaaaaggtgatggatcacagtatttctgaagataatttaagacagcaaagtaaattagtaagaaaaaatactcaggggccaggaatgttggctcacacctgtaatcccagtgctttgggaggctgaggtaggaggattgctcctagcctgacaacatagtgagaccccatctgtacaaaaaatttttaaaattacctgggcatcgtggcgtgcacctaccgtcccagctacttgggagactgaggcaggaggactgcttgagcccaggaggtggaggctgcagtgagctataatcaagccactataaacacgaaatcgtcgacccgggaattc

SEQ ID NO: 64680 - DNA, 719 bp, Homo sapiens
ttttttttttttccaaggacaagagtgtctttactggagttgggactggggcctctataggggcttctggtttctgggctgtaggtttgtgaggtgtgggatcttaagtcaaaggtgggggactagggcagggtatcagaaggtgatgtcatcctcgtacagggacagcagcagcaggacggtccagccgcccagcaggcccacgttgtgcagcaggaagaggagccagggccgcgggtcccgtactttcaacatcgccgggagcatgtcgcagagtgctacgtagaggaacaggccggtggccactgccaggatccaggcctcgctctcctcgctgactccaaccgcgagtgccacgtagagaccagcgaaggccgtgagcgcggaggccaggttcagcagcagtgcttggcgcacggacagccccgcgtgcagcaaggcggcgaagtcccccagctcgtgtggcaactcgtggcagaacacggccagcgaggtggccagcccggtcttccaggaggacgcgaaggcggcgcccacggccagcccgtcggcgaagttgtgcacggcgtcgcccagagtgatcatatagggcagtagcctcaactctgggctcagtctcctgggctcagggttcagcagctccgggctctcctccgccacctgggaggagccttgagtaagtcctcgaaatcgtcgacccgggagttccggccgagtgc

SEQ ID NO: 64681 - DNA, 1794 bp, Homo sapiens
gaggagctgaggttcggtccccgccggggaggtcgggacgggcaggggctgaggaccccgcgccagcttgggagccctggagttctggcgggagggaagctgtcaaatggaagccggtagaaatgagacagacgcccggagaagcggggagccccgcccctccgccatagcagcctcgggcgccgcctcttcctttccagcctcccgccctcgtctgcttccggccctgtggcctggtggggctctgcaggctccctcgggagtggtccttgggccgtggcccctctgggaggcctgagggagctcaatcctggtagcaacacccctgaattcctggtggtgaaaggatgtggccccaggacccatcccggaaggaggtgctgaggtttgcagtcagctgccgtatcctgactctgatgctgcaggccctcttcaatgccatcatcccagatcaccatgcagaagccttctctcctcctcgcctggccccctcaggctttgtggaccaactcgtggaagtattatgcctacacccaattctgtctgccaggctcagcccgccccattcctgagcctttggtacagttagctgtagacaagggctaccggattgcagagggaaatgaaccgccttggtgcttctgggatgttccactaatatacagctatatccaggatgtctactggaatgttggctttttgaaatactatgagctcaagcaggtgcccaattttctactggctgcaccagtggctatactggttgcctgggcaacttggacatacgtgaccactcacccttggctctgccttacacttgggctgcaaaggagcaagaacaataagaccctagagaagcccgatcttggattcctcagtcctcaggtgtttgtgtacgtggtccacgctgcagtgctgctgctgtttggaggtctgtgcatgcatgttcaggttctcaccaggtttttgggctcctccactcctattatgtactggtttccagctcacttgcttcaggatcaagagccgctgttgagatccttaaagactgtgccttggaagcctcttgcagaggactccccaccaggacaaaaggtccccagaaatcctatcatgggacttttgtatcactggaaaacctgttctccagtcacacgatacattctaggctacttcctgacttactggctcctgggactactcctacattgcaacttcctgccttggacatgacctggactctccagggacaggttggaagccaacttaacccaggggtctgaaagtaaaaatacacattggaactgcctctgctgccctgggatcattactgtgtccattataatctttctctttctctttgaaagctggtcaggaatgggagaagtgtcagacactagagagccccttctggtcctggctagggcaaattttagacaactattttctctgtaagtgaagattgtcgtattccaagtctaaaatacacctggatctgtctagtcaatcaacatagcagagacagtctttaaacctaccattgacctgtgtgtaaatttaaatgttcattttattgaagtgtaaatttcatcataaggcattagctgttaggctggttatcagtccacacaagtttgtataggcctgaattgtgtagtggcagtaaaaaagtgggaccatttttaccaaatgcgacattgtttctgatgtttttttttatgatttgtgcatgtatttttatatgaaaaaaacttacaaagatatgcaaattaaacttctttcagttataaaaaa

SEQ ID NO: 64682 - DNA, 1499 bp, Homo sapiens
gtttcgcggacctatgtcgcacgtgttggaattcgccctccggagtgcgcagggcgacggccccacctccggccactgggacggcggcgcggagaaggcagactttaacgccaaaaggaaaaagaaagtggcagagatacaccaggctctgaacagtgatcccactgatgtggctgcccttagacgcatggctatcagtgaaggagggctcctgactgatgagatcagacgaaaagtgtggcccaagctcctcaatgtcaatgccaatgacccacctcctatatcagggaagaacctacggcagatgagcaaggactaccaacaagtgttgctggacgtccggcggtcattgcggcggttccctcctggcatgccagaggaacagagagaagggctccaggaagaactgattgacatcatcctcctcatcttggagcgcaaccctcagctgcactactaccagggctaccatgacattgaggacacatttctgctggtggtaggcgagaggctggcaacatccctggtagaaaaattatctacccaccacctcagggattttatggatccaacaatggacaacaccaagcatatattaaactatctgatgcccatcattgaccaggtgaatccagagctccatgacttcatgcagagtgctgaggtagggaccatctttgccctcagctggctcatcacctggtttgggcatgtcctgtctgacttcaggcacgtcgtgcggttatatgacttcttcctggcctgccacccactgatgccgatttactttgcagccgtgattgtgttgtatcgcgagcaggaagtcctggactgtgactgtgacatggcctcggtccaccacctgttgtcccagatccctcaggacttgccctatgagacactgatcagcagagcaggagacctttttgttcagtttcccccatccgaacttgctcgggaggccgctgcccaacagcaagctgagaggacggcagcctctactttcaaagactttgagctggcatcagcccagcagaggcctgatatggtgctgcggcagcggtttcggggacttctgcggcctgaagatcgaacaaaagatgtcctgaccaagccaaggaccaaccgctttgtgaaattggcagtgatggggctgacagtggcacttggagcggctgcactggctgtggtgaaaagtgccctggaatgggcccctaagtttcagctgcagctgtttccctgaaagccagagaagaccttcctcttacatcacattaaggcacccactcactaccttggcgtcgatttttgggtctgacttgactcgtcaactgctggtctctcccacctggttggaaatgtcgttggaaacttgcaaagactctccagaccttagggaacaagaggcatcactcagtccttctgggacagcttccctgtaagcaaagccaggtttgttctagattcactctggccttgaaaaaaaagtgctttttgcg

SEQ ID NO: 64683 - DNA, 1046 bp, Homo sapiens
tttttttttttgattcgctacaatgagtttattggaaacacagagtgaaacaaagacaaaggagaaggcagcagagtcattagtttttcagaagctcttgagggcagccccggaagggagatgttctccccacacgcgtgggcctgtccctcgcagagtcatagaaccactatccagggtccgcgtctccattccacaggcaaaagcacatgggcagagtcccaggtcgtgcagacagggacattcccgggcctcccccgttcctccaagctttggggaagagctcaggcaagaccaatgtatacagcaaaaaaaaaacagaaggtaggcggaagaaaaagatgaatcctcgggacaacaaattgactaccaggaaaagctacagagagagaccatggcgcctcccggccctccccggactcctgcgtccggggatggctcccggagcggagcggtggggagggcgcttagagtgcaggcagcgggcggcggctactgggaggccggcgcgggcggcgcgttctggtggcgcgaggtactggctgggtggagagtgacggcgacaggcgctggcggaggcggcagcctcctagcacctcttacagctgccgccgcagacgccaacccgggcggagggggcgcaggcgttagtagtgcccaccaccacgttgctgttgctggggacgctactgactctggtggagacaacaggggcagtagtggaggcgcagagatcgccacagacaacgccaccgcgggagctgctgacgcctgcaggggaaagagacggaggcgcgcgtcaggcgcagccgcgacctgggtgagtggctttgctgcgagcccacgcgccctttgcccagaggctcccagacccgcccagcgggaggaggggacggaccccactacttacagacattcaccgagccgacgccctcgcacagcctgcagggagagaaggcgagaggtcagtgccgcggaaaaggcgccgggcccccgtgactgaagtggagggggacatctgtggccctccatctgggcacttgcca

SEQ ID NO: 64684 - DNA, 1701 bp, Homo sapiens
gcggccgcgggggccccgcctgctgcgcgcgcgggctacgcccacttgctgaacgtgcagggccggacgctctatgacgtcatcttgtacgggctccaggaacactcggaggtgtctggcttccttctggagtgtgacagctcggtgcagggcgcgctgcagaagcacctcgcgctatacaggatccggcggaaggtcacggtggagccgcacccggagctgcgagtgtgggcggtgttgcccagttcccctgaggcctgcggggctgcatcgctgcaggagagggcaggggctgccgccatcctcatccgcgacccgcgaacagcacgcatggggtggcggctcctcacccaggatgaaggcccagccctggtgcccgggggccggctcggggacttgtgggattatcaccagcaccgatacctgcaaggcgttcctgagggggtccgagacttgcctcctggggtggccctgcccctggagtccaacctggccttcatgaacggcgtgagcttcaccaaaggctgctacattggccaggagctgacggcccgcacccaccacatgggcgtcatccgcaagcgcctcttccctgtccggttcttggacccccttcccaccagtggcatcacccctggtgccacggtgctgactgcctcaggacagactgtgggcaagttcagggctggccagggcaacgtggggctggccctgctgtggtcagagaagatcaagggtcctctgcacatcagagcctctgagggtgcccaggtggccttagccgcatctgtgccagactggtggcctacagtctccaagtagtccgaagccttggctggcgcaggctgatggggaggctggggcctggggcctttggcctctgtccagggtcttcccgtcccatctgtctgctgcgcctactgggtgggagccctggtttccatctgggaaagtcccccttgtaggtgccctgcctggccccacccatgctcaggggccccaggcacgtgggttgttttctccctggacttcctgtggccccagaggagcccaccgtgtgagtgctgggctccagatggcgccgggtcccaatcgtggctccacacagggttgtctgggaggacgggacggtgtctctggccagcactggcagcttccgggccttgtacccctctctgcctggcatgagcctcatggggggttggtccctgtgcctggaagcggggtggtgtccagggtctgcaggctggggctcgggctttgggagttgtttcactgtgcttgcttccagcatgtctcagggtggggctatgcgtggtctagaggggtctggggcattggatcaggtggcatgtgggtgtctacacatcgagaagcacacagggatgagccactaggtatcccatgctggaggcttgtggaaggctgtgcccatctcccatgtttccccacctctgttcctcctcagagccctccaggagcgtggggtgggggccagcgcagggctcaggagccagcagggcagagttctgcctgtgtgtgctgggttttggcatagcctgtgtttgcagtgagagtgacttgctgtcagtcacggggcacagcctcctgttcacccactggcttcccccttcccactgaagtgtgagctctatgtttcagggcatctattaaagagtgagccacaggcaaaaaaaaaaa

SEQ ID NO: 64685 - DNA, 712 bp, Homo sapiens
tttcgtaaaaacagagcgggagtattgggaggaggataagctggggaagaggctggccacactggttgctataaccaccaccacttccggtccgttcctctttacggcccacctcagcgctgcccgcgcgaaatttgtatccctctgcttgtgtccactggctcctggggagcagcgcagggaggaggaggaggaagatatcaaagagccctcccattgggggccccagatcgccacttccggtgaccagaggtagggaaggaaacaatcccgacccggagtggacaggtgaggaggggaggacttgcctcgccgaggccgctgcgaggagcgtgcccaagggcgaaggtccagggaacccggctcccgcgcaccgaagacggccgccatgccggcccgttgtgtggccgcccactgcggcaacaccaccaagtctgggaagtcgctgttccgctttcccaaggaccgggccgtgcggctgctctgggaccgcttcgtgcggggctgccgcgccgactggtacggaggcaatgaccgctcggtcatctgctctgaccactttgccccagcctgttttgacgtcttcttcggttatccagaagaacctgcgcttctcccagcgcctgaggctggtggcaggcgccgtgcccaccctgcaccgggtgcccgccccggcacctaagaggggagaggagggagaccaagcaggccg

SEQ ID NO: 64686 - DNA, 733 bp, Homo sapiens
ttttttttttttggtgaaacataatgtttttaatttcacacctcacagagcacagttgaatgcttcataacgacataaacaaaagttaggctaagcactgcagacgagttgggagggcaaagatagcttcccctgtggtctgcactccaggtttgcgagggaatatgtaactaacaaactgcttggctaaggccacagaaatgtgtttcctggtgttttggctgctgacgccagtcttctctgacaaagatgtgttaacactgggtgcaacaaactgaatctctttcctaagatcagtcaggaaaattcatgtcttatttcttcctggatttctttttggtggtgtcataagcacggatgacttcttcctgactaacagctccgtgttcttcttgagaaaaagcatacccatgcgggacgccctgctgcagggagctgccccggaacagcgtcgggggcgtcttccggcccagcctcttgatcaggcggtcgcgctcgttcagcctctttccattgctatcccgcagcaccgcttttcccaggactcgagacttggtttccagctcctgcacctcctccagcaatgtctttttgcaggtgtgcttggctgctctccatgccacatcttcaatcaaacaggcagtaggaaccagaaataatcccaaccagaagtgtgcggagctcaggaccatagttgcctgtcctctcatatctggagcaatgggaatggtgg

SEQ ID NO: 64687 - DNA, 1336 bp, Homo sapiens
acaagcctgtgagcaagcacaagcgggatgagttggtgagagccattgaatcacccttgtagaccctgaactatcctgcagagaacagcttcaatcaccgtccttacacggcttgtgatttcatagaagggatctaccgaacagaaagggacaaagggacattgtatgagctcaccttcaaaggggaccacaaacatgaattcaaacggctcatcttatttcgaccattcggccccatcatgaaagtgaaaaatgaaaagctcaacatggccaacacgcttatcaatgttatcgtgcctctagcaaaaagggtggacaagttccggcagttcatgcagaatttcagggagatgtgcattgagcaggatgggagagtccatctcactgttgtttactttgggaaagaagaaataaatgaagtcaaaggaatacttgaaaacacttccaaagctgccaacttcaggaactttaccttcatccagctgaatggagaattttctcggggaaagggacttgatgttggagcccgcttctggaagggaagcaacgtccttctctttttctgtgatgtggacatctacttcacatctgaattcctcaatacgtgtaggctgaatacacagccagggaagaaggtattttatccagttcttttcagtcagtacaatcctggcataatatacggccaccatgatgcagtccctcccttggaacagcagctggtcataaagaaggaaactggattttggagagactttggatttgggatgacgtgtcagtatcggtcagacttcatcaatataggtgggtttgatctggacatcaaaggctggggcggagaggatgtgcacctttatcgcaagtatctccacagcaacctcatagtggtacggacgcctgtgcgaggactcttccacctctggcatgagaagcgctgcatggacgagctgacccccgagcagtacaagatgtgcatgcagtccaaggccatgaacgaggcatcccacggccagctgggcatgctggtgttcaggcacgagatagaggctcaccttcgcaaacagaaacagaagacaagtagcaaaaaaacatgaactcccagagaaggattgtgggagacactttttctttccttttgcaattactgaaagtggctgcaacagagaaaagacttccataaaggacgacaaaagaattggactgatgggtcagagatgagaaagcctccgatttctctctgttgggctttttacaacagaaatcaaaatctccgctttgcctgcaaaagtaacccagttgcaccctgtgaagtgtctgacaaaggcagaatgcttgt

SEQ ID NO: 64688 - DNA, 1045 bp, Homo sapiens
aatttctgccatttgaaggaaaagtgaatttaaagaaaccgcaacatgtattttctgttttggaggattatggtttagacccaaactgcatccctgagaatccacataatatttattttggtagatggattgcagatggacagagagagcttattgagtcatacagtgtcaaaaagagacactttattggaaatacaagtatggatgctggtttgtcattcattatggctaaccatggaaaagtgaaagaaaatgatattgtctttgatccatttgttggaacaggtggcctgctgatagcatgtgctcattttggtgcatatgtgtatgggacagacatagactacaacacagttcatggcttgggaaaggctactaggaaaaaccagaagtggagaggaccagatgaaaacattagggccaatcttcgtcaatatggtttagagaagtattaccttgatgtcctggtttcagatgcatctaaaccttcctggaggaagggcacatattttgatgcaatcattactgatcctccatatggtatcagagaatctacaagaagaacaggttcacagaaggagataccaaaggggatagaaaaatgggaaaaatgtccagaaagccatgttcctgtttccttgagttatcatctgagtgatatgtttcttgacctgttaaacttcgcagctgagaccctcgttttaggtggaagactagtctattggttaccggtgtatacgccagaatacactgaagagatggtgccttggcacccttgcctggaactcgttagcaactgcgagcagaagctttccagtcacacatcaaggcgcttgatcacaatggaaaaggtgaagaaatttgagaatcgggaccagtattcacatctgctaagtgatcattttctgccataccaaggtcataattccttccgtgagaaatattttagtggggtaacaaaaagaattgccaaggaagaaaaatccacccaggaatgaaaattaagattttgtcattgatgaaagaataagaatttgatttaaaa

SEQ ID NO: 64689 - DNA, 1188 bp, Homo sapiens
attcccgggtcgacgatttcgtcacaatgcccgccggggcttcttcttctcccatattgggtggctgtttgttcgcaagcatcgagatgttattgagaaggggagaaagcttgacgtcactgacctgcttgctgatcctgtggtccggatccagagaaagtactataagatctccgtggtgctcatgtgctttgtggtccccacgctggtgccctggtacatctggggagagagtctgtggaattcctacttcttggcctctattctccgctataccatctcactcaacatcagctggctggtcaacagcgccgcccacatgtatggaaaccggccctatgacaagcacatcagccctcggcagaacccactcgtcgctctgggtgccattggtgaaggcttccataattaccatcacacctttccctttgactactctgcgagtgaatttggcttaaattttaacccaaccacctggttcattgatttcatgtgctggctggggctggccactgaccgcaaacgggcaaccaagccgatgatcgaggcccggaaggccaggactggagacagcagtgcttgaacttggaacagccatcccacatgtctgccgttgcaacctcggttcatggctttggttacaatagctctcttgtacattggatcgtgggagggggcagagggtggggaaggaacgagtcaatgtggtttgggaatgtttttgtttatctcaaaataatgttgaaatacaattatcaatgaaaaaactttcgtttttttttttgtttgttttgtttttgagacagagtctcactctgtcacccaggctggagtgcagtggcgcagtctcggctcactgcagcctccacctacctggttcaagcaattctcctgcctcagcctcctgagtagctgagattacaggagcctgccaccacacccagctaatttttttgtatttttagtagagacagggtttcatcatgttggccagactggcctcgaattcctgacctcaggcaatccacccgcctcggcctcccaaagagctgggattacaggcgtgagccaccgcaccctgccgaaaaaaacttttttttttttgagacggaggctcgctctgtcccccaggctggagtgcagtggcgagatctcagctcactgcaagctccgcctcccgggttcacg

SEQ ID NO: 64690 - DNA, 1669 bp, Homo sapiens
ttttttttttttattgatcattcttgggtgtttctcgcagagggggagtgggcagggtcataggacaatagtggagggagggtcagcagataaacaagtgaacaagggtctctggttttcctaggcagaggaccctgcggccttccgcagtgtttgtgtccctgggtacttgagattagggagtggtgatgactcttaaggagcatgctgccttcaagcatctgtttaacaaagcacatcttgcaccgcccttaatccatttaaccctgagtggacacagcacatatttcagagagcacggggttgggggtaaggtcttagattaacagcatcccaaggcagaagaatttttcttagtacagaacaaaatgaagtctcccatgtctacttctttctacacagacacggcaacaatctgatttctctatcttttccccacctttcccccttttctattccacaaaaccgccatcgtcatcatggcccgttctcaatgagctgttgggtacacctcccagacggggtggtggccgggcagaggggctcctcacctcccagacggggcggccgggcagaggcgaccccccacctcccggacggggcggctgccgggcggagactctcctcacctcccagacggggtcgcggccgggcagagacgctcctcacatcccggacggggcggcagggcagaggcgctccccacatctcagacgatgggtggccgggcagagacgctcctcacttcctagatgggatggcggccgggaagagacgctcctcactttccagactgggcagccaggcagaggggctcctcacatcccagacgatgggcggccaggcagagatgctcctcacttcccagacggggtggcggccgggcagaggctgcaatctcggcactttgggaggccaaggcaggcggctgggaggtggaggttgtagcgagccgagatcacgccactgcactccagcctgggcaccattgagcactgagtgaacgagactccgtctgcaatcccggcacctcgggaggccgaggctggcggatcactcgcggttaggagctggagaccagcccggccaacacagcgaaaccccgtctccaccaaaaaaatacgaaaaccagtcaggcgtggcggtgcgcgcctgcaatcgcaggcacttggcaggctgaggcaggagaatcaggcagggaggttgcagtgagccgagatggcagcagtacagtccagcttcggctcggcatcagagggagaccatggaaaggggagaggggagaggttagtattttcaaaaatcatcatatagtacgtggttacacaactctgaatatactaaaacacattgaattgtatactttaaaggagtgaactatatctcaatatataaggggtgagttatagctcaataaagctgttaacaacaaaacaaaaatgccataccaaaaaaaaaatcatcatactgatctgtgaccttccaatggaaggaattaaactaaacttttcaaaatggggctactggcccttaggcaaggtcctgagattatcctaaaattatggatttagagtatttaatgacttttctgaagaattcttagaattcatctactaagcaaataaccattcatgtagttatgatgtagtcattgtcaatttttacaagg

SEQ ID NO: 64691 - DNA, 2402 bp, Homo sapiens
cgcagtccccgagcgagaccaaacaggtggaatccgggctggagccggagctccggcggcgcgggtggcggcacgtccctccagacagtaccacaggcacctggagtaccggcatcggtcgctgtggcccccgagtgtccgtcagagcctaggggagcctgccctcccgcgcctcgtcggggcccggccaggcaccttggccgccggcgcacggacgcgggcacgagcactagatcacggctgctggacctcggcacgttgacaagatttctctggggtaccgcggaggattactttgaatttcggtggtcgcctgtggtctggcatatttagaacttaagtctattatttcgggcaccatgactttgaggcttttagaagactggtgcagggggatggacatgaaccctcggaaagcgctattgattgccggcatctcccagagctgcagtgtggcagaaatcgaggaggctctgcaggctggtttagctcccttgggggagtacagactgcttggaaggatgttcaggagggatgagaacaggaaagtagccttagtagggcttactgcggagactagtcacgccctggtccctaaggagataccgggaaaagggggtatctggagagtgatctttaagccccctgacccagataatacatttttaagcagattaaatgaatttttagcgggagagggcatgacagtgggtgagttgagcagagctcttggacatgaaaatggctccttagacccagagcagggcatgatcccggaaatgtgggcccctatgttggcacaggcattagaggctcttcagcctgccctgcaatgcttgaagtataaaaagctgagagtgttctcgggcagggagtctccagaaccaggagaagaagaatttggacgctggatgtttcatactactcagatgataaaggcgtggcaggtgccagatgtagagaagagaaggcgattgctagagagccttcgaggcccagcacttgatgttattcgtgtcctcaagataaacaatcctttaattactgtcgatgaatgtctgcaggctcttgaggaggtatttggggttacagataatcctagggagttgcaggtcaaatatctaaccacttaccagaaggatgaggaaaagttgtcggcttatgtactaaggctggagcctttgttacagaagctggtacagagaggagcaattgagagagatgctgtgaatcaggcccgcctagaccaagtcattgctggggcagtccacaaaacaattcgcagagagcttaatctgccagaggatggcccagcccctggtttcttgcagttattggtactaataaaggattatgaggcagctgaggaggaggaggcccttctccaggcaatattggaaggtaatttcacctgagtctcagggaaccacgaagggatatggcaatgagtagagcatgaaggtagaacagtctatatactcttgtgacacatacaatccctaccttgtgctgccaagtaactcatttttgtgcaattctcagtataagccctttgtcgtttctgtgcctatttaaagtctcctaaaggtgtaattgactaggaaggatgtagttctacactgccatttacctatttaaattcatccttgtgaatatctttgttgttgttgttgagacagagtctcgctctgtcacccaggctggagtgcagtggcgtgatcttggctcactgcatcctccgccttccaggtttaagctattctcctgcctcagttgcccgagtagctgggactacaggcatgtgccaccacgcccagctaagttttgcattatcagtagagacggggtttcaccatgttggccaggctagtttcgaactcctgacctcaagtgatccacctgcttcggcctctgaaagtgctgggattacaggcgtgagacactgcgcccagcctcatccctgtgaatttcttattgtacacaagttctttcactatctgtgtgcagtgctctgaggggacagacaaggcttgggtgtatatgccaaccagatctcattgaagtatcagcttgtttggtactaggtgcaagtgtagcatgtcacatgtgaccatgttgggatccattgacaatttttagggtatgtactggcctacatttatgatgaagatcctgagcggaggttaagatattaagttattttccatatgaatcagaattatattgattctgtgcaatcaaaacaaaaggcagaatagaatgctgagattggttaagtttgcaatgaccatcttgaaccacagatttctgctatgtgtcatcaaaacatctagttctgagtaacattttcacgattgttataaaattataggtgtgaacttctaaaataaaggaatgctaat

SEQ ID NO: 64692 - DNA, 3009 bp, Homo sapiens
tttcgtgccgtgcaagctgcttatcccagagagagatccattggaggaaatagcagaaagttctccccagacggcagccaattcagcagctgagctgttgaagcagggggcagcctgcaatgtgtggtacttgaactctgtggagatggagtccctcaccggccaccaggcgatccagaaggccctgagcatcaccctggtccaggagcctccacctgtgtccacagttgtgcacttcaaggtgtcagcccagggcatcaccctgacagacaatcagaggaagctcttcttccggaggcattaccccgtgaacagtgtgattttctgtgccttggacccacaagacaggaagtggatcaaagatggcccttcctcaaaagtctttggatttgtggcccggaagcagggcagtgccacggataatgtgtgccacctgtttgcagagcatgaccctgagcagcctgccagtgccattgtcaacttcgtatcaaaggtcatgattggttccccaaagaaggtctgagaactcccctccctccctggacccaccgatgcctctcgaagccctggagacagccgttgggtgagggtggggcccccactttttaccaaactagtaaacctgacattccaggcccatgaggggaaagaggatcttccagctctgcaaaaacaagaacaaacaacatcaccgtgaattggcctttcctgaaagtgacttatctgacacatctctgtagccacatgctttttgggtagaagaagctgggcatgggtgcaccccaccccctagggtccccatgggaaagggacatgcaaggaaacagcacagaacacgaggtggtccccatgtccctggcacactagcattccgggggatgaggaatccccagcccttgaggcagaggtgccgagtgactgccatgcttcgcccgtccgcatgggcgcttctgtccagctgcacccgaggccgggggtttccctcacctcggtcttcccaagatggagatgctaacgaaactgagaagggggcgtatgtttgacgaaggtttgtgcaagtcaggcccttctggaacacagcagggcctacaacgaggggcctttgcgatgggctgtgaggatgggggtggtgggaagaattggccacgttagagaccccatgccaccccaccatggtgagtgctctgtgcctcctgctcacctgtggtgagctgggcgagctgggcgagctgggcgagctgggctggggagagcctgtgaggaccgagaggagaaatgagaagaaggaacaaaaatattatttctatgtaatttatattttacttatgccaaattatttatgataatttgccattgctatactgtaccagtgtcaaatgctgcagcctgccaagctgtgattttgtgaggcttgtccctatgtaggatgcaccgcaggcccctggccactgaaagagtgtgcagtggactgtgggtctcccatatgcggtgccgcccaaaggtggctttgcctcaagcaacctaccctgatgttttactcattggaatgtttttccccgattgtgggatgactcttttctgatggagagagtccaggagggatggaaaacgcctggatttaagctcagcatcccccacatgggcttttcgatcatcttcaggcctgaagctgcacgacctgaagttcgcctgcatttatcagccctctttgtgctgctccttgccaccttggggttcctgctggggaccatgtgtggttgtggcatgtgtgagcagaagggaggatgaggaaaaagagaagaaaccccggtactgacaagctgtttttgagtgccactgtttgccatcatctaagccactgaatcaagtgtatttcaggcttatttcaacattccaatgccctggttttcctgcttgaatctgttcgtggtcaaaggtttgggggaatttgtgaccctggaacatccccagagtgaaagatggagctgggccacatcagaataaggccttggccccatcctctcacagcctaggtgctctgcaggcatgctgactgtcctgattgcgatccagcccgaaattccctcctctgctttcaaaagtcaaatcccccattcttaggccacactggtgtcacaagctcctgtcagggagctggggtttgggaatgtgctttgtgaactctgctttaaagtgaggggccgaggaaaacttagaaacaggcagagttggaagcagccaaatcacagtgggtgttgtgtgtgtgtgcgtgtgtgcatgcgtgcgtgtatgcgtgtgtgaaagcaggtggaccattccactttttagctcctattgatgcaccaaaccaagtgcctcatttctgtgccaaatgtttgccttggtcgttgtggacctccttctctaacttgcggtggcatgactgtcaggaggtgctggcattttcagcagatcctcatgtgttgaccctgatgtctttagcagaggcctctagcatctcggtttttcatccactgcaggaatgtggccacagggagcagaggtttgtactttccccaagaggtcctcatcctgagacggtctctacccatgtttaacccaaagagtgcaggccaggttccttatccttctgatgaaggatgagagagctcatttagaagtcagagcaaactagggtctcagtattgagaaacgcagcctgccagggaatcacagagacatcggggtgcccgcgatggccctcatgaagccatgcctcgacggcattcaggaagccctgcaaacgtgctttttgaactcattggccaggtgtgatttttacacaaggtaaacgtggtcaagggcatcggggaatttgctccaagcagatagctccctctgaggaaccaaaggaagcaagtttccacgatttctgaagagctggtataggaagtttctttcttccttttgtgttacatgtgcattaaacagaacaagctgtgtgtcatcacagattgtactgtgggctca

SEQ ID NO: 64693 - DNA, 873 bp, Homo sapiens
gaattcccgggtcgacgatttccttgacgctaatgggggtgtggctgggaccctggggcagatttatgtttagcccctcccacggagggtgccgctgtaaccccagcttcctcccccggcccccaggcgtctctagcgtggaggtccagtggatcccggccctgctgccctcttactgccagtttgacaagcccctggaggaaccagcccctacatactgccccgagcgggggcgggtgctgtgtcaccgggccagcgtgttctatcgcgtgggctggccgctccccgccatcgaggtggattttccagaggggattgaccgctacaagcactttgcccggttcctgctggaagggcaggtcttccgcaagctggcctcataccggagctgtctgctgtccagccccggcaccatgctgaagacgtgggccaggctgcagccccgtacggagagccttctgcgagccctggttgcagagaaggctgactgccatgaagccttgctggctgcttggaagaaaaaccccaaatacctgctggctgagtactgtgagtggcttccacaggccatgcaccccgatatcgagaaagcctggccccccaccactgtccactgaccagaaacctggctgcagggccgaggactggtttggggactggagggctggcagcagctggtcaccgtgcgaccgtgaccacctggcatgggcttcgtggcctgctctcaggaagtgggtcaagccctgggaaccctcatccatgagagctcgatcccgtatgaagggtgctgccgcccgtgccatctggcccgggggtgactttttgaactgtttattatatggtggatgatgatttcatctcacgtgctggaaa

SEQ ID NO: 64694 - DNA, 1489 bp, Homo sapiens
tttcgtaaagtggagtgcacccccagccgggagcacctgaagcaccagaccgtctaccgcctgctcaagtgcgcgcccaggggcaagaacggcttcacccctctgcacatggctgtggacaaggacaccacaaacgtgggccgctatcccgtgggcagattcccctccctgcacgtggtcaaagtgctgctcgactgcggggccgacccggacagcagggattttgacaacaacaccccgctacacatagcagcccagaacaactgcccggccatcatgaatgccctgatcgaagcaggggcccacatggacgccaccaatgccttcaagaagacggcctacgagctgctggacgagaagctgctggccaggggtaccatgcagcccttcaactacgtgaccctgcagtgccttgcggcccgggccctggataagaacaagatcccttacaagggcttcatcccggaagatctggaggcgttcatcgaactgcactgacctgcccagaacgcctgcaccctcacctctcccctctcctgctgagatgggggaaatccggctgcggcatagcagatgctcgttcttgcctccttcaggcaccaatcaggagaagggttctgcctcccatcccctctacctgcagacagggtcggaggtgttagcgagcctttggtgctagaagcctgcggggtcatgtgctaagaggacagtctttctccgggagcccgctcactcattctgagttaggaaaagacacaagaccttccccacatcctgtctgcctgggttagggaggcctttgccttgttacctagaggcggagggactgaagccattgcgttccttccctgctagaaacacaggaagaagttgaggacggtctgccttccctcgtccctttacctggccagataactccagccgctgaatacagtgttaggactgggggctcctgagatgagagtttgagattcagggaatgagaccacctctcatttcttccagcatgatcgcgccctgctcccgtgccaccgtagtccctggcagacaggcagggctctgcccagggcagcctgccacttgcatagctttcggttggtttggtgttctgtttatttaataagtgggcaggttgcaagcgttgcacagaaattctgagattttactgcctttttttttttttaaaaaaagtggttggggggcccccttaaggggaatttcaacccggggggattttgggggccctgaaagggccgaggccccagggagggacctgtttgtgtgaggaatttggggagcgagaaaaaagcccacggggtcaccccttaaaacaggggggaccggccttttttatacttttccactttagggcttttaacaggttttccgattttacaggcttttccaggtttcctttttctttagagaaaagacggggcttccaaacaagattcgggagggcccccaaggcctgaaacctctttgcccg

SEQ ID NO: 64695 - DNA, 1614 bp, Homo sapiens
caaaactttttttggtttttttgtttgttcattcaacaagtgtttattgagcatctactacatgccagacactattctagaaacctgggaaaggaggggttagggtagcttggagctgtcccagctgtagctctgtctcccagaagtgaggtctgcaggggaacagggtctgggggtcctcctgcctgggagagggaaggctgagtgtataaaaaggtggaagcctctaaaaatgagaaggctgggtgtgtgggactcatgctggtgccttcccagacgaaggagagggcccagaggaggcagcttcctggagcagagacggcagcaggagcgcccgtgcccggcatcacctcctcttcagcacggatatgcaggacttcttgaggggcccgatctgcaagtgggcgtccacactctccaggaagaaggcaggcttgagtctgtgggtgaagagccccgcaaagtgactgtccaggcggctctggaaggggtcaatgggggaggccgggatgccaccccggcggggccgggaggccttcagcctccgcaggaggctcatcttgccgtcccgtacagcatagaaggccaaggcacggtcagcgtattccaggcagaccccaaccgtgggcgagaaggggtggggcaggggagcctccagcccatgaaaccagacggagaagctgcgtccattccactgcaggcagcaggagtgggcgttgcggcccagccggccgcggtcgtagggctcttgtggggagaagtcttcggccatgacccccatgctgacccagccctcgataatctccacctcccagtagtaggtgcctcggtccagggcaccctcgcccagcacctgctcacaatgggtgaagcgggtgggcgacaaggggtagttgataggacacagcaccctcttgacacctttggttccaaacagctgcaggaacttgtctgctgtgtcgctgtccaaatccacaatataggcaaacttgaggaaatagtccctgggagcttcactctccaagaggttcgtactctcgaggtcttggggctcagcatcagcttccgagtccagcttctgtggcccatcctcgttgccacccggccccctcagctgctcccactggttgacgcaggccacggccagcatgtctctcactgcacggacagcttgggatgatttggtgaagctgagctccctcgggggtccaggcccagggccacacccatcctccagggccagccttagtgccagcagctcctgtgccagacaaatgcccattaaagtgctgctggccatggctcctccttgctgggggtggaggcagctctgccaggaagtcatgcacccactgcctcctcctccctccaccccacctgtcccagcttctgttccttccgtggcccccagagcggccttcacctgcaggaagctgactgagtcagcttcagggacctggctgagattctggcgggctcggctcaggcggctgcgctgttcctcctgtcgccgcaggtcaccctgggagcggcctagcatggcagaatccccctcctcgatgaagcccagcacctgggtctggaagccctgacgaaatcgtcgacccgggaatt

SEQ ID NO: 64696 - DNA, 2157 bp, Homo sapiens
ttgagatggatcagaactttgtaattatattcaggaggagttctgtctattcattcatcatgacatgtgtagtatcatgtgcttttttttttaaaatttaggtttaatacattttcaatcagcctatgcacatggaatatgcgccatttagaaccgtggaattctgggcccagctggactcagccagcacagagcaaacactgttagtaatgatttgaacacttttttgaatactcggtatatctcacttcccgtggcatgatgaaaacaaacatttattgaacacgaactatgtgctagatgtaccctttgtctttatgttgcttatggtctggggaggaaagagacgctaaacaagtaaccacaagtttataagttttacaaaaggggcagatgatatgccacagagatgcagaacagaggggtccgagtctagtttagggaatcaggggaaggcatctctgcataaggaatatttgagctgagatccagaggatgagaggaagttagagcaggatgcagggagcagtacatgtgtgggcttcccttgaacttaggaagaaagggtgtttaatgggcagcaggaagtactaagctccacctctctactgtgaactggggcttgccccatccacactgtggatctcgactcctcatttgtcatgagtggttggctgagagggcctgtgctgacctggactctgggctgggtctagcgggcaaacgccacactaaaaggagaaggagtcgtgggtaggcaggcaaccctcaggactcccttctctcaggcatcacacaggctgttgcgaattcagcaccaccagtgatcagagcaattttaaacatcatccccaccggtaatttttactcgtttctttattaatatagaaaaggagcccagggcagctggaccagtagtacaaagcaccaggagttaataccattctggtgaaggggatggttttacaaaagtgaaggagcaggcaggagccaccaggttctgaggccaggcccagcctactgcccagaacccctgaaacggctccctgggaaaaagctgacagatgggtcaggggtggattgagctggaaaccatggggacagatggcagggatagagggtcatgcagtgggaaccacccagtggctgataaggacagggaacttgtggctggaggctccccattgggccatgggcaggggcttgcagatggcctcagctctgggggcaggtagagaaactgcagagactgatgggcatggagaacccagacatggccctggggctgaagggcctttccaccctctcttcaccaggagccacctttgctctatactacatatggggcttcagggcccaaggcacaggggaggctcagaggcctccagttgggaggaagatggggcaaggaaggaagcacttgagtgtccctagcttaggcagccggggatgagacacaggcaggacaacagcacccccgcatagtggggctagaatgtgggacagggacgggcttatcctcggccagtgactaggaccagccccatggcaatggtgcctgtctccagccttagcaaatcaagtgtgcaacaagcacagggtgtcggcagacctgggctctagccttacaagctctgccagaacttgaatcacacagagctgtatcaccatggtccagccatgtcctgccttggcctgtttcctcctctgtcaatgaggatcatgctggggatccccatggtctcccgccatgtctctatcgatgtcacaaactcatcctcagccccctccgggtcccttgggaatgctggccttgagcttcgcccgaagccaaacagatcgaaggtgtgcagtgtgcggcgggcactcagtgagtccatgttgaggatccagagacccacgccgcccccaaaaccatgcaccatcaccaagggggtgcggtcgttttgctcggggctcacagtcaccgtccagatcttattttggtttgggagggatacatatctggccaggaacttattctggagacactggaggatcctggcttccacattcttcagctgagacatgtaagtggggcgccacgtaaacagccagctactcagccagccttgagcctgctgctccagatcatgcgaaatcgtcgaccaggggatt

SEQ ID NO: 64697 - DNA, 1691 bp, Homo sapiens
tttcgttccatcatctccgtgctgccttggaagagaatcgtggccgtgtcggccaagaagaagaactccaagaaggtgcagcccaacagcagctaccagaacaacatcacgcacctcaacaatgagaacctgaagaagtcgctgtcgtgcgccaacctgtccacattcgcccagcccccaccggcccagccgcctgcacccccggccagccagctctcgggttcccagaccgggggctcctcctcagtcaagaaagcccctcaccctgccgtcacctccgcagggacgcccaaacgggtcatcgtccaggcgtccaccagtgagctgcttcgctgcctgggtgagtttctctgccgccggtgctaccgcctgaagcacctgtcccccacggaccccgtgctctggctgcgcagcgtggaccgctcgctgcttctgcagggctggcaggaccagggcttcatcacgccggccaacgtggtcttcctctacatgctctgcagggatgttatctcctccgaggtgggctcggatcacgagctccaggccgtcctgctgacatgcctgtacctctcctactcctacatgggcaacgagatctcctacccgctcaagcccttcctggtggagagctgcaaggaggccttttgggaccgttgcctctctgtcatcaacctcatgagctcaaagatgctgcagataaatgccgacccacactacttcacacaggtcttctccgacctgaagaacgagagcggccaggaggacaagaagcggctcctcctaggcctggatcggtgagcactgtttcctgcgtcatggctcaaggattcaatgcatttttaagaatttattattaaatcagttttgtgtacagtatgtgtctagcaaagccaccaagggcctcacctttcccacagtctctccctggggtttttttcatccctgccaagaactctgggcacttttgaactcacgagccttgcgcaaaacccagaagatgtattcagagccacccaggccactgacctcccactttggggaactcaaaggactgacctgcccctgccgcctgtgcccttgctgggtccagggtaggcaaggctgccggctgcaccctgtatggagctagagaggggcctctggctgcctggcccagggaggaattggggtttctggttggaggcccttttctggctcctgtgtggagttattcactctcccagaggctcctggagccagccaccctaactgagctgccagtggggtcgtgaggcaagatccccgccacccggggacatcttcaatctaggcgaggcgaagctgagcgggtctagtggaaagattgtgtctggtcgtttgaccacacaccgccctgatttgctgatttctttttttagggagaagggcttttctttagtggagaaatggaactcgcccccctacccccttgtctgctgctcccagccacgttggtggtattggccgatgagctggtttgactcattaatttctctcaatttgggtcccagctaaagaggtggggtgaagctggggacagctttcctgggtgagtttttcttttgaataatgtagtgcagtcaccctgtgggcaaatgccagggacagctgcaggtgcccattagcaacgcctgccttctgggcaaggtgagggatgccataccttgagacca

SEQ ID NO: 64698 - DNA, 2593 bp, Homo sapiens
ggcccggaattcctcgggtcgacgatttcgtggagagtcgggggtcaccaggcctatccttggcgccacagtcggccaccggggctcgccgccgtcatggagagcggagggcggccctcgctgtgccagttcatcctcctgggcaccacctctgtggtcaccgccgccctgtactccgtgtaccggcagaaggcccgggtctcccaagagctcaagggagctaaaaaagttcatttgggtgaagatttaaagagtattctttcagaagctccaggaaaatgcgtgccttatgctgttatagaaggagctgtgcggtctgttaaagaaacgcttaacagccagtttgtggaaaactgcaagggggtaattcagcggctgacacttcaggagcacaagatggtgtggaatcgaaccacccacctttggaatgattgctcaaagatcattcatcagaggaccaacacagtgccctttgacctggtgccccacgaggatggcgtggatgtggctgtgcgagtgctgaagcccctggactcagtggatctgggtctagagactgtgtatgagaagttccacccctcgattcagtccttcaccgatgtcatcggccactacatcagcggtgagcggcccaaaggcatccaagagaccgaggagatgctgaaggtgggggccaccctcacaggggttggcgaactggtcctggacaacaactctgtccgcctgcagccgcccaaacaaggcatgcagtactatctaagcagccaggacttcgacagcctgctgcagaggcaggagtcgagcgtcaggctctggaaggtgctggcgctggtttttggctttgccacatgtgccaccctcttcttcattctccggaagcagtatctgcagcggcaggagcgcctgcgcctcaagcagatgcaggaggagttccaggagcatgaggcccagctgctgagccgagccaagcctgaggacagggagagtctgaagagcgcctgtgtagtgtgtctgagcagcttcaagtcctgcgtctttctggagtgtgggcacgtttgttcctgcaccgagtgctaccgcgccttgccagagcccaagaagtgccctatctgcagacaggcgatcacccgggtgatacccctgtacaacagctaatagtttggaagccgcacagcttgacctggaagcacccctgcccccttttcagggatttttatctcgaggcctttggaggagcagtggtgggggtagctgtcacctccaggtatgattgagggaggaattgggtagaaactctccagacccatgcctccaatggcaggatgctgcctttcccacctgagaggggaccctgtccatgtgcagcctcatcagagcctcaccctgggaggatgccgtggcgtctcctcccaggagccagatcagtgcgagtgtgactgaaaatgcctcatcacttaagcaccaaagccagtgatcagcagctcttctgttcctgtgtcttctgtttttttctggtgaatcgttgcttgctgtggacttggtggaggactcagaggggaggaaaggctgggccccgagtacaacggatgccttgggtgctgcctccgaagagactctgccgcagcttttcttctttttcctcatgccccgggaaacagtctttcttcagaattgtcaggctgggcaggtcaacttgtgttcctttcccctcacctgcttgcctccttaacgcctgcacgtgtgtgtagaggacaaaagaaagtgaagtcagcacatccgcttctgcccagatggtcggggccccgggcaacagattgaagagagatcatgtgaagggcagttggtcaggcaggcctcctggtttcgccactggccctgatttgaactcctgccacttgggagagctcggggtggtccctggttttccctcctggagaatgaggcgcagaggcctcgcctcctgaaggacgcagtgtggatgccactggcctagtgtcctggcctcacagcttccttgcaaggctgtcacaaggaaaagcagccggctggcaccctgagcatatgccctcttggggctccctcatccagcccgtcgcagctttgacatcttggtgtactcatgtcgcttctccttgtgttaccccctcccagtattaccatttgcccctcacctgcccttggtgagccttttagtgcaagacagatggggctgttttcccccacctctgagtagttggaggtcacatacacagctctttttttattgcccttttctgcctctgaatgttcatctctcgtcctcctttgtgcaggcgaggaaggggtgccctcaggggccgacactagtatgatgcagtgtccagtgtgaacagcagaaattaaacatgttgcaaccaaaaaaaaaaaaagggggggcgctttcaaaggggccaggtttttctaccgggggcggggagtgaaaaaccttttttaaggggccccaaaattcaatacccgggcccgggttataacgctttggatgggaaacccctggggttccaaaactaatcctcttaaaaaaaaaggaatcaagtttctcgtatggtctcttaaa

SEQ ID NO: 64699 - DNA, 1139 bp, Homo sapiens
  misc_feature (1)...(1139): n = a,t,c or g
acgatttcgtgtttctgccagttacacttaattttgacatatcagtcagtctggtgccggaagaacttcttagttctctttttgatgatcctgggcttcacaaggggtctgagggtggccatgatgctgaggaggagatggctgccacctccgtaggcagcgccgagagaggggctttttgttttttgagacttcaatttaaattttactttnnnnnnnnnnncttacaaaatacaaagtaaaaagaatgagaacaaaataaattttcagatacccaaaaattgaaagagttcataccaaaagacttcactaaatgaacactgaaagacgaccttcagaaaaaaacaaaatgatcctggacagtagtgtaaagatatagaaagatgaggccatgcaggtaggtaggtgccaaattatgtaagtccagcatgccaagccaaggaatcagaggctccacagggatctaaggaggttctggaaggtttccattgtagtccacatcttctatgctacaaccccatttaacaagaagttgcaagcagccaagccgcccatgaaaagctgcataatgcacaggtctccattctctcttatcagtcacactgggatccactccacttcggagcattatttgtaaagtgaaagaatgtccatgagttgcagcaagatgtaaaggagtgcatccccggtcatcctgggctgtcagatttgctccattcattataagagcctgtacacaagcatcctgacccctgattgcagctatgtgagatgctgtccaacctctcgttgttacgtgtgtgatatcagctccatgccagagcagccaatgaagacactccaaacttccagaatgtgctgcccaatgtaaaggggtaaacttatggagaacatcaagttcattaatgctggctccacgtaccactatttctgaaagctgctttacatctccagctcgtactgcatcatgtatgctgccaaaatgcaccttcttcctggaacaggggtgtgcagtctcactagagaaagtggaggggcctgaattgcccaccccgggcatggcgcaacacctccgactctggggaggagttgagtccaggcccctgatgctgcggcggtcttccgttgccgaattcacc

SEQ ID NO: 64700 - DNA, 2035 bp, Homo sapiens
ttttttttttttagctttgtcagtcctttattctctctagaggaggggctcagtatatcacagcagtggctgatgtcgggtgcttgccacagctcagcactgctctaataactcatcctaaccacaccaagccttgctgagacctctgagcaatcccaccaggagatacagtgaggtccagccactcaggccacacagcgaacaggaggcagggctggtatgggtgcaggtgccaaccccgactgtgccgcctctcggctaagcacctgtgcagtgactgagtgggctcgcaaacagagggctctgcaggtggagcaccccaggcaagtccccaccatcagccccattctgcaggcgcggccccggggccagggatgggagggtcttgccgggcatccagcgaggagactgcatattccctgcccaatctggcttcacggcggcggaactgacgccacgtcccagggcgttcggggctgccaggcctggtgagcaccgcggacatctcagatggccgttctgcaggttgaggccctcggtgccagcgtccccgtgggcagttctgtggcttccctggcccatgtcgtcctcttggcagtggccacatcacagcaccaggtgggatcaaaggggagggcagctccccaggtggacctgagcttctcacactctgacaagccctcgcctgctgatccaagacacagtggcctttgaaattcgatttccttccccaggggggcttcgggatcctggaggagatgtgtgtcaactacgtgcactactacccccagacgcagctggagctctgcaagagcgctgtggacgccggcttcctgcagaagtacttccacctcatcaacaggttcaacaacgaggatgtctgcacctgccctcaggcgtccgtgtctcagcagttcacctctgttccctggaactccttcaaccgcgacgtactgaaggccctgtacagcttcgcgcccatctccatgcactgcaacaagtcctcagccgtccgcttccagggtgaatggaacctgcagcccctgcccaaggtcatctccacactggaagagcccaccccacagtgccccaccagccagggccgaagccctgctggccccaccgttgtcagcattggtgggggcaaaggctgaggggggacctactcctccccctcctccatgctgtccctgtgggctcacaccggcactgtgcactctactctgcgacgatccccatggaacagccctgcacgcccaggatgaaggggccagaccacgcccctgcctgagaccacggtccaatccagccttcttcccccagggtcccctgcatggctgagagggtgtgggtgccctgttgacctaccctggaccgagtggaccacgacctcgtccatttaaacccggctgactcagtgcagggacagcccgcacagtggtccagggtccagccctccgccagccctgttccgcctcactgggtgtggcctggcttctgggacaggcaccatgctgggccggggtgtggaatcaccgggaacgcccccgcccccgccccgctgctcccggtgtgcagcgggtgcgggtgccgcttaaacatttccctgctgagtggctcgtgtttcacagtgggcggcttccctgcgacggaggcaggaccaggcatttagctagttagagactcgcctgggaaattgctccattcctgagtaaacagatattttcgcccacctaaagggaagccctgacaacaactatcaccaaaagacgaggcggcaaagatccagcggggcttctgggcgccggttccacgtggggtggaattattagcaccagcttgcttctctgccggtggggccagcgctgaacagaccggggtggagtcagggctgtgctttccgcgtggttctgccacttagggagtgtgccttgggcgggccatttcacattcctgaccctcacttttctcatctgtaaaaccaggctgatgccgtgcgggctaatgagccaataaagctcacacttgggctggc

SEQ ID NO: 64701 - DNA, 1560 bp, Homo sapiens
gaggagcaattcctgaagagctcccacagttggacagagagaccctgtgccagtggagcacactctcctatcctggcctggtgaaggagctgtgtgccctcttcattggctctgagctccttccaaaagatgaattaaatgatctgatcgaccgagccttcagcagattccgtcacagagaagtggtccatctgtccaggttgaggaatgggctgaacgtgttggagctgtggcatggcgtcacatatgcatttaaggacctgtccctgtcctgcacaacacagttcctgcagtacttcctggagaagagggagaagcacgtcactgtggttgtaggaacatctggggacacaggaagtgctgccattgagagtgttcaaggggcaaagaacatggacattatcgttctgctgcccaaaggtcactgcacaaagattcaggagctccagatgacaacggtgctgaagcagaacgtacatgtgtttggagtggagggaaacagcgatgagctcgatgagccgatcaagactgtgtttgccgatgtggcttttgtcaagaagcacaatctgatgagcctgaattcgatcaactggtcccgggtcctggtgcagatggcccatcacttctttgcttacttccagtgtacgccatccttggacacacatcccctacccctggtggaggtggttgtgccaacaggggctgccggtaaccttgcagctgggtacattgctcaaaagataggcctgcccatccgtctggtcgtggcagtgaaccgcaatgacatcatccacaggactgtccagcagggagacttctctctctctgaggctgttaaatcaaccttggcatcagctatggacattcaggtgccctacaacatggagagggtgttctggctgctctctggctctgacagccaggtgacaagagccctcatggagcagtttgaaaggacccaaagtgtgaatctgcccaaggaactgcacagcaagctttcagaggcagtgacatccgtgtcagtgtcggatgaagccatcacccagaccatgggccgctgctgggatgagaaccagtacttgctgtgcccccactcagcggtggccgtgaactaccattaccagcagatagacaggcagcagcccaggtacaggcaatgggggcctgggccactgagggaccatttgaatttcaggggccctcttcttctccaagcagtgggagagacaggactacgaaaaaatggctgtaatggagtgtgatgggtgctgtgtggaactgtgccttggaaactgtgggcccagaagagggagcgtgacagatatcccagggacagccatggtcagaggtggtggctgagctggcctccaaccaggaggagcagtttgccaggtagcgtcattgtagcaataagttcaaggtgccaattgtctgtctgtgtctctgtcctccatacccccccatccctaaacttcctctgtttcttattcctcctccaccttctcctttcccatctctctattctctcattggcctccggctgccacctgcccccatccc

SEQ ID NO: 64702 - DNA, 845 bp, Homo sapiens
ctggaaaatacataaaaacatatgtatcaccagtaaatgaatcagtaaagtacaatataacacaaaagaaaaagaaatattgcttgattttttccaataaaagcaagggtaataaaaacatttttagtaagaaaatctatcatttttattttaaaaatctttcaattttaaacatcattaccaacacattaaaagtattatcaataagtgcctttacaatttcaagcaaaagctactgtgttttccttattggaaatactgctttcagtcatcttttttgtctgaggtactctcttcatgcttttcagggctgactttattactggcggtggagggggttgtctggacttcttttggtaatgaaaacacatggcacgtctggaggtctaggtatgttgtaaatatcttagcatattctggatgctttaaggcaaaacttttaaattcctcataggaaattgagtccccttgggctatttccttgaagagaccagaaacatcaaggtcaggcactccaagggaagcctgtagaatggtggagaactcttcctccgttatgtagccatcctcatcaacgtcaaacagcttaaatgccacctggatgatctcctctgtgttggaagggttgcacaagacagccaggccaatcacatactctcggaagtcaatgctgccatcatggttcctgtcaaagagtgcaaaaagttgtctcaagacatctgaaacaggcaactttaaatacttggcgaattcttcaattccaattcttcctccttttgaggaactcgcaatagatgcatattcatccaaatgcttacgaacaccatcccaatctaatttcaatt

SEQ ID NO: 64703 - DNA, 1973 bp, Homo sapiens
gaaaggctaaccggtggtttggggttgctccccctaaatctggaaaaatgaacatgaacatccttcaccaggaagagctcatcgctcagaagaaacgggaaattgaagccaaaatggaacagaaagccaagcagaatcaggtggccagccctcagcccccacatcctggcgaaatcacaaatgcacacaactcttcctgcatttccaacaagtttgccaacgatggtagcttcttgcagcagtttctgaacgctgggaagaggtccctgctcatcagcaggcggacaggcctggggctggccagcctgccgggccctgtgaagagctactcccacgccaagcagctgcccgtggcgcaccgcccgagtgtcttccagtcccctgacgaggacgaggaggaggactatgagcagtggctggagatcaaagtttcacccccagagggagccgagactcggaaagtgatagagaaattggcccgctttgtggcagaaggaggccccgagttagaaaaagtagctatggaggactacaaggataacccagcatttgcatttttgcacgataagaataggggggaattcctctactacaggaagaaggtggctgagataagaaaggaagcacagaagtcgcaggcagcctctcagaaagtttcacccccagaggacgaagaggtcaagaaccttgcagaaaagttggccaggttcatagcggacgggggtcccgaggtggaaaccattgccctccagaacaaccgtgagaaccaggcattcagctttctgtatgagcccaatagccaagggtacaagtactaccgacagaagctggaggagttccggaaagccaaggccagctccacaggcagcttcacagcacctgatcccggcctgaagcgcaagtcccctcctgaggccctgtcagggtccttacccccagccaccacctgccccgcctcgtccacgcctgcgcccactatcatccctgctccagctgcccccgggaagccagcctccgcagccaccgtgaagaggaagcggaagagccggtgggggcctgaagaggataaggtagagctcccacctgctgaactggtgcagagggacgtggatgcctctccctcgcctctgtcagttcaggacctcaaggggctcggctatgagaaggggaagcctgtgggtctagtgggcgtcacagagctttcagacgcccagaagaagcagctgaaggagcagcaggagatgcagcagatgtacgacatgatcatgcagcacaagcgggccatgcaggacatgcagctgctgtgggagaaggcagtccaacagcaccagcacggctatgacagtgatgaggaggtggacagcgagctgggcacctgggagcaccagctgcggcgcatggagatggataagaccagggaatgggccgagcagctgacaaagatgggccggggcaagcacttcatcggagacttcctgcctccagacgagctggaaaagtttatggagaccttcaaggccctgaaggagggccgtgagcctgactactcagagtacaaggagttcaagctgactgtggagaacatcggctaccagatgctgatgaagatgggctggaaggagggcgaggggctgggctcagagggccagggcatcaagaacccagtgaacaagggcaccaccacagtggacggcgctggcttcggcattgaccggccggcggagctctccaaggaggacgacgagtatgaggcgttccgcaagaggatgatgctggcctaccgcttccggcccaaccccctgaacaatcccagacggccttactactgagtgttctggaaatacatactttctgaatgaccaaccgtccctggactgtggaatgttccggcctgcatttctgcccaccccttccgttgtcacgagtgccgtgccgtgtaataaagtcccagtgctcatccaccacaaaaaaaa

SEQ ID NO: 64704 - DNA, 684 bp, Homo sapiens
tttcgtggcggaaaggatggcgctgtgacagccgggccggagccctcgcgtccccaccccgcgccctggccgctgggcccggcgagatggagtccacagcctaccctctcaatttgagcctgaaagaagaggaagaggaagaagagattcagagccgggaactagaggacggcccggcagacatgcagaaagtacgaatctgctctgagggcggatgggtaccggccctatttgatgaggtggccatatatttttccgatgaggaatgggaagttttgacggagcaacaaaaggccctctaccgggaagtcatgaggatgaattatgaaactgtcctgtccctggaattcccattccctaagccagacatgatcacccgtttggaaggggaggaggagtctcagaattctgacgagtggcagctccaaggaggcacctctgcagaaaatgaagaatctgacgtaaagcctccagactggccaaacccaatgaatgctacctcccagtttcctcagcctcagcactttgacagctttggcctccgtctgcctcgggatatcacagagctgcccgagtggagtgaggggtacccttctacatggccatggcttcccagggtatgacctctcggctgatgacatagctgggaagtttcagttcagccgggcatgcgcgcagttacga

SEQ ID NO: 64705 - DNA, 4586 bp, Homo sapiens
cgcgtgtctacgcggacgcaccggctaagctgcttctgccgccgccggccgcctgggaccttgcggtgaggctgcgcggggccgaggccgcctccgagcgccaggtttattcagtcaccatgaagctgctgctgctgcacccggccttccagagctgcctcctgctgaccctgcttggcttatggagaaccacccctgaggctcacgcttcatccccgggtgcaccagctatcagcgctgcctccttcctgcaggatctaatacatcggtatggtgagggtgacagcctcactctgcagcagctgaaggccctgctcaaccacctggatgtgggagtgggccggggtaatgtcacccagcacgtgcaaggacacaggaacctctccacgtgctttagttctggagacctcttcactgcccacaatttcagcgagcagtcgcggattgggagcagcgagctccaggagttctgccccaccatcctccagcagctggattcccgggcctgcacctcggagaaccaggaaaacgaggagaatgagcagacggaggaggggcggccaagcgctgttgaagtgtggggatacggtctcctctgtgtgaccgtcatctccctctgctccctcctgggggccagcgtggtgcccttcatgaagaagaccttttacaagaggctgctgctctacttcatagctctggcgattggaaccctctactccaacgccctcttccagctcatcccggaggcatttggtttcaaccctctggaagattattatgtctccaagtctgcagtggtgtttgggggcttttatcttttctttttcacagagaagatcttgaagattcttcttaagcagaaaaatgagcatcatcatggacacagccattatgcctctgagtcgcttccctccaagaaggaccaggaggagggggtgatggagaagctgcagaagggggacctggaccacatgattcctcagcactgcagcagtgagctggacggcaaggcgcccatggtggacgagaaggtcattgtgggctcgctctctgtgcaggacctgcaggcttcccagagtgcttgctactggctgaaaggtgtccgctactctgatatcggcactctggcctggatgatcactctgagcgacggcctccacaatttcatcgatggcctggccatcggtgcttccttcactgtgtcagttttccaaggcatcagcacctcggtggccatcctctgtgaggagttcccacatgagctaggagactttgtcatcctgctcaacgctgggatgagcatccaacaagctctcttcttcaacttcctttctgcctgctgctgctacctgggtctggcctttggcatcctggccggcagccacttctctgccaactggatttttgcgctagctggaggaatgttcttgtatatttctctggctgatatgttccctgagatgaatgaggtctgtcaagaggatgaaaggaagggcagcatcttgattccatttatcatccagaacctgggcctcctgactggattcaccatcatggtggtcctcaccatgtattcaggacagatccagattgggtagggctctgccaagagcctgtgggactggaagtcgggccctgggctgcccgatcgccagcccgaggacttaccatccacaatgcaccacggaagaggccgttctatgaaaaactgacacagactgtattcctgcattcaaatgtcagccgtttgtaaaatgctgtatcctaggaataagctgccctggtaaccagtctctagctagtgcctcttgccctctcctcacctccttttctctcagtgactctggaacctgaatgcagcttacaagacaagcctgacttttttctctgattaccttggcctcctcttggaaccagtgctgaaaggttttgaatcctttacccaacaatgcaaaaatagagccaatggttataacttggctagaaatatcaagagttgaatccatagtgtggggcccatgactctagctgggcaccttggacctccagctggccaatagaagagacaggagacaggaagccttcccattttttcaaagtctgtttaattgcctattacttctctcaaagagaacctgaagtcagaacacatgagcagggtgagaggtgaggcaaggttcatcctgaatgggagaggaagtcgaaccactgctgtgtgtcttgtcaggatgctcacttgttcctactgagatgctggatattgattttgtaacagcacctggtgtttcacggctgtccgagtgagctaacgtggcggtgtggctgcctggacctcctctttcaggttaacgctgacagaatggaggctcaggctgtctgcaagaaaacagttggtttggctgtgattttgacctcctcttccccactgccatcttctaagagactttgtagctgcctcctagaagcacattctgagcacatttgagacctctgtgttagaggggagactgcacaaactatcctcccccaggttgagacgtctgcagagtggcaagctgacttgtagaaatggggtgccatttatgctctacttagacaagggtaatcagaaatggaatcagtgcaggcaaaatttaggatttgccgcttccataaatcaaagcatgactaatagggggtctctgaaatgtaagggcacaaacttcacttagggcatcgcagatgtttgcagaatggttggcctaatgattatgctacagatgggttttaaatgacccgtctaggttactgcttccttgcaaaaaaagtcgaatcctgcattgaattgaatatgaatttctctaactctctccagaaaatggatggagataacttgtctttaaaactgtaggccagccttagccactgtggagcccttgcctccgagctctggcttcaaggggagctcttctccaggttcactaggtgaattgatttattattatcatattgataatgtgagattctttagccactttggggagcctgtctctccagaagcctttcttagtggtgcccacagttggagcccaggggccatgtttgcaaactgattcatgtgcatggctgacaggagtactggttcactaccaatgcctgagcttttctcttacatagaaaaactgtccgctctcagtaatcacaagcagcatccgttttgttttctcttcttgggagacatctgtcaaaccaggaatattcttgaaaagaacgtgagcaggaaaaactgctggtgatactttttttaagttttgtttttatcttgcctgttggcttcaatacatttgagaatacgctgaagagggaaaatttcagtgatggagattctagattaaatatcaggactgatttcctggtgggaggattatggtccagttttaccaaagaaccaattccttgaatgttggaatctaactttttatattgtcattattattgttgtttttaaacggttctttgtcttttctgttttatttttctcaagctgctttcaggagctagcagaaaataactcaaagttgaagactctggaagattttgctttaacctaactcgcattgatgtattaaatttataattttagcattcccaatagatcctatcattccttaaacataataccctttgtcttggagtagaatactaagttagagttagtggatttctagtttaggagaggagctcaaaactataatctttaacaaattgaaaaatgaaatagggtgttttccctttttgtgcacacctatattaccttaagaaatttccttccatagacagctgcctcaaagggaaatcctctttaaaccgtagttggcgcagaggtcagtcctagtcggagcttaggaggggcggagacgctcacatcgtctgacttgagtcgccactgattgtggcaacagctttgcctcatgagtcaaaaattggcaatttcttttgatttttagttgttgaatttgctgtttcaagcatttgtacatattagaagtctaaggagtagcaagtcagtgggaggactttttcacccctggcattagcagcttcgacctcattttccagatgcaccagctcctattaataagttagcaaggaaagtgtatgtcacgtgcaggaacagtgaggcagggacaggggttctgctccttctcacttcaccaccggcacacagcttgcccctgtctttgcccccaaaggtattttgtgtctagtgtcaaattggagctattcttcactggtccttaaccttgggttttaaaaagaaggcttctctgtttgggtagcgtaagagctgagtatagtaagtcctcttccaaagagatggcaatatgctgggcatctactttaaaacaaagttgtctgatttttgcaagagaggttaggattttattgttcttatttccctttacagttctgcagttccatcacagtatttttttaaataactcaggtgtatgagaagaaattagaaaagaaaattaacttatgtggactgtaaatgttttatttgtaagattctataaataaagctatattctgtaaaaaaaaaa

SEQ ID NO: 64706 - DNA, 827 bp, Homo sapiens
ccggaattcccgggtcgactatttcgtctgctgctggtgctgtcattgcgccggcggctgcgggaagagctggagaaaggggccaaggctactgagaggaccttggtgtaccccctggagctgcccaaggagcccaccagtccccccttccggccctgtcctgaaccagatgagaaactttgggatcctgtcggttactactattcagatggctcccttaagatagtacctgggcatgcccggtgccagcccggtggggggcccccttcgccacctccaggcatcccaggccagcctctgccttctccaactcggcttcacctggggggggggcggaactcaaatgccaatggttacgtgcgcttacaactaggaggggaggaccggggagggctcgggcaccccctgcctgagctcgcggatgaactgagacgcaaactgcagcaacgccagccactgcccgactccaaccccgaggagtcatcagtatgaggggaacccccaccgcgtcggcgggaagcgtgggaggtgtagctcctacttttgcacaggcaccagctacctcagggacatggcacgggcacctgctctgtctgggacagatactgcccagcacccacccggccatgaggacctgctctgctcagcacgggcactgccacttggtgtggctcaccagggcaccagcctcgcagaaggcatcttcctcctctctgtgaatcacagacacgcgggaccccagccgccaaaacttttcaaggcagaagtttcaagatgtgtgtttgtctgtatttgcacatgtgtttgtgtgtgtgtgtatgtgtgtg

SEQ ID NO: 64707 - DNA, 4119 bp, Homo sapiens
tgtggcgacggcggcagctgtggccccggcgccagcgcccggcacggacagcgcctcttcggtgcactggttccgcaaagggctgcgactccacgacaacccggcgttgctggcggccgtgcgcggggcgcgctgcgtgcgctgcgtttacattctcgacccgtggttcgcggcctcctcctcagtcgggatcaaccgatggaggttcctacttcagtctctggaagatttggacacaagtttaaggaaactgaactcccgcctgtttgtagtccggggacagccagccgacgtgttcccaaggctgttcaaggaatggggagtgacccgcttgacctttgaatatgactctgaaccctttgggaaagaacgggatgcagccatcatgaagatggccaaggaggctggtgtggaagtagtgacggagaattctcataccctctatgacctggacaggatcattgagctgaatgggcagaagccaccccttacatacaagcgctttcaggccatcatcagccgcatggagctgcccaagaagccagtgggcttggtgaccagccagcagatggagagctgcagggccgagatccaggagaaccacgacgagacctacggcgtgccctccctggaggagctggggttccccactgaaggacttggtccagctgtctggcagggaggagagacagaagctctggcccgcctggataagcacttggaacggaaggcctgggttgccaactatgagagaccccgaatgaacgccaactccctcctggccagccccacaggcctcagcccctacctgcgctttggttgtctctcctgccgcctcttctactaccgcctgtgggacctgtataaaaaggtgaagcggaacagcacacctcccctctccctatttgggcaactcctatggcgagagttcttctacacggcagctaccaacaaccccaggtttgaccgcatggaggggaaccccatctgcatccagatcccctgggaccgcaatcctgaggccctggccaagtgggctgagggcaagacaggcttcccttggattgatgccatcatgacccaactgaggcaggagggctggatccaccacctggcccggcatgccgtggcctgcttcctgacccgcggggacctctgggtcagctgggagagcggggtccgggtatttgatgagctgctcctggatgcagatttcagcgtgaacgcaggcagctggatgtggctgtcctgcagtgctttcttccagcagttcttccactgctactgccctgtgggctttggccgtcgcacggaccccagtggggactacatcaggcgatacctgcccaaattgaaagcgttcccctctcgatacatctatgagccctggaatgccccagagtcaattcagaaggcagccaagtgcatcattggtgtggactacccacggcccatcgtcaaccatgccgagaccagccggcttaacattgaacgaatgaagcagatttaccagcagctttcgcgctaccggggactctgtctactggcatctgtcccttcctgtgtggaagacctcagtcaccctgtggcagagcccagctcgagccaggctggcagcatgagcagtgcaggcccaagaccactacccagtggcccagcatcccccaaacgcaagctggaagcagccgaggaaccacctggtgaagaactcagcaaacgggcccgggtggcagagttgccaaccccagagctgccgagcaaggatgcctgagactgcagagcccttgctccgtgagcaaagcctgggtgcccaagcagccaccgcagcagcagagtacaacctgcagagaagctgatcaccgggcagagatagagcgagcatgtgtgtgtgtgtgcgcgtgtgcagaggagggagtggtgtgcctgtttgtgtgtgcatgcatctgttgacactcatgattctgaatgttgcctgggctgggggagtacctgtagcacgccagtgctgtttcccggcctccagacacaaggctcgaggttatggcagagactttcagctgagacctgttcctgcaagccagctgccttgtctgaacagaacgtagtggtaggaccctagctgggattctggcatctgcctccctagacctccttccctccctcctcacgtcaggctgtggagcaggagcacagcagttctggctgttgtccaaagcatgggattctggaggcagccagagccctgctgagttcctgctttctgacctggaggctgagcaggccggagtggatggatgctgtccagacgtagccacctggcctctgtttcttattttaaaattctctgctactgggctcagtcccaggcccttccttgggcttctgggactgagcatgaggccatagacagatctaaaaagtttccaccaccctacagaagtacacacagatacctgactggtgtggggtatgcctggtactgtaataggagcctaagacagcacacctaccttttcaggatttagaacctaaaattagaaagagaatcccagctgtcattgttccttccccagaagctaagagccagcctcagagcctacccaggagctgtgaaggggcaagggtcaaactgactcactctaccaggaggagaccaggttgcagtggcgtaaggccccctggtttctctggccacactccaagggcaccacagtgcttgccagtgaaggacagctgacacccagccagggaaaccattctaggctttattctgttgggcttccagggcctgtcctggacttgtcagcatccagactgccatgtcagctatcccagtagctgagctccaaggactcacgcagagggactcaaggatggggactgccaggggcagttggcaaaagtccaagtagagattacacccaacacaccattccttccaggagcagtaggtgggaggtttgacccagagaagccaatccttgcattccaggagtggcctgtgcctcccacctcttccttcccactgccaaaggcctgtgttgagaaagatgtcatgcaaaaggacgacggtggccaactaaagcaagtcttccttccaccctgtggcctgcacttgagccacaaagtgtgtgtgtgtgtgtgtgcgtgtgtggtacgtgtgtgtgtgtgtggctatgaggctgattcctgtttggatttttgtcctcacgtgtatcattaagctggcctttgggccttttcctttctacctcccctgtgacctttcctagcctcagatctgttaattcttttggccccagccctgtccctcactgtcctctgtccttggaccagaaccctggggtcagacccatctcctgtagctgtccatcacactgacaggcttcttcctgagatatcctcaggttttctcagccagagagctgcctttagagtccaactgttgtacgtatgtcaccttcactagaaatgtcccatcatcgtgggaggggagcagggcacaggggatggtgtgcattcagagcattgggttgggggcttccctgttccctcagccccagtcgagaggaaagagaatcgggccactgccagaaagagagtcaagcaaacctggaagggcaaatctgagagtgggaaggccaaaggccgaggcccagatttagtattcactagcagcgccttcgggtagcaggatgattccttttcctgcctgtctgctgctggctctcttccctaaggtacaggttggcaggaccacctccgcctacttctccaccatccctagcatgccagcccgttcccagatcaacctgccagtggagtcaggcagtgcactcctggagccaagagggaagggcagggtagagagggtatgtccagtagcctggagctccatggtggcttcatgcctcccttctcccagctcaggtggccctgagggctccctcggaacagtgcctcaaatcctgacccaagggccagcatggggaagagatggttgcaggcaaaatgcactttatagagattttctattgctgggaaggtgtgtttctcccacaatttgtttgtgaatattcacttgttttataaatgtctgacctgtcttgaaaaaaaaaa

SEQ ID NO: 64708 - DNA, 1038 bp, Homo sapiens
tttcgtgtgcccgggacgaagccatggccctggaggcggcgggagggccgccggaggaaacgctgtcactgtggaaacgggagcaagctcggctgaaggcccacgtcgtagaccgggacaccgaggcgtggcagcgagaccccgccttctcgggtctgcagagggtcgggggcgttgacgtgtccttcgtgaaaggggacagtgtccgcgcttgtgcttccctggtggtgctcagcttccctgagctcgaggtccttcttgtggatggaaacggggtactccaccaccgaggctttggggtggcctgccaccttggcgtccttacagacctgccgtgtgttggggtggccaagaaacttctgcaggtggatgggctggagaacaacgccctgcacaaggagaagatccgactcctgcagactcgaggagactcattccctctgctgggagactctgggactgtcctgggaatggccctgaggagccacgaccgcagcaccaggcccctctacatctccgtgggccacaggatgagcctggaggccgctgtgcgcctgacttgctgctgctgcaggttccggatcccagagcccgtgcgccaggctgacatctgctcccgagagcacatccgcaagtcgctgggactccccgggccacccacaccgaggagcccgaaggcgcaggaggccagtggcatgccccaaaggagactccggagagtcctcaggtggagcacccagtccccaaagacaggctgaccgcaccaccccagggggacgccgcagcacagcccagcaccaggtggggcagaggtgaccacggcccctctttgctccgtcatcggctggtcagctgtggtcacggtgcctcagaggacagatctctatgggggcaagtgccagatcctgagagcgcatgagacgctttcccggagccgacgaaggggactcggagctgcagcctgcacgacccctgcagcctgtgctttgcccacccctttcaatagatggaacttgcttgctcttttcaaaaaaaaaa

SEQ ID NO: 64709 - DNA, 614 bp, Homo sapiens
tttttttttactaaacactcaataactttatttgcctttggctggctccttggtgtggggcagggtagggtttggcaacagcctgggcttcatgcgccctctggtggacctcagaggcacgaactggaatctgggccaaacctgaggacttaacagtcaatagcctaggagggtcgcagcgctcctcaggtctgcaccccagacccaacatcaggggacggggcactctgggaggaagccctgaacctctggctctcatactcgcccgtgttggacaaccgcatgttctgccgagccttcatctgcttcacacggtccttgtccacttcccgcttggtgaggatgaagaggaggataccacaagggaagccgatggcccaggccagtcccacagctttcatggggttcttgcccctctttctgggaatgtattccagctccggggataggggttcaggttcctccttgccctctggggagctgtggctttgcagggcccgggtcctgttatgagaagccttgttagctgtggctcctgcgagaatcccccggaggacgcgggcatttctcgccccccggcccttcagcgccgtagcagctaccaccgccgccat

SEQ ID NO: 64710 - DNA, 1730 bp, Homo sapiens
ggggcactattatcacaccagatgaatacactggaaaaataatgatgctttgcgaggctcgaagagcagttcagaagaatatgatatttattgatcaaaatagagttatgcttaaatatctctttcctttgaatgaaattgtggtagatttttatgactctttgaaatccctatcttctggatatgctagttttgattacgaagatgcaggctaccagactgcagaacttgtaaaaatggatattctactgaatggaaatactgtagaggagctagtaactgttgtacacaaagacaaagctcattcaattggcaaagccatatgtgaacggctgaaggattctcttcctaggcaactgtttgagatagcaattcaagctgctattggaagtaaaatcattgcaagagaaactgtgaaagcctataggaaaaacgttttggcaaaatgttatggtggtgatattacccgaaaaatgaagcttttgaagagacaagcagaagggaaaaaaaagctgaggaaaattggcaacgttgaagttccaaaagatgcttttataaaagttctgaaaacacaatcttctaaataattggtgggaaaacaaagaattttcattgcaatttgtaatatgctgacaacagaaagaaaattataaaatttgcttgttactttcagggtattcaggttcaaataacctactagtctttcgttgaaagggagtagttagtgggtaggcaagagcttagattttgaagccatgttgcctgctctcaaatatctgttccaaccactcactagtaaggtgaccgtggccagattaacctttgtttcctcttcagtaaaatcgagattatactactacctacataagttgttgttgtgaagattaaatgaggtaatacgttaaatattcagaggtgcaagacacatagtaagcactcaattgtaactacagttaagtccttaaatgccatcgaaaggttcttagaaactgactttaagcaaaatgacacgtagcacaatgttcttgaatgatgtcatttccttaagtggtttgtaacatcgatgaggaaaaaaaattggtttatgcgtcatttcattttatttttatttattttttgagacagagtcttgccctgtcgcccatgctggagtgcaatggcacaatctcgactcactgcaacctctgcctcctgggttcaagagattctcctgcctcagcctccattacaggcgtgcaccaccatgctcggctaattttttgtatctttagtagagtcggggtttcaccatgttggccaggctggtcttgaactcctgacctcgtgatccacccaccgtggcctcccaaagtgctgattacaggtgtgagccaccatgcccagccatgtcatttcatttaaagtcacaatttccatgaatctcaacaagtgaggacctgctatattttgttgcatgcagtttttctttacggacactaaaaggccccatacttaagattccatctactttaagtttaaaggattttcagaatcaccttaagtgtcaaatttgttagcaggattaattgatatgaattcacttattaaacagtaaactcaaataacatagacatcaaataacagacatctgctctagttaatgataaaatgtttatagattttatcaggtgagtagtttgaaactaaatggtttacatctaaattaagggcaggagctgtctttcagacat

SEQ ID NO: 64711 - DNA, 699 bp, Homo sapiens
aacacatttaaaaacattttggcagctttttagttgattcattaaacttgctttattcatcaatattaaagtcgggaaagtaaaaaatggtaaatagccatggataaacattcaaaaatagcatttttgatgaccttaaattatttttaaagccttcagtacctaaaattttatatatatactttcatattcccccctctaatactttccttgcattaaccctggagcatacacaacttttgaaaaagtcaaaaaatcgagattgttttcccagggtaaagatagtttgaaggctggaataataaggatttgctgaatgtatcgttgctgctgttgttaagatctcaagtcaatccctccctggttgctgaagccatatcaccctagtggatccatcactcatcactacaccatccgatacacagggtcaccaactctcaggcttccaattttttccactgaataatagatcccaaaaagtggagacaacttgtacaattccctctcagaaggatcacacaggcggtagctcttcagggtgtccagtggctgtttcctgtctatgactccagtgtctgggtccaccgttgtcaaaatacacctggggcatgccattacctttttcacttctacactaccaattaggagttcatcccaggtatcctcctcaaaagcatcacagccggtcaccacaatatt

SEQ ID NO: 64712 - DNA, 1810 bp, Homo sapiens
ggaggcaggaggagcaagaagtggaaacaagagcagtgccgtcccctcctcctccccccatcgtgaagaagccattgaagcaaggtggggccaaagctccaaaagaggctgaggctgagccagccaaggagacagcggccaagggccatggccaagggccagcccaaggcagggggactgtggtgcgcagctcatactccaagcccaagcggccacaacccagcagggaaattggcaacatcatccgcatgtaccagagccgcccgggccccgtgcctgtgcccgtgcagccatccaggcctcccaaagctttcctgaggaaaatcgaccccaaggacgaggctctggccaagctgggtatcaacggtgcccactcgtccccgccgatgctgtcccccagcccaggaaagggccccccgccagctgtggctcctcgacccaaggccccgctacagcttgggccctctagctccatcaaggaaaagcaggggccccttctggacctgtttggccagaagctgcctattgcccacacacccccacctccaccagcgccaccactgcctctgcccgaggacccagggaccctttcagcagagcgtcgttgcttgacacagcccgtggaggaccagggggtctccacccagctactcgcgccctctggcagcgtgtgcttctcctacaccggcacgccctggaagttgttcctacgcaaggaggtgttctacccacgggagaacttcagccatccctactacctgaggctcctctgtgagcagatcctacgggacaccttctccgagtcctgtatccggatttcccagaatgagcggcggaaaatgaaagacctgctgggaggcttggaggtggacctggattctctcaccaccaccgaagacagcgtcaagaagcgcatcgtggtggccgctcgggacaactgggccaattacttctcccgcttctttcctgtctcgggcgagagtggcagcgacgtgcagctgttagccgtgtcccaccgtgggctgcgactgctcaaggtgacccaaggccccggcctccgccccgaccagctgaagattctctgctcatacagctttgcggaggtgctgggtgtggagtgccggggcggctccaccctggagctgtcactgaagagcgagcagctggtgctgcacacagcccgggcaagggccatcgaggcgctggttgagctattcctgaatgagcttaagaaggactccggctatgtcatcgccctgcgcagctacatcactgacaactgcagcctcctcagcttccaccgtggggacctcatcaagctgctgccggtggccaccctggagccaggctggcagtttggctctgccgggggccgttccggactctttcctgccgacatagtgcagccggctgccgctcccgacttttccttctccaaggagcagaggagtggctggcacaagggtcagctgtccaacggggaaccagggctggctcggtgggacagggcctcagaggtgaggaagatgggagagggacaagcagaggcaaggcctgcctgagactgaggaaggaaaggggtttgaccactcccgaggctgccatgcggtgggaccaccctgctgtccgtctcctgtggctgcccctctgcccgctcctgatggctcgccttgtctctccagcaagactgtgcactccttgcaggcaggggctgggctggatgctgctcttgtgtcccacgtggtacttagttcaaggctgccccagcagatgcttaataaacagctcttcactttcctgaaaaaaaaaa

SEQ ID NO: 64713 - DNA, 1247 bp, Homo sapiens
gaaacttttgaagaattaattgactgctctggggggtgtattctaggaggtttggtggatgcacacacacatccagtatgggctggtgaaagagttcacgaatttgcaatgaagttggcaggagccacctacatggaaattcaccaggccggaggagggatccactttaccgtggagcgcacgcgccaagccacagaggaggagctgttccgctccttgcagcaacggctccagtgcatgatgagggctggcaccacgctggtggagtgcaagagtggatatggcctcgacctggagaccgagctcaagatgctgcgcgtgattgagcgcgcccggcgggagctggacatcggcatctcggctacctactgcggggctcattcagtgcctaaaggaaaaactgctactgaagctgctgatgacatcatcaataaccacctcccaaagctgaaggaacttggcagaaatggggaaatacacgtggacaatatagacgtattttgtgagaaaggtgtctttgatctcgattccaccagaaggattcttcaacgtggaaaagatatagggttacagattaacttccatggggatgaactccacccgatgaaggctgctgagcttggggctgaactgggagcgcaggcaatcagccacctggaagaagtgagtgatgaaggcatcgttgccatggcaacggccaggtgctctgccatccttctgcccaccacagcctacatgctgagactgaaacaacctcgagccaggaagatgttagatgaaggagtaatagttgctctgggaagtgatttcaaccccaatgcatattgcttttcaatgccaatggtcatgcatctggcctgtgtaaacatgagaatgtccatgcctgaggccttggccgctgccaccatcaatgcagcttatgcactgggaaagtctcacacacacggatcgttggaagttggcaaacagggagatctcattatcatcaattcatcccgatgggagcatttgatttaccagttcggaggccatcatgaattaattgaatatgttatagctaaaggaaaactcatctataaaacatgatagatttgaaaagagaagactttttgactatatgaaataagtcaatatagttatattaaaagttaaaacaccttaatatttacaagaattatatcacttaaacctaaatgtacttcaatgtctttttaagtcactcaaaaaacccaagggatagatttatt

SEQ ID NO: 64714 - DNA, 1689 bp, Homo sapiens
tcaagcactgaagacgcaaaactgaaacaacaggcaagggcgagtggaacgtgggatggggagcaaaaggctggaaggaggggggctgggcccacacctggaagaacccacatccttgcagcctccggtggctgcaacatcttggcccctgcagatcttttcagaggtccggcacaatgactccacagagggctgactggttccatgatgcttaagaggttaggaagcttgtaggaggcacgcctgacttgccactccctccacccaggcctgactatctgaggaccaattcacacacctggagccccgagtagcagcctgaaggaatgctaaggaggtaggtgagggagtggggggcaggcccttgcccccatttcttgattgtataacacttcattaaaataaaatcacgcagtgccatcttttattagacattttaataccatatcaaaacaccttgactaatgaagaaagcttttctcccaagctttgaacatttttttaaacattttataagtttttttttgtattttaatatataaatacagaaacctatcttgcatgggctgatgccacgtgtgaacatcaatggctaaaatgttctcaaacatagtgcctgaaaacaggggtagctgtacatatttcttagtaagtctttttttgtttaagttttctgaaaaaaaaaatccacgagggcctaagaataatgttcaggcatttttgcaggacacttgtgattgttaaatcctctgaactgaccggaaccaggaggaaagaagggaaaagagatgggatcagtaggaagaaagttctcaatgggttgttttttggcaatgaagtcaagatattagggtctcaaggggagaaaagagcaaaaaaccagccagaaaaatagagggaaaaaaccaaacaaacccaaagtagagaagttggtggtggagagggccagttggggcaggggaagagaccgtgtgctcgcccgccgtcagaaggctggcagcgaggccttagctgtgttcgtctgtcactgagtgggttatggctgggcagcaaacagcaagctgtaaacatcacgagggaaaacaccagtcgacactagactttttttttatataatttttttttgtaaacactttaaagacagacccacaatgcctttcaaagatgaaaaagaaaatgccctttccctcctgggctgaggggtgaggggaaggatagcagttgattcattcttctctcaaacttgctctcatccaatttggtgtcctcagggaggaagggagaaccatgatctggaagtcagtgcagaaggggtgccctgttcccgctggtgtcccaagctcagctctgccccagggtccggtgagcctcctccctggagcaggggcgctctgtccctttgagaggagtcagcaagcaagcccgcaggtcagtccgcagggtgttccggacaagatctgttcacttcaaaccacgagtctatgcagcttttgtgatagatgcacaggcagggcagcctggctatcgtgtccccctgcagcagctcctccaggcagatcacacactcacccgcgtctttagtcagcacatcatcgttgtaggagaggcgaggtttgctcaaacacattataaagtgcatttccatctcgtcaaaagccacagacttggagcaaatggggcacttgaacc

SEQ ID NO: 64715 - DNA, 1460 bp, Homo sapiens
ttttttttttttggccaaacagattggtcattattgtacacatagctggaagggaggggtggtcccggggtaaggacagggctgcccaatatttggggggaggaagggactcttcttccaaatgggcttgtccgggaaccggggtcccggggagctgggcgcctggtccacatggaccccctccacctccccacatacgctgtggaagaagggcaggagtgagaaatgctgggggaggacgaccctttggtctgagatgtggaggtgatcataacagttcccgcccgctggctgttttgttgactttggagaggccttcccggaacccagagtccgtcattacttgctccatctgaacatcctcctcgtcctcctggggcagctgcaggtacgggttgttccctgtgggctggaacttgtagcccgtgagcacgaagaaggccagggtggagccctccaccaagagctggtacagccactgccactgaaagggcacagccacctgcagcaggatggcgatgatgcgggtgaagtagacgtagcagatgaccatgacatagtaatgccggaacagcttcagcttggccaggttcactgccaccttcccgtctgtgccagacgcatcctggagatgccggatggaccagactacggggaacaggatggcaccacagcagatgaggtccaccaggaacaaaatctccttccacagcacgtagtcgctggcgccttcctcgcgggactcgatgatgatgtaggccacgttggccaggacctgcatggggatcacgatcccaaagaccttcttctccttatccgacaggacgtacttgatgaaggcccagcctgagccaatcagggcgatggtgatgaagaggagggcgcccttcagcaggtgtgcgatgtagtacatgacggcaaggccttcgatggggtggccctggctgttgatgaagtagtagttgatgctgtggaagaggagagagatgctcttggtgaaggccaaggccgccatgagccagtggatcttgaagacgctgtacgtgttcctgcagaggatggacacccagaagatgccagcggccaggaagcaggcggacatgaccatgtagagcttgaaaaggggcatctccgctgccgacaggaagccatcggggttcttctcccggatcatcaccgtgatgtcgaatggatgctcctttcctggcactgaattgttgcagttgtggaagttcaggctgtactggccttcttccgcctgagagccgatcaccacgtggaaactgaagttgtaggagttgttgaggtggctcaggcccaacaccaggtccttgtccttcccactaggaccctgaatcactgcgggtgttgacttgggcttgctggctgcagaggtccctccgccatccaccttgcgggggactgtggcctgtggcttcgggaattccaccgcactggac

SEQ ID NO: 64716 - DNA, 2335 bp, Homo sapiens
gatcttttgatttcatacatctagacccttttggaacatcagtgaattatctagattctgcattcagaaatataagaaaccttggcatagtgtcagtgacttctacagatatcagttctttatatgccaaggcacagcatgttgcccggcgtcactacggatgtaacattgtccgaactgaatattacaaggaactagcagccagaattgttgtagctgcagtggcaagagctgcagcccgatgcaacaaaggcatagaagtactgtttgcagtggctctggaacattttgtgttggtagttgtgagagttttgaggggacctacttcagcagatgaaacagccaagaagattcaatacctgatccattgtcagtggtgtgaagagagaatttttcagaaggatggtaatatggtagaagaaaacccatatagacagctgccttgtaactgtcatggaagcatgcctggaaagacagcaatagaacttggacctctgtggtcaagttcccttttcaatactggattcctcaaaagaatgctatttgaatctcttcaccatggtttggatgacattcagaccctaataaagacattaatctttgaatcagagtgtacgcctcaaagtcagttttcaattcatgcatcttcaaatgtcaacaagcaagaagaaaatggtgtatttattaaaactacagatgacaccacaacagataattacattgcacaaggaaagagaaaaagtaatgaaatgatcacaaatttaggcaagaagcaaaagactgatgtcagtactgaacatcctcccttttattacaacattcacagacacagcattaaaggaatgaatatgccaaagttaaaaaagtttttgtgctatttatctcaagcaggctttcgagtaagccgaactcattttgacccaatgggtgtacgcacagatgcacctctgatgcagtttaaatctatccttttaaagtacagcacccccacctacactggaggacagtcagaaagccatgtccagtcagcatctgaagatacagtaactgaaagagttgaaatgtcagtgaatgacaaagcagaagcaagtggctgcagaagatggtaaacgtagagaagaattggttctcaggtgtctgtatagatggcctaatagttctctataccaactgtagttctttttctgttctttcaattcagtagagtaaaaataaaaaacagtgtcattttcattcagaaactgagcagtttctaacttagctggtttgggagctttgctttccaagtttttttttgttttaaggcaaacttaaaattttaatggaaacatttcatatgaagccaagtctcactgagatcaccctactgcttaataattcagaaaattttcacatgcaaagtgtttggaattttatgtatgttatgaaagccatcttttacaattcttaatcacatctctgcctaaactgattcatgatgtttatgttttcctgtttgtagtgtacaaaatgaagctgaaggctcacatgttaaaatgaccctgaatagaataggaagaacaatgttcttacaggtcataatgtatttcacaattaaaaaactaaaatatgtacccatttttaagaaatcatacttctctccacattgatcttttcatttcttactagcttttaagaaattaaatacttgcctgagatagaaatactttatttttgtaactttaaggtctaaatgactaaacttcaaagtaagattttgtcagaataaattgagaccattaatctaatataatacttgttcatgagcactgaaatcctgaagaggagagatttggttataaattaaaaaggttgggtgatcttaagtgcctcagttaatgcacgtacagtattcatttggttggttgtactacctctcagaagtaaaatttgtcaccttatggaatgagagtttttgggtttgggggttgtttttttgttgttgcttggtttggtatttttggttttgtgtgtatttgtataaattttctgtataattagcccaggctgatgtaactataaaaattagttgaaaaaaaaaatattgtttccttaatggaattctcacttcatttgaatataagattttggatgaaaggatttggtataaagtttgggtttttgtctcaaggatttgatccatatttatccctaaatatttcttaagggatgtaactttttataaccattaagtggggggaagggggtggagggggtggtatgtactcatatttattagtcgttaacatctttccttgtctagcattatttctgagtataacgatcatcttaagcc

SEQ ID NO: 64717 - DNA, 872 bp, Homo sapiens
  misc_feature (1)...(872): n = a,t,c or g
gcacctgcggcaggacaaagagcatgacgtctcgctggagatccaggatctgcggctggaggactatgggcgttaccgctgtgaggtcattgacgggctggaggatgaaagcggtctggtggagctggagctgcggggtgtggtctttccttaccagtcccccaacgggcgctaccagttcaacttccacgagggccagcaggtctgtgcagagcaggctgcggtggtggcctcctttgagcagctcttccgggcctgggaggagggcctggactggtgcaacgcgggctggctgcaggatgccacggtgcagtaccccatcatgttgccccggcagccctgcggtggcccgggcctggcacctggcgtgcgaagctacggcccccgccaccgccgcctgcaccgctatgatgtattctgcttcgctactgccctcaaggggcgggtgtactacctggagcaccctgagaagctgacgctgacagaggcaagggaggcctgccaggaagatgatgccacgatcgccaaggtgggacagctctttgccgcctggaagttccatggcctggaccgctgcgacgctggctggctggcagatggtagcgtccgctaccctgtggttcacccgcatcctaactgtgggcccccagagcctggggtccgaagctttggcttccccgacccgcagagccgcttgtacggtgtttactgctaccgccagcactaggacctggggccctcccctgccgcattccctcactggctgtgtatttattgagtggttcgttttcccttgtggggtggagccattttaactgtttttatacttctcaatttaaattttctttaaacattnttttactattttttgg

SEQ ID NO: 64718 - DNA, 2454 bp, Homo sapiens
aaaattttcattaatcaaactccgtaaagaaaactttccaacagccaggatatggaggttgttttacccctttttccccttaaaatttttttttttccctaaagccttaaatttctgtagggaggttgtcccaatatgtcccccccccaaaataaagttcctttccaaaaattcccaagtaggttttaattcggccccctataaggaaaaaaatattaccttgcaagcccgggtaaaatttggcccccccaaggattctttaaaacggcccccccttttttttttttttccatccataaacatatgtctttattctctttctgtacatatgggcaatgataaagcttaaagatgcatgtcctaagaaatatgcaaaaacaatgaatttacataaataatttatacttcagaaaattaaagttgaaaaatattttccacattattagagttcacagtatttaaatcaagctttcccacttatactccagactatattgtcttagcagagagtgataaaatctaatcaggaataaaatgatcaagtttctgtttttattcagtgcacgagtagacgctatttcagtatcaggccgcgccaagtgtcgaggctgcagcctctcatcctgacccttcccctcctgagtggctgtgacccagcagaggtcactggcgtggaatggttacagcgtcaccaaaccactccacggtggacacattcaaccgagcggtaacatctggtggtctgatgcctcatttccaagtaatactttttatagccctgaaaatggaaaccttggcatctaaacaaacagagctgaacatgtgaacactaggacaaggcactgtactatggggtttggtttctttatgggaaaggtgtttgcatagattgctagctatttagtgtgcaggaaaacagagcccccagcgtgcatggctttgtgaggggtgaagctgcatggtgctccctcagccccaagagagcgcagtctctcattctccagccccagccttgtgggctgtcccgctggtgctgtcctttagaacccctacaggagagttttttgctcaaaaagctgcaggtcaaaacggacccagacctccccggtggggacctcatgcagcagcagtcggcgggtcatagggcctttgctttcctgttctgttcgaatttttgccactggaatttcagtacgacccaggaaatcatctggtgaaaactggtctctgtcaaacagggtgagacacagcacgtcttggtagagatccttaataaagaactggcagttaaaattccacttgggattgagtgtgtcctggatggtcctggtggtgtagctctgggagcccatgctgatttcacagtatgggttgctctttccatttggtttgcaggcttttaattctgtagcttcaatgacatgcaccatcaggcgcccaatgcctgaagtcttttgggagcgggcttggtaagctttctcacgcttcttcttctcggtgtcgatgtactgctcagacgccgccttgatcttctgcacccaggcggtcctctcattaatgttgtctgttcggagggtgtagacccgatcaatgtgggaaatgtggaagacaggctcatcgctggaagggtctgtgggcagtttcaccaagacttcattcaggaaaatgggcgttttatacattttgaattgagcattggacttcgagctgaaaagtttctcagagccagaggaaacagcaaactgcttgaccatgtaggtaagaagcaggaagtcattgaagaggaatccgtgcagttccttgttgctcttggtcttgtataatttcccactgtgtaagagcttccggggccccaggcagttggtgagagagttgaaaataagttgctccgcgaggccttcacactgcacgtgcgcctggatccactccagtcggtccgagttttccttctcccgaactccctcattcacttgagagcacagctcctctgcccgctcgagggccagctttagggaggaatggtctgcatggctctccggggtgttctccagaatctggaaaagagtgggcagtgtcacatgggggagctgcgtctctcacctgcccacctggaccttcgcaggaccgctcctccaaccccatgttatggactgcttccatgccctggaaacgcggcggtgaacaagacgacactttccgcccttgagaaactcgtactcccacaagttcttggggacacagggacaggtaacgctgctgtgacaaggtgacagtgctaaacggatcaagtgctctgaactgtgtgggtctctggttgctctccgactggctcccggtaataggcgggagcctcccgactccttccgaaatttaagccatgtaagggtgcgccctcctgtataaactggctgcagctgtggtaagtgtgaacttgctgaatagcaatggttcata

SEQ ID NO: 64719 - DNA, 1751 bp, Homo sapiens
taagaaaacaaactttctccgttctatgactgctctcttggacccagctcagattgaggaacgagacagacgacgacaaaaacaattagagcatcagaaagccatcactgcccaggtagaagagaagcgcaggaagaaacaactggaggaagagcaaagaaagaaggaagaacaagaagaggagcttcgcttagcacaggaacgtgaagagatgcagaaacagtatgaagaagacatacttaagcaaaaacaaaaggaagaaatcatgactctcaagacaaatgagctattccagacaatgcagcgagcacaggaactggcacagagactaaaacaagaacaaagaatccgagaattggcgcaaaagggacatgacacttctagactgattaaaaatcttggtgttgatacaatacaaatggaatataatgcatctaacatttcaaattcaagacatgattctgatgaaatcagtggtaaaatgaatacatatatgaattctacgacttcttctaagaaggatactggtgtgcaaacagatgacttaaatataggaatattcaccaatgcagaatcacattgtggatcattaatggagagggacatcacaaattgttcatctcctgagatttcggcagaacttattggacagtttagcaccaagaaaaacaagcaagaactaactcaggataaaggagccagcttagaaaaagaaaacaatcggtgtaatgaccagtgtaatcagttcacaagaatagagaaacaaacaaaacacatgaagaaatatcctaaaaggcctgattggaatataaataagccacctaaaaggtatattccagcatcagaaaagtaccctaaacagcttcaaaagcagagagaagaaaaaaaagtaaggaggcagatggaattgcttcatttggtagaaaaaaataatcctgggcacctctctcaaaacagaggcatttcaccagaaatttttcattcatctcatcaagaaacggagtcaaagttgaggtggcatctagtcaaaaaggaagaagagcctctgaatattcattcattcagcaaggaaaggtctccatcatcaccagttccagtagtgaaaaacagaacccaacaaactcaaaatacattacatttaccactaaaaaacagtagctatgagagagagaatttgatctcaggaagtaatcaaacagaattatcatctgggatttctgaatcatcccattttattccgtatgttcgaacaaatgagatctattaccttgatcccgatgcaccattgtctgggccttcaacccaggaccctcagtaccaaaattcacaagactgtggccaaaaacgacagctatttgattctgactgtgtcagggatccacttcttaatcctaacatggtgaaaaatagggatcgacagcaagcaatccttaagggactttcagaactgagacagggccttctccagaagcaaaaggagttggaaagtagtctcctgccctttagctgaaaatcaagaagagagttttggttcttcattttaaatgtagaaaatcaaatccttcacatttgatttgtgtcttccaaattataaaatgtgctcactggctcaactgtatttttcaaatagcctagatttacttatttttttaaatgctcattaaaaacttgtatactatgtagtaaaatgctgtacttgttctatacaataaaacagatacttcttttgtaaaagcttagtagtaaaaaaa

SEQ ID NO: 64720 - DNA, 1110 bp, Homo sapiens
ctccaaggagcatctctgtatgacttgctcggcatggaagtagagttgagggaaatgagaacagaagccattgccagacctctggaaataaacgagactgaaaaagtgatgagaattgcaataaaagagattttgacacaggttcagaagactaaagacctgctcaataatgtggcctctgatgaagctaatttagaagccaaaatcgaaaagagaaaattagaactggaaagaaatcggaagcgactagagactctgcagagtgtcaggccatgttttatggatgagtatgagaagactgaggaagaattacaaaagcagtatgacacttatctggagaaatttcaaaatctgacttatctggaacaacagcttgaagaccatcataggatggagcaagaaaggtttgaggaagctaaaaacactctctgcctgatacagaacaagctcaaggaggaagagaagcgcctgctcaagagtggaagtaacgatgactcggacatagacatccaggaggacgatgaatccgacagtgagttggaagaaaggcggctgcccaagccacagacagccatggagatgctcatgcaaggaagacctggcaaacgcattgtgggcacgatgcaaggtggagactccgatgacaatgaggactcggaggagagtgaaattgacatggaagatgatgatgacgaggatgacgatttggaagacgagagcatttctctctcaccaaccaagcccaatcgaagggtctggaaatctgaacccctggatgagagtgacaatgacttctgacccttttgccaagggaccctggcagattaaaaccctcagacttgtaggtaaatgggaacttagaaggttaggaaggtaacccctgttttgtttactaagctggctggactcatgatcactgaagcaatacttatttctgctttagcctcctatgtttgcattccatgaagcttaaataagaattgaagcaaatccctaagatttatttttttccaccttatttatcttctaaaacttgaggaatgcatgtgttcttagtgattcacatccacgggacaaaaactcaagaagaaataagagctgacgccacac

SEQ ID NO: 64721 - DNA, 2862 bp, Homo sapiens
acgtttttagaagacagctaccaagtatatatttcggggttgtagagttcaaataataaatctctagcttcataatgtttctaagcttctctcccttttaaaatttttggtattagggatggattgataactttaatggaccaagtggtctctttattgcggtaagtaaaccttttgatttatttaatattctatacatttttctgttttttgtatatctttaaatatatatacactatggcttatatatcttaaggtgttgtttttaatttcaacaaaggcagggaaaggaattcttcgaacaatacgtgcctccaacaatgcccttgcagatcttgttcctgtagatgtagttgtcaacatgagtcttgcggcagcctggtattccggagttaatagaccaagaaacatcatggtgtataattgtacaacaggcagcactaatcctttccactggggtgaagttgagtaccatgtaatttccactttcaagaggaatcctctcgaacaggccttcacacggcccaatgtaaatctaacctccaatcatcttttatatcattactggattgctgtaagccataaagccccagcattcctgtatgatatctacctcaggatgactggaagaagcccaaggatgatgaaaacaataactcgtcttcacaaagctatggtgtttcttgaatatttcacaagtaattcttgggtttggaatactgagaatgtcaatatgttaatgaatcaactaaaccctgaagataaaaagaccttcaatattgatgtacggcagttacattgggcagaatatatagagaactactgcttgggaactaagaagtacgtattgaatgaagaaatgtctggcctccctgcagccagaaaacatctgaacaagttgcggaatatacgttatggttttaatactatccttgtgatcctcatctggcgcatttttattgcaagatcacaaatggcaagaaatatctggtactttgtggttagtctgtgttacaagtttttgtcatacttccgagcatccagcactatgagatactgaagaccaaggattcagcattagaacatctatacatatggtgatctaaatgtacaaaatgtaaaatgtataagtcatctcactttttgtcaagacattaaaccatcttagatcggagtgtgaagtaaattatggtatattttatgtaacattttaatgtttatgctcataaaacttagtgaacacactgtgttatgccagctcaaatctacagtagccaccaaaaccatgacttaatattttgagccctagaagaaaggggtgtgctgaggacaagagtggggaaataggaacactgaccagtataactgtgcaattctggaacatattaattaaaataatatgccttaacatatagtgaatttctaattctaatgttcagtgcaatggaagacatttatttggacagtaatactagcaaagttggtagatatttgattcttcattttttgtttttttcattagttgaagtgggttttagttttgtttaaaattataaccagcgtattttcacatcattctgtaagttaaatgatatcaaacatgaaagagatgttctcatttttctttttctgattaaacgtctgatgcatatcatttttctataagtaatcagttgcttttaaaatcagaaggctatattattctaatgaccctattcgatctaaatgggtttgagaatccatatcagcaacatacgtgttttttgacagaaagtgaaaacaaattccgtaaaactgttagtatcaaaaagaataggaatacagttttcttttccacattatgatcaaataaaaatcttgtgagattgtttatgttttgaagcaggaggatttcttgagatttgatggaagtgggagttgggaaggattcaccatacttgtgttctcctccctttataaattttattcataggacttttaaaaggcttgtgctatctttccagtgaaaactgaaagtgcattattatggaagaatgtatttgcaggtagtaatagcattaaaaaatatactcgtgtgtaaacacatactaattttgaccttgaaagatgaattccttcaagaaaaataaaataatgcttaagataatgtgtacgaaattaaataaaggactttatttacatactacataaggtagcaaactgttgaatgagtttgaaggtatcacttattttttatgcatgtgattttagctttagaaagaaatgcgttatagaaacaagtaatagcaagaaaattgatgtatattttaatgatacattaaaattcccttttaatcataatagttaactctacttactgttttaacatacatttgatttaacaaattgttcagcataacacttctaattaagtttatcaagttgtactgtattagataatcagcagtgtatctggagtatgtttaaagagaacagttcgcaatacaaaaagttacatggagctttacatcttaactttctttgtcaatttagatgcaatggataaaaaggttattttgctattgtgaaaaactaaatgtaaaggaaatcacctactttcatgcaggtgtataatcttgaaaaggaaaaatgcttccatgttgaagccagattttctgtagtaaaacttttaaatattattttaaaagaaatatgtatataaatatctctatattctttggaatgatactaaagtctctggtctaggaccataccttatataaaggtataagagaccatgacaatgtctgaaaatggaatagataatgatgccttttatttaaagtggcccacataatatacattgagtactccatctcttcg

SEQ ID NO: 64722 - DNA, 2119 bp, Homo sapiens
tcaaacgaagggagcggagcaaggaggagaaggtgcctgaatgggaaccccccgaagcgcctgaaaaggagagacaggaggatgatgtcccagctggagctgctgagtgggggagagatgctgtgcggtggcttctaccctcggctgtcctgctgcctgcggagtgacagcccggggctagggcgcctggagaataagatattttctgttaccaacaacacagaatgtgggaagttactggaggaaatcaaatgtgcactttgctctccacattctcaaagcctgttccactcacctgagagagaagtcttggaaagagacctagtacttcctctgctctgcaaagactattgcaaagaattcttttacacttgccgaggccatattccaggtttccttcaaacaactgcggatgagttttgcttttactatgcaagaaaagatggtgggttgtgctttccagattttccaagaaaacaagtcagaggaccagcatctaactacttggaccagatggaagaatatgacaaagtggaagagatcagcagaaagcacaaacacaactgcttctgtattcaggaggttgtgagtgggctgcggcagcccgttggtgccctgcatagtggggatggctcgcaacgtctcttcattctggaaaaagaaggttatgtgaagatacttacccctgaaggagaaattttcaaggagccttatttggacattcacaaacttgttcaaagtggaataaagggaggagatgaaagaggactgctaagcctcgcattccatcccaattacaagaaaaatggaaagttgtatgtgtcctataccaccaaccaagaacggtgggctatcgggcctcatgaccacattcttagggttgtggaatacacagtatccagaaaaaatccacaccaagttgatttgagaacagccagagtctttcttgaagttgcagaactccacagaaagcatctgggaggacaactgctctttggccctgacggctttttgtacatcattcttggtgatgggatgattacactggatgatatggaagaaatggatgggttaagtgatttcacaggctcagtgctacggctggatgtggacacagacatgtgcaacgtgccttattccataccaaggagcaacccacacttcaacagcaccaaccagccccccgaagtgtttgctcatgggctccacgatccaggcagatgtgctgtggatagacatcccactgatataaacatcaatttaacgatactgtgttcagactccaatggaaaaaacagatcatcagccagaattctacagataataaaggggaaagattatgaaagtgagccatcacttttagaattcaagccattcagtaatggtcctttggttggtggatttgtataccggggctgccagtcagaaagattgtatggaagctacgtgtttggagatcgtaatgggaatttcctaactctccagcaaagtcctgtgacaaagcagtggcaagaaaaaccactctgtctcggcactagtgggtcctgtagaggctacttttccggtcacatcttgggatttggagaagatgaactaggtgaagtttacattttatcaagcagtaaaagtatgacccagactcacaatggaaaactctacaaaattgtagatcccaaaagacctttaatgcctgaggaatgcagagccacggtacaacctgcacagacactgacttcagagtgctccaggctctgtcgaaacggctactgcacccccacgggaaagtgctgctgcagtccaggctgggagggggacttctgcagaactgcaaaatgtgagccagcatgtcgtcatggaggtgtctgtgttagaccgaacaagtgcctctgtaaaaaaggatatcttggtcctcaatgtgaacaagtggacagaaacatccgcagagtgaccagggcaggtattcttgatcagatcattgacatgacatcttacttgctggatctaacaagttacattgtatagtttctgggactgtttgaatattctattccaatgggcatttattttttatcctgtcattaaaaaaaaaagactgttatcctgctacacaaaaaaaaaa

SEQ ID NO: 64723 - DNA, 1550 bp, Homo sapiens
gaattccgcacgagctcccccagggcctcctcccttaggggcaatcatgccacctcctggtgctccaatgggcctagcactgaagaagaaaagcattcctcagcccacaaatgccctgaaatccttcaactggtctaaactgcccgagaacaaactggaaggaacagtatggaccgaaattgatgatacaaaagtcttcaaaattctagatcttgaagacctggaaagaaccttctctgcctatcaaagacagcagaaagaagcagatgccattgatgacactctgagttccaaacttaaagttaaagagctttcggtgattgatggtcggagagctcagaattgcaacatccttctatcgaggttgaaattatccaatgacgaaatcaaacgggcaattctaacaatggacgaacaggaagatctgcccaaggacatgttggaacagctcttgaaatttgttcctgaaaaaagtgacattgacctattggaggaacataaacatgaactggatcggatggccaaggctgataggttcctttttgagatgagccgaattaatcactatcagcaaaggttgcaatcgctgtacttcaaaaagaagtttgcagagcgtgtggcagaagtgaaacctaaagtggaagcaattcgttctggctcagaagaggtgtttaggagtggtgccctcaagcagttgctggaggtggttttggcatttggaaattatatgaataaaggtcaaagagggaatgcatatggattcaagatatctagcctaaacaaaattgctgacacaaaatccagcatcgacaaaaacattacccttttgcactatctcatcactattgtggaaaataagtaccccagtgttctcaatctaaatgaagaattgcgagatattcctcaagctgcgaaagtaaacatgactgagctggacaaagaaataagtaccttgagaagtggcttgaaagcagtagagacagagctggaatatcagaagtctcagcccccacagcccggagataagtttgtgtctgttgtcagccagttcatcacagtagccagcttcagcttctctgatgttgaagaccttctagcagaagctaaagacctgtttactaaagcagtgaagcactttggggaagaggctggcaaaatacaaccagatgagttctttggcatttttgatcaatttcttcaagctgtgtcagaagccaaacaagaaaacgaaaatatgagaaagaaaaaggaggaagaagaacgtcgagctcgcatggaagctcagctcaaagaacaacgtgaaagggaacgtaaaatgagaaaagctaaagagaatagtgaagaaagcggagagtttgatgaccttgtttcagctttacgctcaggagaagtgtttgacaaagacctttctaaattgaaacggaatcgcaaacgtattaccaaccagatgactgacagcagcagagagagaccaatcacaaaacttaatttctaattttccatgaatacttttttttagaaagctcattagcagccctctaaagtgactg

SEQ ID NO: 64724 - DNA, 940 bp, Homo sapiens
gggcgtaagggatcaggaagtgagcggctgcctccctcagggctcctggccaaacctccaaggacagcccagccccccaggccaccagtgcctgagccagccacaccccggggtctccagctttctgccaacatgtaaaacctttgagtacatccagccttagttcttggggtgcagtagtatgtacccaagggcagatgcctcttggggaaggccatggggacctgaaacattgccccatggaaatgtcgaccctgtgcggacattccgcatactgccatgaagacggtctctgtgtcctcagctcaagaatcctgtagcttgtcccatcataatccattcacccgttcatcatgtgtactgagcagctaccatgttcaaggtaatatgccaggcgctgtatgtctccactgccaagtagaagtgactcaaaaccctctgacaaggatattcccttggctatggtcctgccaggtgcaggcccaggcccatgaccccacctttactaagcacaagtacttgccactgccatcactgccaagtaactagatgtctctgtttccctgccaatgatcctgcaggttctgcccggtctggttatcttcctgttcctgtagcatagccaggcactgccaatcacctgtgcccccattgctgtcagcagatgtcttgggtcctgagtgtgggtatccacttttacccgctcactgccacctgtggacactctgtgtctaccctctgagtgggaacatacttctaagatccctgcagtctctgtcctgtggtagaccatctttttgtaaactgggagcttcctcttccctgtaccctctgccccagtcgtgaccccctaaaagttaaggggtagttggcacctccttattaatatgccagcctagatcccccccggtggaggggcaaatggctgaatccttgtgtg

SEQ ID NO: 64725 - DNA, 902 bp, Homo sapiens
  misc_feature (1)...(902): n = a,t,c or g
ggagccctcaccacccccaccgcctggctgctggggctgctggcataaggggcacggggaggccatgccgctgcacaggtatggggtgggtgaggcggccgtaggcgctgaggccggggaggcgaccctcgggggtggcggtgggggcggctccgtggcttcacccacctccagctccggcagctcctcgaggggcactgagaggccgcgctcactcaagaggggctccaagccgtcggcgtcctcggcctcgctggagaagcgcatgaagatggtgtcccagagcttcacccagcgctttcggctgtctcgggacaggaaagtggccaagtcgctggccgtcatcgtgagcatctttgggctctgctgggccccatacacgctgctgatgatcatccgggccgcctgccatggccactgcgtccctgactactggtacgaaacctccttctggctcctgtgggccaactcggctgtcaaccctgtcctctaccctctgtgccaccacagcttccgccgggccttcaccaagctgctctgcccccagaagctcaaaatccagccccacagctccctggagcactgctggaagtgagtggcccaccagagcctccctcagccacgcctctctcagcccaggtctcctggaattctggccctgctgccccctacccggctcgttcccccaggggtgagccccgccgtgtctgtggccctctcttaatgccacggcagccaccctgccatggaggcgccttcctggggttggccagagggcccttcactggctggactggaggctgggtggccggccctgccccccacattctggctccaacgggagggacagtctggaggtcccagacatgctgcccaaccnctgctggtgcccanctttgcat

SEQ ID NO: 64726 - DNA, 2604 bp, Homo sapiens
ttttttttttttactccaaagggtttattgagacaagttttcacatacaagatggggacagaggggttggggcttataaacaggaacctggaaggggaccgagggtgcagggtagaaccaaacaagagagtgaaataaatagagggaaagagtggagacagggaggagactgactgagaccatcacacagtgataatgcgggtggggcggcgccatgaaaatcccgttatttatacagatatacagggagttcagggggacccgaggcccactccaccctccatgccccagggaggggcacaagaaagccgtctctacccatgggcgaccccatggggcgctgggagggctgccctaggagtgttgggcaatccctggcctggaagccttggttagtgtctggaaagcagtggagagggccggaggggaggggcagccaggccggggctcagctctgaggctcccggctgccaccctttctcccagcacagctcctgcccaggtctgggaggatgggggatgggggagcaggagctcaaggggagaacctggcaccttctggagtcttggaaaaactgatccctaaagacacccggccctggctgtgctgccctctggaaagcagctctgataccaggagcggctgtcagggcacagggggaaaccccgaggccatcctcgggggtgattcctgaaaggggcccatccccaggctggatgcttggggaaggcagccgttggggagggattcctggggaaagggccgttagcaccaccaggctccatggcaaacagacagaggccaggcctctgcacctccagcgaggctgggagtcccctcagccccacctgcccggccctacaccccagccagcgtggcggccagggcagggccaggtgggcatcatacgaagaccttggccagggcatcagcgccagcactggcaatgagggccttgctggggtggcaggcaacagcgtggatggcctcctcgtgcttcttgcggtgggccgtgatctcctgcacgcacgttttgttgtccaggctccagagacgcagggagcagtcatggcttcctgacatcaggaatgcgccgttggggtccacggctaggcaggtgactgcgtccaggtgtgcaaccatggagtgcaccggcttacctgtccgattgtccaggaagcggatgcccctgtcgtcgtgggcggtgatggtgagaggctggtttggatgactcaccacttggttgatctgggttggaccgctgctgccccgggactccagcgtgaggagggcactgccaacctccatgtcatacaagacggtgtcgccagagcggaaggaggccacgatgtgggcaggctcggtgctggtgaaggccactgaggtggggaccccgtgctcgctggctgtggggaaggtgcagaggcaggccgggctgctgctgctggggtcccagatgcggacggtgccatcagcagaacaggaggccaggcgctgggaggtgggactgaaggccaggccccacacggcgtccccgtggccctccaggacgtggctcagcacgcttgggtcgtagccatcatagggatccatgctgaggtctggaatcttccaactatggatgcaggcatctgccccgccactgtagcagtattcactgttgctgcccatagccacagccaacactgggcccctgtgagcccggaaagcatgtataggttccacatctagcgccgcattcttcttggccgtgaccgccttctgcaggttccagagcttgagcgtgccgtcctcggaggcggtgagcagagccgactggctgtggtggaaggccagggaacgaatgccgtcgtagtgcgagcgcagggtgaacttggggttccacgtcttcttaaaagcatctttgctgtcagacagatcgcagctgaggtcgttgtcgttggtgacggtgagatctgccaagtcccccaggctcacctccccgcccccgatagtgtccatgatgaagacgtcttcatgtggccggggctggggtgtgccaggaggcgggccagtcacttttgggggcagcccatccacatcccgcaggtcagccagaatgccttggagtttgacccgacggctttccagctcatgggggctcccatccacagtgcaccgccgagggtctggagccccttccccatcctctcctgagcccaggaaatcaaactcattgatagcatcctcagagtcgtcttcctcatcatcgtcttccatttcgggcaccagagccttggatgggagcttcacacgctgcttcttgtgctgcacgctgtccagctcatcgtcctcgtcgctgtcttcgtcctcgcagttctgcaggaaggggatctgccccagcactgagccgcccaagcgctctttgccatctttgcctgccgcgttcctctttatctgctcctcgatctgtttcaccagcagcgactccccaccactgagccctgcagggcctggtggagccctgggggccccttcactcggctccactgccccgttgagctccagcgagcggcccagcagggaacggacgcgcttggaccgcatgtcgaggatggtgtctg

SEQ ID NO: 64727 - DNA, 2804 bp, Homo sapiens
aatgaaattgaaaaacaattgaatgccatcagagataatatcaaaattggagaagatcgtgctgctagacttgacaggaaaatggaagaacagcaggtcagacttaatgaggcagaacaaaagtacaaggatattcaagacaaactagaaaagattagtgaagagacaaatgcacgagcaccagaatgtatggcattgaaagcagatgttgttgctaagaaaagggcctataatgaagctgaggttttatataaccgatccttaaacgaatataaagcattaaagaaagatgatgagcagctttgtaaacgaattgaagagctgaaaaaaagtactgaccaatctttggaacctgaacggttggaaagacaaaaaaaaatatcttggttaaaagagagagtaaaggcctttcaaaatcaagaaaattcagtcaatcaagagatcgaacagtttcagcaagccatagaaaaggacaaagaagaacatggcaaaattaagagagaagaattagatgtgaagcatgcactgagctacaatcaggggcaactgaaagaattgaaagatagtaaaactgatcgactcaaaagatttggccctaatgttccagctcttcttgaagccatagatgatgcttatagacaaggacattttacctataaacctgtaggccctttaggagcttgcattcatcttcgggacccagaacttgctttggctattgaatcttgcttaaaagggcttctgcaggcctattgttgccataatcatgctgatgaaagggtccttcaggcactcatgaaaaggttttatttaccatggacctcacggccaccgataatagtttctgagtgtcggaatgagatatatgatgtaagacacagagctgcttatcatccagactttccaacagttctgacagctttagaaatagataatgcggttgcggcaaatagcctaattgacatgagaggcatagagacagtgctactaatcaaaaataattctgtagctcgtgcagtaatgcagtcccaaaagccacccaaaaattgtagagaagcttttactgctgatggtgatcaagtttttgcaggacgttattattcatctgaaaatacaagacctaagttcctaagcagagatgtggattctgaaataagtgacttggagaatgaggttgaaaataagacggcccagatattaaatcttcagcaacatttatctgcccttgaaaaagatattaaacacaatgaggaacttcttaaaaggtgccaactacattataaagaactaaagatgaaaataagaaaaaatatttctgaaattcgggaacttgagaacatagaagaacaccagtctgtagatattgcaactttggaagatgaagctcaggaaaataaaagcaaaatgaaaatggttgaggaacatatggagcaacaaaaagaaaatatggagcatcttaaaagtctgaaaatagaagcagaaaataagtatgatgcaattaaattcaaaattaatcaactatcggagctagcagacccacttaaggatgaattaaaccttgctgattctgaagtggataaccaaaaacgagggaaacgacattatgaagaaaaacaaaaagaacacttggataccttaaataaaaagaaacgagaactggatatgaaagagaaagaactagaggagaaaatgtcacaagcaagacaaatctgcccagagcgtatagaagtagaaaaatctgcatcaattctggacaaagaaattaatcgattaaggcagaagatacaggcagaacatgctagtcatggagatcgagaggaaataatgaggcagtaccaagaagcaagagagacctatcttgatctggatagtaaagtgaggactttaaaaaagtttattaaattactgggagaaatcatggagcacagattcaagacatatcaacaatttagaaggtgtttgactttacgatgcaaattatactttgacaacttactatctcagcgggcctattgtggaaaaatgaattttgaccacaagaatgaaactctaagtatatcagttcagcctggagaaggaaataaagctgctttcaatgacatgagagccttgtctggaggtgaacgttctttctccacagtgtgttttattctttccctgtggtccatcgcagaatctcctttcagatgcctggatgaatttgatgtctacatggatatggttaataggagaattgccatggacttgatactgaagatggcagattcccagcgttttagacagtttatcttgctcacacctcaaagcatgagttcacttccatccagtaaactgataagaattctccgaatgtctgatcctgaaagaggacaaactacattgcctttcagacctgtgactcaagaagaagatgatgaccaaaggtgatttgtaacttaacatgccttgtcctgatgttgaaggatttgtgaagggaaaaaaaattctggactctttgatataataaaatgagactggaggcattctgaaatgaaagaaactcctttatatatccaaccacaatcaaacatataaataagcctggaaaaccaactacaacctgcaatttaagattactattactttaagaaaatcaatttcatagtattggttttaaatctttttaagtttttttaatacgatctatttttataggttctttttcagaagtaaaattttgtacatatatacatgtacatatctgtttagtttgggttcatttctataacattttgtaagaaaataaaagtttgagcacctgaaaa

SEQ ID NO: 64728 - DNA, 1725 bp, Homo sapiens
  misc_feature (1)...(1725): n = a,t,c or g
gacttcccggttcgagggctgcctggcctgcgccacggcctacttcatcttcctctgcatggagacccactatgagaaggttctcaagaagatttcccgctacatccaggagcagaatgagaagatctttgcacctcgaggcctcctacttacagaccctgtggagcgtgggatgagggttattgagatctccatctacgaggaccggtgcagcagtggcagctccagcagcggcagcagcagcggcagtggcagcagcagcggtgggggtggtggggcgggggcccggtgactggccgagagtccctgtagggaggtgtatggccggagtgagggccttgcagacctgcggcggctgcgctaccagagcacccgcttctgagtcattctttgggctcaccctgctgcccggggtgggagggagggtgacgggcctcatatttcctgtgggccatcaacctatgccccctgtccctcacccccgtctggatcagtccatttcctgacctgggggcttttccttcccgatggggctggtctgggccacacagagacagatcttcctaggaaggctggggtggggagaacacaacctaggcggcccctctcttccacagcccctctcccaaccctgcgaggggggccgaggcctaccacatagaggactcccacactgcatgacccctcatcccaaacccatatccaccaggactctttcccttgggccctgcgtcccgtggctgtctcccagtatctgttccttctcatgcccctgcagggccccggcctgtctatgatcctgcctccaccaaattcaaggtgtggggagacgggtgccgtggttgggagctgttcagcgcactcctgacctcttctagacctatggctttcctgtcctgcattcagagctagaggccagctcggccttgcgagaagcatccaactttgagactttgcaggctgccaggtgctggttggggggcacagagcctggggctctgggaggtaatatgggggtctgggaaactccgtgaagagacatagccatgcggggcctgaatctcctgaactacagccagtttcctgagattagaacctgtgtgtatgcacatgtgaatgtatgtgtgagtgcacatgtgtgtaagtgcagtgtgcgtaaatgtgtgagtctgcgtgtgttagcatgcctgtatgtgagcgcgtgtgtgagcgcatgtgtgtgcaccagtgcacaagtgtatgaatgtggacacatttataagcacacctgtgtgtgtctgagtacatgtgcacacacgtgtgcacaaatgtgcatttatatgagtgtgagtgcatgcatgtgcatgaacatgtgtgcacaagcatgtgtgtatgagtgttcatgtgtatgagtgtgtgtgtatgcaggtgagtgcatgtgtgtgtgagtgtgtttgtgtgttccccttggctgccaggccaacgactgcttctctgcatcctgctgtcttcgctacctgagggtctgtgacttcttccctgtgtgggtccagcctgaccccctgtaagtaaatgtccaaaagccccttgcccctcccctaggggctacccagggaacatactcttactggcattatgtttttagttgggaggaggaaggccnggggtttttaggggaaaggaaggagnccaaacttttggttgggccttttggtggccccctnttcaggttccccatgaacaagg

SEQ ID NO: 64729 - DNA, 2185 bp, Homo sapiens
atgtgtagctcaattctgaaggacattctgcacctggctgagcacgatggaacacaccctgagcaagggctgtacacatgtgcagcagagcatgacctgcaccaaaaggagcagattagagagaagctcaccagaagtgatgagtggaggccttcatttgtgaaccacagtgctcacgtgggagagaggaacttcacatgcacgcagggtggcaaggattttactgccagctcagaccttctccagcaacaggtcttaaacagtgggtggaagctgtacagggatacccaggatggggaagcctttcaaggtgaacagaatgatttcaactccagccaaggtgggaaagacttttgccaccaacatgggctgtttgagcaccaaaaaacccataatggggagaggccttatgagttcagtgaatgtggggaattgtttaggtacaactccaaccttattaaatatcagcaaaatcatgctggagaaaggccttatgagggcactgaatatggaaagacctttattagaaagtccaacctagttcagcaccagaaaattcacagtgaaggctttctttcaaaaaggtctgaccccattgaacatcaggagattctcagtagaccaacaccttatgaatgcacccagtgtgggaaggcctttcttacacaggctcatctggttggtcaccagaaaacccatactggagaacagccctatgaatgcaacaagtgtgggaagttttttatgtataactccaaactcatcagacatcagaaagttcacactggggagaggcgttacgagtgcagtgaatgtgggaaattgtttatggacagcttcacactcggtagacatcagagagttcatactggagaaaggccttttgaatgcagcatatgtggaaaattctttagtcaccgctccacactcaatatgcaccagagagttcatgctggcaaaaggctttataagtgtagcgaatgtgggaaagcctttagcctcaaacataatgttgttcagcatctgaaaattcatactggagaacggccttatgagtgcactgaatgtgagaaggcctttgttagaaagtcccacctagttcagcaccagaaaatccacactgatgcattttcaaaaaggtctgacctcattcaacacaagaggattgacattaggccaaggccttatacatgcagtgaatgtgggaaggccttccttacacaggctcatctggttggtcaccagaaaatccatactggagaacggccttatgaatgcactcaatgtgcgaaggcctttgttagaaagtcccacctagttcagcatgagaaaatccacactgatgcattttcaaaaaggtctgacctcattcaacacaagaggattgacctcaggccaaggccttatgtgtgtagtgaatgtgggaaggccttccttacacaggctcatctagatggtcaccagaaaatccagactggagaacggcgttatgaatgcaatgaatgtgggaaattctttttggacagctacaaacttgttattcatcagagaattcacactggagaaaagccttataaatgcagcaaatgtgggaaattctttagatatcgctgtacactgagtagacatcagaaagttcacactggagaaagaccttatgagtgtagtgaatgtgggaaattttttagagatagctacaaactcattattcatcagagagttcatactggagaaaagccttatgaatgcagcaactgtgggaagtttcttagataccgctctacattcattaaacatcataaagtttgcactggggagaagcctcatgagtgcagtaaatgtagggaattgtttaggactaaatcgagccttattatacatcagcagtctcacactggagaaagtccttttaagttaagggaatgtgggaaagacttcaacaaatgtaatactggtcagcgccaaaaaactcacactggagaaaggtcttatgagtgtggtgaatccagcaaagtgtttaaatacaactccagcctcattaaacatcagataattcatactggaaaaaggccttagtggagtgaatgcaggaaagtcaccaaaactgtcacctcattcagcaccaaaaggttcacatcggaccaagaacctattaatatatgtaaatctaatgttgaaagagttc

SEQ ID NO: 64730 - DNA, 1446 bp, Homo sapiens
ttttttttttttcgtacaaacataaatatatttaaattttttaactgtaagtaaattcaaacaaactgttataaaacagaatacacagttgtctgcatagatcataaaaaacataaaaaccagaatgctgggtaggtgctggtggtgaaaactgcagggctaaaacttgctcaacaatgaactagggaccactatggcttaatgaacatggcccacccctcctactaatggttttgtcaacttttggaccctagaaattcagaattttctccttcttcctctgccagctttggtccgtgtccgactacctggctggacagtaacttgctttttaaagtccactaagcaatctgtggcttctgaaatggaaacaaaagacttgacgggagattcatttaagtcacgacgtgtgaaagaactctgcatctctctgctgcagcctgcctcttccatccctggtgaaggcaccctgaaggctcctgtttctgaagacttgatgtctgcatctgaagtcttgtgctcagactgttccaagaaactaaggagtcggccttcactgtggcctttttcctttgggttcttcagcctctgctgccacttcccctccacagttgaacatgctcttccactcccttcaggtccatctccttggtcagcctttgcaagctggagacaggagtccacatgacactgatactctctaaatgggaccagggatttacagaggtaacacttctcattcttgtcaatgtctagagaagtctgggcagctgtcccactgtcactcttggtcttggcctctttttgtctccgagtcaatactgtatcttcctccatcagaccattgcagtacatggcatgtcgttcaatctttgtgggtggaaagcattggtcacatagcgggcaggatacctggttactggatgagaaggtagaaatagctacttccttctcagcatcttccttgttaccaacctccttatctgccattattattctgactccatccaagatatctctgctacctggagagacttctctttcaaggtcaaaagtttcagaggaacttagctgtgtctcaggacaaacagtgatttcttctgcagaactctctggcataaggactaagcttctcttactggtcaaagcagcaacactttgtgaagcaggtacagagtttccctcttcagaagtttcttcaacaatcccttgggaagactgcaaagaaatacgtagtatcttaaatatacaggcacaggtgaactggcttctcttccttttttaaaaaaatttaattgttcaatgttctccctcaacaattaacaataagaagaaaatattttccataagccagtaagtgtcaataaaacaagcacatcctgtaaagtcagaagactggtatttaaatcagaactaaatcctcgtgccaagcttggcgtgatcagt

SEQ ID NO: 64731 - DNA, 2681 bp, Homo sapiens
ctctgtggaatccggcgtaatgtttctgcacgcctacccgctcattcaggaagccagcctcgccattagggagtcttttctcaccctgaccaagttttcccactggcttcttcattgtatggcattcagattgcagatcatcagttgagacaagccaccaagattgcttcagcacctgaaaaactcgggcgagatccacggccacagacctccaggataagccaggagcaggtccctgaggcctcacagctctcccagctgacttcaaatctggcccaggtgaatcggacaaatatgactccctcagaccccctgcagacctcgctgtctccagaacttgtttccactcctgttcctccccctcctcccggggaggagaccaatctggaagcatcttcctccgatgagcagcctgcgtccctcacaatagcccacgtcaagccaagcatcatgaagaggaatgggagctttccaaagtactatgcctgccacctgtgtggacggcgcttcactctccggagcagcttacgtgaacacctccagatccacacaggagtacctttcacatctagccaacagggagaaagtcgcgtccccctgactctctgtagcaatgcagctgacctcgggaaagatgccatggaagtgcctgaagccgggatgataagtgacagtgagctgcagcacatctctgattctcccatcatcgatgggcagcagcagtcggaaaccccacccccctcagacattgctgacattgacaacctggagcaggccgaccaggagagggaggtgaagaggcggaagtacgagtgcacaatatgtggacgcaaatttatccagaaaagccactggagggaacacatgtacatacacaccgggaagcctttcaagtgcagcacttgtgacaaaagcttttgcagggccaaccaggctgcccgccacgtgtgcctcaaccagagcatcgacacttacaccatggtggacaaacagactctggaactctgcacatttgaagaagggagtcagatggacaacatgctggtgcaaacaaacaaaccctacaaatgcaacttgtgtgacaaaacattctccactcccaatgaggttgttaaacattcatgccaaaaccagaactcggatgtttttgccctagacgaagggcgatccattctcctgggcagtggggactcggaagtaacggagcctgaccacccagtgttagcttccatcaaaaaggaacaagaaaccgtcttactagactgaatgtcacttatctttttaaaaaactctcatttttacaaagactatcttccctcccttccctgaattcagaactgtagttctccatggcatgatacaaacaggtccttgttctcttctcctcttccccttttccacatcccagccccacctctgtaaaggctttgtgcattataaacctggaatgtatcgactttctttcaggggatattggaaagataatggtcattatacttataaactcaaattttgagaggttttagattattcagaagcatacttggaactaatgaagggtatataataaaacaactggaatccaatttggtaagctaaaattatgactttccctgggtaaaaagtcttctcagaaaaacaatgtcagaaaataacagcgtgctgcttagaaatacggctgggctctgtactatgcaaaatctagaaagtgtggggaaactttaaacccaagaaaacgttcttagtattcatcctccaggtgtcttacttcagaatgcatcctttgagattatgtccacttaagagaaatcatcagttaagaaatctactttaacaaaacaaaaaggagaaaaagtaataatgtgatggcaatcttaatttttgggtacaacatgacaagctgtgagtttgtgtgtttgtaagagaaaaatgtgtgggtacttgctaataaacaggtgaattaatgcacatccttatctcattgctggcttctttccaagttgagcaacaacaaaatgctgtatttgagtttctgacaaatttgttttaaaaatcaaatttgaatgtactattctataaattgcctttctgaatagaacatgacatgccattttctagcagctgccagtgataatttgttttacactaacttttaaatcagtgtgtgtactgcagggaaaaggatataggaatactcatcttacaggggaatttgtgaccagaagatgtagtaacttcaatgactgaaagtcaatgctgatagtttactggcaacattaattgaagcatcaaaaataaatggcaaagagaaatcaggacaaaaaatctaattgctgtttgggaaaaaacttgattttgatgtttattctccaggtttttggttgtttttttttctttcttctttcttaatgcctgaaattttctccattggcccgaaagcagtaaaaattgttcattaatcttccgttaggccaataaaagaagggcctcacaagacaaaacaggagccagaagtaaggactgaaggagaaggggagaatagctaatagctatagtatatgtatatgttaaaaactgaatatcccatcatcctatttcatgtatagttgagttctcaaatttgtaagtttttatacatcctttcattgaataaacgtttaattaaatgactaaaaaaaaaa

SEQ ID NO: 64732 - DNA, 1480 bp, Homo sapiens
cagagaagcaagttcgagaacgaggagttttttaggaagctgagccgcgagtgtgagattaagtacacgggcttcagggaccggccccacgaggaacgccaggcacgcttccagaacgcctgccgcgacggccgctcggaaatcgcttttgtggccacaggaaccaatctgtctctccagttttttccggccagctggcagggagaacagcgacaaacacctagccgagagtatgtcgacttagaaagagaagcaggcaaggtatatttgaaggctcccatgattctgaatggagtctgtgttatctggaaaggctggattgatctccaaagactggatggtatgggctgtctggagtttgatgaggagcgagcccagcaggaggatgcattagcacaacaggcctttgaagaggctcggagaaggacacgcgaatttgaagatagagacaggtctcatcgggaggaaatggaggcaagaagacaacaagaccctagtcctggttccaatttaggtggtggtgatgacctcaaacttcgttaattaatagcacagcagatgtgtgctgcccatctttacatacacattgcttctagttggcagaaataattgattaaaagaccagaaactgtgataactggaggtactacggtctatttctcaaccttaggcagtaatagacatcacaaactgccatggttttgcactatgattataatacctgcatttctaattttttaagcatgtagccagtaataatttgaagttttttttctatgcaagcttaccttgttggcattattttagggagttgaaactatcaactgtaaagctccttttcttccactttaatttaaaagttcatgtcatttaaaaacaagtcaagaaattaaaattgtatcagagggttttctctaatcattttttctatttttttttttgtacttctaaatgtttgggttatacagcttcattttagatgaccattcttattttttggtttgtttgccccatttccttttgtgtttttatagtctatagcattttaaaactgctgatgttgtttgcattatttacaggctaaaaacttagtagcatagagctgtctgccacagccttctgacaaagtttacagttattaaagttgcagtatccttttaaatgctagtaatcagcactctttctttttttttttttaaaaaaaaacggggcctccaagggtgccccgggggggcccaaaccccggggaaaaaaggaaccccccgccttaaccccccaaaggaccgggaataacggccttttttttttaaaaaaaaaaggttaaaagggggataaaccccggcccccgccccaaaagggttaaacctcgggtccggaaacaaggagtggggggggaaaaatcccccaaaaagaacctctaccggaaggcccaaaaaaagccccgggcggcttttggtttaatccggggtttttttaaaaa

SEQ ID NO: 64733 - DNA, 956 bp, Homo sapiens
ttttttttttttgagaaacaagcatttgtgtttattaaccaaggagagggaagtcaaagcaatgcagactcctaaccagtccctcctatagtctgcccacctaggccagctgccaaggactaggaagagcagtggataggcccctccccactgccccgaccccagggtgagttctgctgggtaaggaagaggaagtcagcaaaggacagaggccaaggaaagaaggaggaaacagagccgctggggagacaggattgaggagatcccttggcccctcactcacagtggggagggcaaagcaccgcaaatgcagccccacaagaggaactaagcaggagtacactcatgtcaaaaaccttgtattgggggaggggaggagggggttctcaggtgtccaaagccaagaacaaaacccttggagagtcagtccttgcccaagaatgctggtccagcctctaagcctttgcctccataccaagttcacaacagggtggagcctctgacacggccgtctagagaatggatgcaagagaggtccagggaccacttgcctctgtaagatccgtcctgtggcgaattccaggcccagtggcgcctagccttcagctgctgggctctcccgagcctgccttagcccatacaaccacttgatcacgcgggcattgcgctccaccaccgacacgccatagggaacgcgctcccgggcccgctcctcaacagtcaccgagctgcggcgggagcagcccccttcagagctgcccggcccagcactgggccctgccagggacacgatatccgagctggcccgtgccaggtgggccacacccaaccctctcgcctcctccgggtccaggccgcagaagttaaaaaagcgctcgagatcagcggctgccctagaaaagcgctcgctcaagtccgacttggagcgttggaattccaccacactggaatggtga

SEQ ID NO: 64734 - DNA, 777 bp, Homo sapiens
  misc_feature (1)...(777): n = a,t,c or g
gtgtggtgcaattccctatagtgagcgggatgagctgaccgaggatggggaaggcagcatccgcagctctgaggaggggcctggtgacagtgcatctccagtattcacagccccagcagagagtgaagggccaggaccagaggagaagagtcctggacagcagctccccaaagccaccctgcggaaggatgtggggcccatgtactcctacgttgcactctacaagtttctgccccaggagaacaatgatctggctctgcagcctggagatcggatcatgctggtggatgactctaacgaggactggtggaagggcaagatcggcgaccgggttggcttcttcccagctaattttgtgcaacgggtgaggccaggcgagaatgtttggcgctgctgccaacccttctccgggaacaaggaacagggttacatgagcctcaaggagaaccagatctgcgtgggcgtgggcagaagcaaggatgctgacggcttcatccgcgtcagcagtggcaagaagcggggcctggtgccagtcgacgccctgactgagatctgagaggagccaagggaacccagatgacacccttgcccatgcctggaccttgcttctggccagggaggggatcaggcccccttgtccactccatacccttcctccctctgtccctctcctaggtgccacttaccgtggcttaggagccttttgtactggggaagattttatttcttgggtggggtgccctgagtgggttgatcctctgggacttggcggngatg

SEQ ID NO: 64735 - DNA, 1980 bp, Homo sapiens
tttttttttttgagacagagttttgctcttgttgcccaggctggagtgcaatggcgctatctcacctcactgcaacctctgcctcccgggttcaagcaattctcctgcctcggcctcccaagtagctgggattacaggcatgcaccaccatgcccagctaattttgtattcttagtagagacagggtttctccatattggtcaggcttggtctcaaactcccgatctcaggtgatctgcccgcctcagcctcccaaagtgctgggattacaggcaagagccaccgcgcccagcacggtcttttcaaagaccagataatttatttaaccaactgtctaaagatggacattgtgattgatcacactattttatatgtaacattgaatggagtgggtgagtcctaggaaacattctctcctaaaagtttacatttttcattgactagaagtgaccaaaatagattctactgatgagaaaagacttttgaaagcagtatggtcaggttggcaggtgaatggcctcaagagcttaggatttcattgctactaaaagaacaagactattcagttgtgaaacaatgatttagtcaaatactgatgctgtctcagatgagtaactgcaaatcacttcaaaaggtagaagggtagcttaaatgtgaaaaaggttactgccacttcatgtagggaagataacaagcatttgcaaatagcaaaatagaaagaaataaatggtttcagtacaagctcttatattcacttggcatcaaaatagtccaaaataaatctgagaaccacggcaagttatagctgtgttaatgacaaaatgtgatatttactgtttaaatttagcagctgggagaatccccttataaggaagacagaaaatacatttatatccagactgcattactctttggaaaaatatgaccaatcagattttgggtattattgttacaaccttttccttcacctctgcatcatggtgatcaactaaagctcttattttctgggcacattcttctccatgtaacaggaaaaacaatgaaccttcagtgaaagtaggctgcacagctaaatggccttctattttgaggcagttctttatattctgaaatagcgtaagtactcgaagaagaatctcctttgctacgtggctgtcataaagggaaaggaatgatgaatccacttgggcacggagaagtccttctgtcatggctggattttcagacaaattcaaaagcagtttcaaaacttgcaccttcgtgtttccatttccagtaagtaacacctggaacaggtctgtaatgtaactgtgaagcatgtgctggtggtcattggtaacagtcatgtttgtcaacaatgtcagtccagccagctgcacagcagagttcagaggaccagagaagacatcctcacatacttgactgatgtatatctttatcttgatttgattttcaacattcacactcaggttatttagtgcatttaaagctttctctttaatactctggttggaatggttgattttgtttgcaacaattggaataccacccaattcacgaataatagcttggttaactgaaaaggctgcattgttacccaaagtaatcaaagctctttcaataattacaggatcctccgttgactccagcaggtaaaggagtttctgaagttgttcagcatttagaacatcatcatatgaaccatcagttaagtcttctgcggacttcgaagagcgtatcccgagctcgcggtcgccccgccgccgaccccgggtcagcctgtaaatgcagtagcaggcgcccgcgccgagcagcaggcccgccgccacccagcccgcgccccgggggccacccatgctgccgccgcggcagagccgcagcgccgggccagggcaggaggctcgcgggggccagcgcggaggtctccagcgcacgcgggcctagccgccacagcaaacgccacctgacctggctcgtgcc

SEQ ID NO: 64736 - DNA, 620 bp, Homo sapiens
tctcgctgcctcacttgagcaagcatgagcccggagctctccatgaacggccaggctgctggctatgagctctgcggtgtgctgagccggccttcgtcgaagcagaacacgccccagtacctggcctcacccctggaccaggaggtggtgccctgtacccctagccacgtcggccggccgcgcctggagaagctgtctggcctagccgcacccgactacactaggctgtccccggccaagattgtgctgaggcggcacctgagccaggaccacacggtgcccggcaggccggctgccagtgagctgcattcgagagctgagcacaccaaggagaacggccttccctaccagagccccagcgtgcctggcagcatgaagctgagccctcaggacccgcggcccctgtcccctggggccttgcagcttgctggagagaagagcagtgagaagggcctgagagagcgcgcctacggcagcagcggggagctcatcaccagcctgcccatcagcatcccgctcagcaccgtgcagcccaacaagctcccggtcagcattcccctggccagcgtggtgcttgccagccgcgccgagagggcgaggagcacccccagtcccgtgct

SEQ ID NO: 64737 - DNA, 1000 bp, Homo sapiens
attgccaacatgtttctaggaattatcattttgaagaaaagatacagtatattcaaatatacctccattgccctggtgtctgtggggatatttatttgcacttttatgtcagcaaagcaggtgacttcccagtccagcttgagtgagaatgatggattccaggcatttgtgtggtggttactaggtattggggcattgacttttgctcttctgatgtcagcaaggatggggatattccaagagactctctacaaacgatttgggaaacactccaaggaggctttgttttataatcacgcccttccacttccgggtttcgtcttcttggcttctgatatttatgaccatgcagttctattcaataagtctgagttatatgaaattcccgtcatcggagtgaccctgcccatcatgtggttctacctcctcatgaacatcatcactcagtacgtgtgcatccggggtgtgtttatcctcaccacagaatgcgcctccctcaccgtcacgctcgtcgtgaccctacgcaaatttgtgagcctcatcttttccatcttgtacttccagaaccccttcaccctgtggcactggctgggcaccttgtttgtcttcattgggaccttaatgtacacagaggtgtggaacaacctagggaccacaaaaagtgagcctcagaaggacagcaagaagaactgaggcctgtctggagtacgtagaccagtgtcgtcgtgagggtgggaccctgtgaaggtctgaccaccgtttcgcttttgttaatgccgagctacccgcagtgctgagccagccgtgcaaaaggaaatcttcaggaggggacttctcacgttgctcagactgacacatgtagactaaatagaaacccctcagccctaaaatagaaaaaagaacagttctggactattgaacagcccattcatttatttctgttttgtttaccgacatattcagtattattcttgttttctgaattctgagtctcttgaac

SEQ ID NO: 64738 - DNA, 1655 bp, Homo sapiens
ttagcacagtgcggtggaattcgtgccagcgtctgccccttacctccttccttatcctgcccttccagaggatcacccgcctcaagatgttggtggagaacatcctgaagcggacagcacagggctctgaagacgaagacatggccaccaaggccttcaatgcgctcaaggagctggtgcaggagtgcaatgctagtgtacagtccatgaagaggacagaggaactcatccacctgagcaagaagatccactttgagggcaagattttcccgctgatctctcaggcccgctggctggttcggcatggagagttggtagagctggcaccactgcctgcagcaccccctgccaagctgaagctgtccagcaaggcagtctacctccacctcttcaatgactgcttgctgctctctcggcggaaggagctagggaagtttgccgttttcgtccatgccaagatggctgagctgcaggtgcgggacctgagcctgaagctgcagggcatccccggccacgtgttcctcctccagctcctccacgggcagcacatgaagcaccagttcctgctgcgggcccggacggaaagtgagaagcagcgatggatctcagccttgtgcccctccagcccccaggaggacaaggaggtcatcagtgagggggaagattgcccccaggttcagtgtgttaggacatacaaggcactgcacccagatgagctgaccttggagaagactgacatcctgtcagtgaggacctggaccagtgacggctggctggaaggggtccgcctggcagatggtgagaaggggtgggtgccccaggcctatgtggaagagatcagcagcctcagcgcccgcctccgaaacctccgggagaataagcgagtcacaagtgccaccagcaaactgggggaggctcctgtgtgatgggcagccatggcctaggaccccacctccatgcctggctcctggatggtcctggaggggcctgcagtgtctccattccccaagctgctcctgctggcacttcgcttctgtggccttggcattgagggcacaggctggacacaggaatgggggcgcctccagagggtctctccgtcctcatgctcctcagtgtccacacttcaaggccaaggatagtttcttcctctgacatggggaccataacaggtgatcactgatacctggcaaagactggggccctctcctttctatgtcctcaatcctgcctgactcttggtccttctggcagggacctggctggggaacgttctggtgctgatggtgctgggacctatatgtatatttatatatatctggggtcttgtctaccacctcccctggtcagagcctgagtgggtgctggttgctgtgtcttgtctgtaaataaactcctatcatgcctttgcttggagtctgtgatccatctgatgctgcccccacccccacaagtcctattttcccaagctaaagaccaaggagagtctccggctggctcccaactggggctttgcatttctctagagttcatctctgagctgtaagggtgaccagggggcagggggacgattgtgtatcagctaggctgcttttggctgcaagtaacaaaatatcagatacaaataggcttaaacattaaagagatttgattag

SEQ ID NO: 64739 - DNA, 3453 bp, Homo sapiens
agacgtttcccgccggcgggagctgtggctgtgattgagagaggggttagaggcgggtcccagcgctgccgcaccatggcggaccagctttatctggaaaatatagacgagttcgtcacggaccaaaacaagatcgtgacatacaaatggctgagctatacactaggggttcatgttaaccaggccaaacagatgctgtatgattatgttgaaaggaaacgaaaagaaaattcaggagcccaactgcatgttacctacttggtgtctggcagtctcattcagaatggacattcctgccacaaggttgcagtagtgagagaagataaattggaagcagtgaagtccaagctagctgtgactgccagcatccatgtgtacagcatccagaaagccatgctaaaggacagtgggcctctgttcaatactgactatgacatccttaaaagcaacttgcagaactgcagcaaatttagtgctatacaatgtgcagctgccgtccccagagctcctgctgaatcctcttcgtcttccaaaaagtttgagcagtcacatcttcacatgtcaagtgagacacaagccaacaatgagctgaccaccaatggtcatggcccacctgcatccaagcaggtttcccagcagcccaaaggaattatgggaatgtttgcctccaaagctgctgctaaaacccaagaaaccaacaaggaaacgaaaacagaggctaaagaagtaacaaatgcatctgcagcaggcaacaaggcaccagggaaagggaatatgatgagcaacttttttggaaaagctgctatgaataaatttaaagtcaatttggactcagaacaagcagtgaaagaagaaaaaatagtggagcagcctacagtgtctgtcacggaaccaaagctggcaactcctgcaggcctgaaaaaatccagcaaaaaagcagagcctgttaaggtgctgcagaaggaaaaaaaaagggggaagcgagtagcattatctgatgatgagacaaaggaaactgaaaacatgaggaaaaagaggagaagaatcaaacttcctgaatctgatagcagtgaagatgaagtctttccagactctcctggggcttatgaagctgagtcaccatccccacctcctcctccgtctccacctcttgaaccagtgccaaagactgagcctgaacctccttctgtcaagagctcaagtggagaaaacaaaagaaaacgaaaacgcgtactaaaatctaaaacttacctggatggggaaggctgcatagtgactgaaaaagtctacgagagtgaatcctgcacagatagtgaagaggagcttaacatgaagacatcctcagtacacagaccccctgccatgactgtgaaaaaagaacccagagaggaacgaaagggccccaagaaagggactgctgctctgggcaaagccaacagacaggtgtccattactggcttcttccagaggaaataaactgccatctctggtagatcagagacttggagtggtcaagggagaagaccaagaaatgtactcctcacttactatgtaagttcatctagatctccacctcacctgtatcaaaagactgttctttcatcctgtgaggtttatactatttctggtttttaaccaaaaggaaatcatctggaagcaggaggcaaaaagctgttaccttctaatgacatttaaaaagcacagtctttgacctgtccaggagaaggatttactccaaaattatactggaacagttttcagaattctcactgaagccatttagtggctaacccactgtgctccactcaccctatgccctggtccgcatatggcacaggaattattccttcttgttcctctgtattctaagaattcatgtgggtgtttcttatccttacattctgctggatacgtttacccctcttgtcttcctgcagtaccacacttctgtcccctaacctcctgaggctgttctctgtaagtcttttaagttttggttggactaaaggctgaagtgaaaatctccctgtaatcctcttcctccattatgcagtacacggacacctggctacagaccaggacgtggcttgtgttctgttcctttcacaaaagctctctgggaccttcacttgcaattagtggttagggaaaagcctcaggcagaacacaaatagaaatttaatgatgtgttcaactccaccagaaattacctcgagtcagcattgacgatattggaggagctgccgtgctgctgatacggggtgtgctttatgctgctctttgcggtttgttgatcccctcctcccccactctcaatacctagagagtgaaacccgtacaatgagataaagactaaaaagagaaatcccttcctatatacagtgtgctacatttacaaaaaatttctccttaagaaaacagaatattcaaaaacagcacttttccaggaagttagtgaggaagataaggcacacatttatttataaatggatgttgctcctttgtatttttagcttccctatttgcttaaaagtacaggctccctaagagaggatggagagggagagactgaattgttagtaggtctaaacatcaaagaaaacatttttattagttacttatggaaaatcatctattacaatgataaccttcaagtgacttccattatggctggacaggcggtgagctcagtggattgcagtggtgtgctggtgattttgcacagtgagctctgcggaaggggtcaggctcaactgctgatgtgtctcacacgtagcagacaaggggtgtctgactggcttcttttgcctcaagatggtgtatgtcgtaagtgatgcaatcagctgtctgctttttaaggttgggattgtgctgactttgggattaacatgagcttctttagcaaccaagcatgaacttgattaagaccagaagtttgggagatgagtcctggcattatgtctaggactaaagcagtggctttgtatagcaagctgagtaaaggttgacatattccaaaacccttctttttaaaatgaaaaaggatggagagaaggatggaaagcctggacttaaacctttagaaaaaacttctggagagaaatcccttttaaacagttacttttgtcattgcctctggtcatttgtctaaataggaatggaaaattaaaagaaaagcaacaatccaatcttttttctaaaaattatgctggggtctcgactaaaactgaatttgaattggaaaattctggtgttggttggagttccatcttgcaagggataatacaaatcctatgatctctatgcccaatatgctgcctcaactctgagctgtctgcaaggcttagtaagtattgagtggtgttttttttttctttttatacaataccatgttaaccacatgagttaaataaatttgagaagttgttttaaaacagtgcttcaaaaaaaaaa

SEQ ID NO: 64740 - DNA, 2102 bp, Homo sapiens
acccgggtcgacgatttcgtctcgccccaccccactggtgactgccgggccccttgtgacccccactccagcagggaccctcgaccccgctgagaaacaagaaacaggctgtcctcctttgggtctggagtccctgcgagtttcagatagccggcttgaggcatccagcagccagtcctttggtcttggaccacaccgaggacggctcaacattcagtcaggcctggaggacggcgatctatatgatggagcctggtgtgctgaggagcaggacgccgatccatggtttcaggtggacgctgggcaccccacccgcttctcgggtgttatcacacagggcaggaactctgtctggaggtatgactgggtcacatcatacaaggtccagttcagcaatgacagtcggacctggtggggaagtaggaaccacagcagtgggatggacgcagtatttcctgccaattcagacccagaaactccagtgctgaacctcctgccggagccccaggtggcccgcttcattcgcctgctgccccagacctggctccagggaggcgcgccttgcctccgggcagagatcctggcctgcccagtctcagaccccaatgacctattccttgaggcccctgcgtcgggatcctctgaccctctagactttcagcatcacaattacaaggccatgaggaagctgatgaagcaggtacaagagcaatgccccaacatcacccgcatctacagcattgggaagagctaccagggcctgaagctgtatgtgatggaaatgtcggacaagcctggggagcatgagctgggggagcctgaggtgcgctacgtggctggcatgcatgggaacgaggccctggggcgggagttgcttctgctcctgatgcagttcctgtgccatgagttcctgcgagggaacccacgggtgacccggctgctctctgagatgcgcattcacctgctgccctccatgaaccctgatggctatgagatcgcctaccaccggggttcagagctggtgggctgggccgagggccgctggaacaaccagagcatcgatcttaaccataattttgctgacctcaacacaccactgtgggaagcacaggacgatgggaaggtgccccacatcgtccccaaccatcacctgccattgcccacttactacaccctgcccaatgccaccgtggctcctgaaacgcgggcagtaatcaagtggatgaagcggatcccctttgtgctaagtgccaacctccacgggggtgagctcgtggtgtcctacccattcgacatgactcgcaccccgtgggctgcccgcgagctcacgcccacaccagatgatgctgtgtttcgctggctcagcactgtctatgctggcagtaatctggccatgcaggacaccagccgccgaccctgccacagccaggacttctccgtgcacggcaacatcatcaacggggctgactggcacacggtccccgggagcatgaatgacttcagctacctacacaccaactgctttgaggtcactgtggagctgtcctgtgacaagttccctcacgagaatgaattgccccaggagtgggagaacaacaaagacgccctcctcacctacctggagcaggtgcgcatgggcattgcaggagtggtgagggacaaggacacggagcttgggattgctgacgctgtcattgccgtggatgggattaaccatgacgtgaccacggcgtggggcggggattattggcgtctgctgaccccaggggactacatggtgactgccagtgccgagggctaccattcagtgacacggaactgtcgggtcacctttgaagagggccccttcccctgcaatttcgtgctcaccaagactcccaaacagaggctgcgcgagctgctggcagctggggccaaggtgcccccggaccttcgcaggcgcctggagcggctaaggggacagaaggattgatacctgcggtttaagagccctagggcaggctggacctgtcaagacgggaaggggaagagtagagagggagggacaaagtgaggaaaaggtgctcattaaagctaccgggcaccttagcttaaaaaaaaaa

SEQ ID NO: 64741 - DNA, 2168 bp, Homo sapiens
gaattctccaccacaacaaacagcccactcccatggcctacctggacaagctggacctgacagacaaccatctgaccacactgcccctggctggacttgggggcttgatgcatctgaagctcaaagggaaccttgctctctcccaggccttctccaaggacagtttcccaaaactgaggatcctggaggtgccttatgcctaccagtgctgtccctatgggatgtgtgccagcttcttcaaggcctctgggcagtgggaggctgaagaccttcaccttgatgatgaggagtcttcaaaaaggcccctgggcctccttgccagacaagcagagaaccactatgaccaggacctggatgagctccagctggagatggaggactcaaagccacaccccagtgtccagtgtagccctactccaggccccttcaagccctgtgagtacctctttgaaagctggggcatccgcctggccgtgtgggccatcgtgttgctctccgtgctctgcaatggactggtgctgctgaccgtgttcgctggcgggcctgcccccctgcccccggtcaagtttgtggtaggtgcgattgcaggcgccaacaccttgactggcatttcctgtggccttctagcctcagtcgatgccctgacctttggtcagttctctgagtacggagcccgctgggagacggggctaggctgccgggccactggcttcctggcagtacttgggtcggaggcatcggtgctgctgctcactctggccgcagtgcagtgcagcgtctccgtctcctgtgtccgggcctatgggaagtccccctccctgggcagcgttcgagcaggggtcctaggctgcctggcactggcagggctggccgccgcactgcccctggcctcagtgggagaatacggggcctccccactctgcctgccctacgcgccacctgagggtcagccagcagccctgggcttcaccgtggccctggtgatgatgaactccttctgtttcctggtcgtggccggtgcctacatcaaactgtactgtgacctgccgcggggcgactttgaggccgtgtgggactgcgccatggtgaggcacgtggcctggctcatcttcgcagacgggctcctctactgtcccgtggccttcctcagcttcgcctccatgctgggcctcttccctgtcacgcccgaggccgtcaagtctgtcctgctggtggtgctgcccctgcctgcctgcctcaacccactgctgtacctgctcttcaacccccacttccgggatgaccttcggcggcttcggccccgcgcaggggactcagggcccctagcctatgctgcggccggggagctggagaagagctcctgtgattctacccaggccctggtagccttctctgatgtggatctcattctggaagcttctgaagctgggcggccccctgggctggagacctatggcttcccctcagtgaccctcatctcctgtcagcagccaggggcccccaggctggagggcagccattgtgtagagccagaggggaaccactttgggaacccccaaccctccatggatggagaactgctgctgagggcagagggatctacgccagcaggtggaggcttgtcagggggtggcggctttcagccctctggcttggcctttgcttcacacgtgtaaatatccctccccattcttctcttcccctctcttccctttcctctctccccctcggtgaatgatggctgcttctaaaacaaatacaaccaaaactcagcagtgtgatctatagcaggatggcccagtccctggctccactgatcacctctctcctgtgaccatcaccaacgggtgcctcttggcctggctttcccttggccttcctcagcttcaccttgatactgggcctcttccttgtcatgtctgaagctgtggaccagagacctggacttttgtctgcttaagggaaatgagggaagtaaagacagtgaaggggtggagggttgatcagggcacagtggacagggagacctcacagagaaaggcctggaaggtgatttcccgtgtgactcatggataggatacaaaatgtgttccatgtaccattaatcttgacatatgccatgcataaagacttcctattaaaataagctttggaagagaaaaaaaaaa

SEQ ID NO: 64742 - DNA, 1116 bp, Homo sapiens
aatacatgtcccctagcctttgaccactgtcagccacctgtgtcccttgagccttcgggtcttcacttcccacttggacatcactgctggacattcccatcgagatgacacctgggttccaatcccagctctgcctttgaagcacttgcggccaccgtcaagtccctttgctctcggaccctgggtttctcatcctttaatgaggtgggttcagaagctctcccatcttcacagcaaccctggcactggcttctcaatgggagggaagcagcagagaaactgaagtgttagacactatgtgtcccaccaccccattacagagacatatgacaatgttcagcaggtcatctttaatgcagaggaggagatgggatgtcactcgctgtctggaggcacgtgggtggtgtgcgggccctcactggccagcctctgggtggccccgcctatcccagtatgaacgtagccaactcaagccctctactgtgtctcagcccacgaagcctttgtagccttcatcttccagcagttgaaacagataggggaaattcagctctccggggctgctgggctcccctcgacctgggacctgtgccacctgcacatgcccaacaatgggcaggaactcccggatgtttcctgtcaggttcccatccatgatctgccagtggaatatgtccatttgtaattggaggttgggtcttcctaccttctgtaagatggctgccgcctgctggggcgtgtccaggaagtactgggggtcagtgatgcgggtgttgatgggctccagcagtcccacgaggtcctcctgagccaaaaccccagctgcatgcctcaggttctccagaaaaacggcctccatctcagccttgactgctattcgatcagctccctggggtactcggccagccatcaggtggatcatgtccagcctcaggaacgctgccaaatacaccaggcctcctcttgccacagcacccttgcaaggaacactcaacttcctgcccatcaagcaatgcccactccgcacggcctgctccagtccctctcggaaggccgcctgtctcccggggacggcccccagccccatttcccccttctcttggtctcccgggggcg

SEQ ID NO: 64743 - DNA, 4880 bp, Homo sapiens
atgttccgcttccctatggggctcctgcttggctctgtgctcctggtggcttcggccccagccactctggagcctcccggctgcagcaacaaggagcaacaggtcactgtcagccacacctacaagatcgatgtgcccaagtctgccttggttcaggttgacgctgaccctcagcccctcagtgacgatggggcttcgctcttggccctgggggaggccagggaggaacagaacatcatcttcaggcacaacatccgccttcagacgccacagaaggactgcgagttggcaggcagtgtccaggacctcctggcccgggtgaagaagctggaggaagagatggtggagatgaaggaacagtgtagtgcccagcgctgctgccagggagtcactgatctaagccgccactgcagcggccacgggaccttctccctggagacctgcagctgccactgcgaagagggcagggagggccccgcctgcgagcggctggcctgccccggggcgtgcagcggccacgggcgttgcgtggacgggcgctgcctgtgccatgagccctacgtgggtgccgactgcggctacccggcctgccctgagaactgcagcggacacggcgagtgcgtgcgcggcgtgtgccagtgccacgaagacttcatgtcggaggactgcagcgagaagcgctgtcccggcgactgcagcggccacggcttctgtgacacgggcgagtgctactgcgaggagggcttcacaggcctggactgtgcccaggtggtcaccccacagggcctgcagctgctcaagaacacggaggattctctgctggtgagctgggagccctccagccaggtggatcactacctcctcagctactaccccctggggaaggagctctctgggaagcagatccaagtgcccaaggagcagcacagctatgagattcttggtttgctgcctggaaccaagtacatagtcaccctgcgtaacgtcaagaatgaagtttctagcagcccacagcatctacttgccaccacagaccttgctgtgcttggcactgcctgggtgacagatgagactgagaactcccttgacgtggagtgggaaaacccctcaactgaggtggactactacaagctgcgatatggccccatgacaggacaggaggtagctgaggtcactgtgcccaagagcagtgaccccaagagccgatatgacatcactggtctgcacccggggactgagtataagatcacggtggtgcccatgagaggagagctggagggcaagccgatcctcctgaatggcaggacagaaattgacagtccaaccaatgttgtcactgatcgagtgactgaagacacagcaactgtctcctgggacccagtgcaggctgtcatagacaagtatgtagtgcgctacacttctgctgatggggacaccaaggaaatggcagtgcacaaggatgagagcagcactgtcctgacgggcctgaagccaggagaggcatacaaggtctacgtgtgggctgaaaggggcaaccaggggagcaagaaagctgacaccaatgccctcacagaaattgacagcccagcaaacctggtgactgaccgggtgactgagaataccgccaccatctcctgggacccggtacaggccaccattgacaagtacgtggtgcgctacacctctgctgacgaccaagagaccagagaggttctggtggggaaggagcagagcagcactgtcctgacaggcctgaggccaggtgtggagtacacagtgcatgtctgggcccagaagggggaccgagagagcaagaaggctgacaccaacgccccgacagatattgacagccccaaaaacctggtgactgaccgggtgacagagaatatggccacggtctcctgggacccggtgcaggccgccattgacaagtacgtggtgcgctacacctctgctggtggagagaccagggaggttccggtggggaaggagcagagcagcacagtcctgacaggcctgagaccgggtatggagtacatggtgcacgtgtgggcccagaagggggaccaggagagcaagaaggccgacaccaaggcccagacagacattgacagcccccaaaacctggtgaccgaccgggtgacagagaatatggccactgtctcctgggacccggtgcgggccaccattgacaggtatgtggtgcgctacacctctgccaaggacggagagaccagggaggttccggtggggaaggagcagagtagcactgtcctgacgggcctgaggccgggtgtggagtacacggtgcacgtgtgggcccagaagggggcccaggagagcaagaaggctgacaccaaggcccagacagacattgacagcccccaaaacctggtcactgactgggtgacagagaatacagccactgtctcctgggacccggtgcaggccaccattgacaggtatgtggtgcactacacgtctgccaacggagagaccagggaggttccagtggggaaggagcagagcagcactgtcctgacgggcctgaggccgggcatggagtacacggtgcacgtgtgggcccagaaggggaaccaggagagcaagaaggctgacaccaaggcccagacagaaattgacggccccaaaaacctagtgactgactgggtgacggagaatatggccactgtctcctgggacccggttcaggccaccattgacaagtacatggtgcgctacacctctgctgacggagagaccagggaggttccggtggggaaggagcacagcagcactgtcctgacgggcctgagaccaggcatggagtacatggtgcacgtgtgggcccagaagggggcccaggagagcaagaaggctgacaccaaggcccagacagaactcgaccctcccagaaaccttcgtccatctgctgtaacgcagtctggtggcatattgacctggacgcccccctctgctcagatccacggctacattctgacttaccagttcccagatggcacagttaaggagatgcagctgggacgggaagaccagaggtttgcgttgcaaggccttgagcaaggcgccacctaccctgtctcccttgttgcctttaagggtggtcgccggagcagaaatgtatccaccaccctctccacagttggtgcccgtttcccacacccttcggactgcagtcaggttcagcagaacagcaatgccgccagtggtctgtacaccatctacctgcatggcgatgccagccggcccctgcaggtgtactgtgacatggaaacggacggaggtggctggattgtcttccagaggcggaacactgggcagctggatttcttcaagcgatggaggagctatgtggaaggctttggggaccccatgaaggagttctggcttggacttgacaagctacacaacctcaccaccggcactccagcgcggtatgaggtgagagtggatttacagactgccaatgaatctgcctatgctatatatgatttcttccaagtggcctccagcaaggagcggtataagctgacagttgggaaatacagaggcacggcaggggatgctcttacttaccacaatggatggaagtttacaacttttgacagagacaacgatatcgcactcagcaactgtgccctgacacatcatggtggctggtggtataagaactgccacttggccaaccctaatggcagatatggggagaccaagcacagtgagggggtgaactgggagccttggaaaggacatgaattctccattccttacgtggagttgaaaatccgccctcatggctacagcagggagcctgtcctgggcagaaagaagcggacgctgagaggaaggctgcgaacgttctgatggcccgtgtgagcagtcctcgcaggagacaccaccagctgtggcagcttggggcggggtgggtagtggtcactgcggtctgggagtgctcagatagcccgcagaacaaatcatgtcaccaagcttcaagccatggaggttccttccctctcacctgcatttttgcccgtctttatgagggtcttgaaaatcaaaatagtagttgcacagtatgtgtaggaaagacagtactggaacggcaaggtttctcagcttatcttcagcaacatatatactggattagggcaagagaaggaatcacccagcacttcaccagttggaaatctctggaaatttacatctatgtatttaaagttctgctaatgcaaatcttttctctggaaagaagcacagaggaggagttttgatgacccaggggttagggctgagacaaccggacgtttgtcacctcctttcccattgggtttttaggaaaacagtgtgaacctcccccttttaatttctggtgttatgaggaagaataaaggggataaaaggggctaagatggactcatgtttagctaagttctgacttgtatccagcatgctggagaccaaagctgccgccttactgctatttttaagtgccctcttttcagtcatttgcataattgcgtccatagagctgcatatgttgtgaataaattctcactcatttcaactttgaataatttgactgtcttgataattggttcctcccaaagactcttctgcaactcccattcatgcccaccaggcctcagactccctcttttccccgccctgcactattggagccctgggttttgtgggagtgctcagcaccgtgagtcttactgtttgatcggacagttagcaagatcagatcctttttgcttattttctatcactttggagggttttctgtagcaaaatcagtgaccaatgaagtaacttaaattcctattgaagaacaaaaataataaaccacttgattt

SEQ ID NO: 64744 - DNA, 2235 bp, Homo sapiens
ggtggcacgaggcgccttccaccctaagatgggtcccagcttccccagcccgaagcctggcagcgagcggctgtccttcgtctctgccaagcagagcactgggcaagacacagaggcagagctccaggacgccacgctggccctccacgggctcacggtggaggacgagggcaactacacttgcgagtttgccaccttccccaaggggtccgtccgagggatgacctggctcagagtcatagccaagcccaagaaccaagctgaggcccagaaggtcacgttcagccaggaccctacgacagtggccctctgcatctccaaagagggccgcccacctgcccggatctcctggctctcatccctggactgggaagccaaagagactcaggtgtcagggaccctggccggaactgtcactgtcaccagccgcttcaccttggtgccctcgggccgagcagatggtgtcacggtcacctgcaaagtggagcatgagagcttcgaggaaccagccctgatacctgtgaccctctctgtacgctaccctcctgaagtgtccatctccggctatgatgacaactggtacctcggccgtactgatgccaccctgagctgtgacgtccgcagcaacccagagcccacgggctatgactggagcacgacctcaggcaccttcccgacctccgcagtggcccagggctcccagctggtcatccacgcagtggacagtctgttcaataccaccttcgtctgcacagtcaccaatgccgtgggcatgggccgcgctgagcaggtcatctttgtccgagaaacccccaacacagcaggcgcaggggccacaggcggcatcatcgggggcatcatcgccgccatcattgctactgctgatgctgccacgggcatccttatctgccggcagcagcggaaggagcagacgctgcagggggcagaggaggacgaagacctggagggacctccctcctacaagccaccgaccccaaaagcgaagctggaggcacaggagatgccctcccagctcttcactctgggggcctcggagcacagcccactcaagaccccctactttgatgctggcgcctcatgcactgagcaggaaatgcctcgataccatgagctgcccaccttggaagaacggtcaggacccttgcaccctggagccacaagcctggggtcccccatcccggtgcctccagggccacctgctgtggaagacgtttccctggatctagaggatgaggagggggaggaggaggaagagtatctggacaagatcaaccccatctatgatgctctgtcctatagcagcccctctgattcctaccagggcaaaggctttgtcatgtcccgggccatgtatgtgtgagctgccatgcgcctggcgtctcacatctcacctgttgatcccttagctttcttgccaaggatctagtgccccctgacctctggccaggccactgtcagttaacacatatgcattccatttgtgatgtctaccttggtggctccactatgacccctaacccatgagcccagagaaattcaccgtgataatggaatcctggcaaccttatctcatgaggcaggaggtggggaaggtgcttctgcacaacctctgatcccaaggactcctctcccagactgtgaccttagaccatacctctcaccccccaatgcctcgactcccccaaaatcacaaagaagaccctagacctataatttgtcttcaggtagtaaattcccaataggtctgctggagtgggcgctgagggctccctgctgctcagacctgagccctccaggcagcagggtcccacttaccccctccccaccctgttccccaaaggtgggaaagaggggattccccagcccaaggcagggttttcccagcaccctcctgtaagcagaagtctcagggtccagacccttccctgagcccccacccccaccccaattcctgcctaccaagcaagcagccccagcctagggtcagacagggtgagcctcatacagactgtgccttgatggccccagccttgggagaagaatttactgttaacctggaagactactgaatcattttacccttgcccagtggaataggacctaaacatcccccttccggggaaagtgggtcatctgaattgggggtagcaattgatactgttttgtaaactacatttcctacaaaatatgaatttatactttgaaactcgtgcc

SEQ ID NO: 64745 - DNA, 831 bp, Homo sapiens
cactagtccagcgtggtggaattccccagatgcccctcagtcccgtttctccccagatccacacctggccctccccctcctgttccagaatgcagcccagcccctctgccatcctgtcctcctagcccgtggtctccctccacacacgccagtccaggctccttcccttggtgcctgacccctcctggctgccagcagcccccttctggccactgcccactgagggagggggcttcctcttacccctccccagcctgggccactgggcctggtactgaggacctcgctgccaccccaccccactctgccatgctacggggggtgggggggcggtcagtgcatgctgttcctagtctgaaacttgtgtcctgtgggtgcctggtggggaacccttgcgggaaggcctggtgggtttgtccctgcttcccagccagcctgtgtccccgggtatgggctggggtctggcatgggcctctgcagctggccacagactgaggggctccaaacagcactgggaacagcctcagggtatctggttgggggctgcagacaggggtggggtcttctgcttggccttgacaggttgcaggcaggttgtcagccggatctgcaatctcatgggggcttggggtcttcccggctcatgaggttatggcagaattcagctcctggtggctggggactgggtcccacctccctgctggctgttggcccttcccagcatggcggttgcttccccttcagggccagcaggactggcctgaatttctccctatctggcgttgaaacaccctcaatgagctaaccctcctccaccaggcccccacctgg

SEQ ID NO: 64746 - DNA, 1200 bp, Homo sapiens
ctacagctcacgcatcgtgggtggaaacatgtccttgctctcgcagtggccctggcaggccagccttcagttccagggctaccacctgtgcgggggctctgtcatcacgcccctgtggatcatcactgctgcacactgtgtttatgacttgtacctccccaagtcatggaccatccaggtgggtctagtttccctgttggacaatccagccccatcccacttggtggagaagattgtctaccacagcaagtacaagccaaagaggctgggcaatgacatcgcccttatgaagctggccgggccactcacgttcaatgaaatgatccagcctgtgtgcctgcccaactctgaagagaacttccccgatggaaaagtgtgctggacgtcaggatggggggccacagaggatggagcaggtgacgcctcccctgtcctgaaccacgcggccgtccctttgatttccaacaagatctgcaaccacagggacgtgtacggtggcatcatctccccctccatgctctgcgcgggctacctgacgggtggcgtggacagctgccagggggacagcggggggcccctggtgtgtcaagagaggaggctgtggaagttagtgggagcgaccagctttggcatcggctgcgcagaggtgaacaagcctggggtgtacacccgtgtcacctccttcctggactggatccacgagcagatggagagagacctaaaaacctgaaaaggaaggggacaagtagccacctgagttcctgaggtgatgaagacagcccgatcctcccctggactcccgtgtaggaacctgcacacgagcagacacccttggagctctgagttccggcaccagtagcaggcccgaaagaggcacccttccatctgattccagcacaaccttcaagctgctttttgttttttgtttttttgagatggagtctcgctctgttgcccaggctggagtgcagtggcgaaatccctgctcactgcagcctccgcttccctggttcaagcgattctcttgcctcagcttccccagtagctgggaccacaggtgcccgccaccacacccaactaatttttgtatttttagtagagacagggtttcaccatgttggccaggctgctctcaaacccctgacctcaaatgatgtgcctgcttcagcctcccacagtgctgggattacaggcatgggc

SEQ ID NO: 64747 - DNA, 3156 bp, Homo sapiens
aacaccagggtttttcccaaaccccagggtgttaaaacccggcccccggaatttattttggggggccctaaaaaaaacctttattttcccaaccccggttattaaaaatgaaaccttttaaagggccccccccttttttttttttggctaagttgccctttattaacgaaaacatagagctttcggtcaattccaccacggagaacacaaaccagagataaaacccacaccaagggctatttcccaagctggggaatttgagaacacacgggcagagttcacgccacacaactacactgggctcgtccttgggaggcgttcacaggaagcaatcacgagcgccaagccacccacaaggcagtgcggcaaggctcccgggatccttacaggcatccaagcgaggtacagaaacctccacagcagtggggataaggggaaaatattttctcttgctaaagaatatccttagttctcaacataaacatgactacgtatatattcagcttcaaatgaaaaacaagtttacaaatcactactggatacttaaactctatgttgcttttctttttggcagcaccagcctaaactctgtgggtttgcaatatttcagaaacttcaggtacattacagtcttctgagaaaggcccagaacttcagaattcctggagcggctgtgaagaaagaacattactggcaacaaatattaaaacaacatttcaagaactccaagaatacactgagaggtttgtaaaggtgcacatatttaagcattcaagctatatcctaaatcatttttctgttaacgtatttatttttggcttaggaaaaacatgtactttattggcaaattgttttagctgtagacggatggatgattctacagccacactcccctttccgggtgtacatccggggcctgtgcacctgcgcggaatcaggcaactttgtttttcccggtccccaaaaagctcacctttgacacaccctctatatgcacaggaaaactgctcttcttattcagggtctctttttgtggtggaattcagagaaactgggttgcaacatctttttagggagaggtcgagtatgttttttcattcgagtgactctgcatgcttaaggaatctgagtcggtataaaggactagaccactgaattgcgtacagcgtcccaggatgcctgcagccccagagtacaaactgtagatgctctcgtggcctgaatgtggaattttacccaccagaaagcattactggagcccaaactggcaactttaaatagctcaatgatatcggtaccttcccctttggtttcaaaagcaatcatgaccgaacattttcaactgtgaggcaaagctgacttgcataccaaaaaacacctttccaaaaacattcaatgaggtagctcagatcaattatcaaacccaagtgaataccaagaagcttaataaatgctcaggcattttaaaatgcaaattgctacagtgcctaataaatgctctttcttcccaattcttgcaggtgcatgcaaatgttgaggaggagcccctgcaaagtgaggacagcgagaggctgggagtgaatgaagctggcaaggagcagagaggagggggtgccctggggcacccaacttaggctaaagtgcgcctgcccaccacagagctcaagtgcaatcagctccagagaacaaacaccaagtagaactcagggctcgatgggctgaaaagtggccttgactcaaggcgctagggaaccctcagcctggtgcattcacattgagatggaggcaatctaagatacttcccttaaatgctgagttggtataaagtgctggcccactggaccagctcagggcagtctctcacgttttccagggccccagagccaccctccctctagaggagtctggcccctgttgcccccaccacaccaccctgggtgggttctgggagaggccatgctcttagccactcgtcccctgagttctcacggtctgctcagaggcacagactgctctttgctgggtagcttttcggaggtcgagctcaaatgccttccatgtggagtcttggacaaagggaaaggtggccacaccaacccgggcagcaatatgaattctgtgacttccagcagtaagaaagagttcacacacacacaaacattcatgtgcacagacactttcacaacatacacacatgtacacacttaggtgcacataccctcactcacacaggcacacacatgcatccacttagtcacccacacacaagtgcactcacacacacgcacgtgcacagagcagtgcacagccactgggcaacatccccgggggcagcaagctcaggtgcagccagggtaggggtgggcggagtgcaggggcctggagcagggctgggcggtgttgcttgggggaaggagccctcgccccacctcgccctggctatctccctttcctgtcctcatcggccaccaccaccgcacccctgcccagccgggcacactgaagacaagcagtgggaaggaaggcagcaggtcgcttgcgttaggtctccgtcgtataattatcgtaggtcagcggagccagtgccggaaaactgctccaccgcctggcgccgggatggggctctgtgcgcccttgctccttatatttacccagaatgtttttggcttcttctgcatcctgcaaagggctctctccatattcttccttcagccactgccgatactgatggacctcatgcttctcaaactcctggagctgtctctggaagcccacgttggggttggcacaggatctcccagcacgcacggtgtgcagggcatcctcccagccaaagtcagtgacggtcatgatgtatgcgatcaccagtgtcacgctcctggagaccccggccaggcagtgtacaaggcagctctcaccgcggagccggcactcgtgaatgaatttaatactttctttgaaatgtcttgtcaggttttgagatggtgaatccgctgctgggatgcacaggtatttaactccctccaacataggcctggcactatcgtggacagacagaatatgtgtcaccttgttcttgctcaattgttccgcgtctctggcatctttgaagttgccgatgtacaggccgggcaggatcttgttcatcccattccc

SEQ ID NO: 64748 - DNA, 1757 bp, Homo sapiens
ttttttttttttcagagcttaaaaaccaaaaggcagaaaatagactttattccaagacagatttgtaaaagatgtttttaaagggaaaggcaagtcacgctactaaatcaaacattgttcacaatttctggatcttcctcctccgcctggcactgcagctgagccttggcggatatgctcggggccctcggcgcagaggaacttagcctcgattctcttcctgaggggcttcttaacttttccaagccaggcagtgagcgtggtgggaggctggggctggtgcctgcggacagctccagatggaatcccaggccacggtgcttctagtgtccccccagcgagcttgcggtgtggcaggcggccaggaagggccatgagcagggtggcctgaatgaaaaccgagggccgaagccagcctgactccctcgcctaagctggggctcggtccgaggcacacgcatggccttggccagacacaaaccaagagactgccatgacagacagagcagaaacctcccgagcactgtgttcaagctaagctttcctaagacgggcttctcaggcgagacgtgacaccagacaccgtcgcatgttacttggagagaacagagacgtgcgggccacagcggcccaccaaaggctgccatccaagctgagttccgcaggcctcacctgcagctggagagggaccttgccctgatcctcctggtaggtacccgctaagggattcaggacagagcgtcacactgcacgcagggtcctccgccaccaccatccaagaaccccggggggctggccacgcgctggcctctgccaaggagtgccagtggttcccgggacggggccgcccaagcaggtgagggaggtttagatgaatgacttggccagggtcaccatgtggtccacgccacatgccacgtccacaggctccccaggcatcgtcaccctccatgggaaatactggtcctccaggcgaccgattcccaggcaccctcggatgttcttgccccatacaaacagctctcctttgttggtcagtgcagcaaagtggctgagtccacatcggatgcgggaaacctggatttctgggttgaactccgtcaagccaaagagagtgggtggaatcatttcagggacggcactttccactaggtttggacctttcccaagaattccatagccccagacaaaaacatgtccttctccgtttaacactgcacagcccgtgccaccgcatgcagcctgtcgcaccttccccactcctgagaagtgtaagcagcggggcacattcacctgtgtggagtcagtgacagaggccagctgcaggtactccgagtttccccaaccaaaaagtcctccgtcggcggacacggccaggcagcaatcaccgtaggtggcaacttggataacgttcactcccgccaggtctccacccagcttggtgggcgagctggtgatattgtagtgacccagacctgtttgcccatcagcaccccatccacaagaatagacttctcctttatccgtcaggaacagactatgatcctgaccacaggcgacctggaccacctggccatcgaagtcctgcatcctgtggactctgtgactttcactgtaaatttcattttcgaccacctttcttccacattgcccataagaattgtttcccatgctgaagactccttccctgtcagtcaacacaagagagtgagctcggccgcaggagacttgcagcacccgtgtctcctgaggtctgt

SEQ ID NO: 64749 - DNA, 459 bp, Homo sapiens
tctagtccagcgtggcggaattccagatggtgtcatcgtcatgtacgatctcacagacaagcagtcgttcctgtcggtccggcggtggctgagcagcgtggaggaagctgtgggagaccgggtgcctgttcttctgctgggtaataagcttgacaacgagaaggagcgggaagtcccccggggcctcggagagcagcttgccacggagaacaatctgatcttctatgaatgcagcgcctactctggtcacaacaccaaagagtccctgctccatctggccaggttcctcaaggagcaagaagacacagtgagagaggacaccattcaggtcggccaccctgctaagaagaaatcctgctgtggctgatagggtcctacaaggactgcccccagcaaacctgaggtcacagagcctgccctgatcctgcacacggctcctgcacagatgccacccaccgg

SEQ ID NO: 64750 - DNA, 1885 bp, Homo sapiens
attgatcacgttggaggaattcgcgtgactacgtgcgccagacgtggaagctggagggcgaggccctggagcaggccatcatcagccaggccccgcaggtggagaagctcattgctacgacggcccacgagcggatgccctggtaccacagcagcctgacgcgtgaggaggccgagcgcaaactttactctggggcgcagaccgacggcaagttcctgctgaggccgcggaaggagcagggcacatacgccctgtccctcatctatgggaagacggtgtaccactacctcatcagccaagacaaggcgggcaagtactgcattcccgagggcaccaagtttgacacgctctggcagctggtggagtatctgaagctgaaggcggacgggctcatctactgcctgaaggaggcctgccccaacagcagtgccagcaacgcctcaggggctgctgctcccacactcccagcccacccatccacgttgactcatcctcagagacgaatcgacaccctcaactcagatggatacacccctgagccagcacgcataacgtccccagacaaaccgcggccgatgcccatggacacgagcgtgtatgagagcccctacagcgacccagaggagctcaaggacaagaagctcttcctgaagcgcgataacctcctcatagctgacattgaacttggctgcggcaactttggctcagtgcgccagggcgtgtaccgcatgcgcaagaagcagatcgacgtggccatcaaggtgctgaagcagggcacggagaaggcagacacggaagagatgatgcgcgaggcgcagatcatgcaccagctggacaacccctacatcgtgcggctcattggcgtctgccaggccgaggccctcatgctggtcatggagatggctgggggcgggccgctgcacaagttcctggtcggcaagagggaggagatccctgtgagcaatgtggccgagctgctgcaccaggtgtccatggggatgaagtacctggaggagaagaactttgtgcaccgtgacctggcggcccgcaacgtcctgctggttaaccggcactacgccaagatcagcgactttggcctctccaaagcactgggtgccgacgacagctactacactgcccgctcagcagggaagtggccgctcaagtggtacgcacccgaatgcatcaacttccgcaagttctccagccgcagcgatgtctggagctatggggtcaccatgtgggaggccttgtcctacggccagaagccctacaagaagatgaaagggccggaggtcatggccttcatcgagcagggcaagcggatggagtgcccaccagagtgtccacccgaactgtacgcactcatgagtgactgctggatctacaagtgggaggatcgccccgacttcctgaccgtggagcagcgcatgcgagcctgttactacagcctggccagcaaggtggaagggcccccaggcagcacacagaaggctgaggctgcctgtgcctgagctcccgctgcccaggggagccctccacgccggctcttccccaccctcagccccaccccaggtcctgcagtctggctgagccttgcttggttgtctccacacacagctgggctgtggtagggggtgtctcaggccacaccggccttgcattgcctgcctggccccctgtcctctctggctggggagcagggaggtccgggagggtgcggctgtgcagcctgtcctgggctggtggctcccggagggccctgagctgagggcattgcttacacggatgccttcccctgggccctgacattggagcctgggcatcctcaggtggtcaggcgtagatcaccagaataaacccagcttccctcttgaaaaaaaaa

SEQ ID NO: 64751 - DNA, 1060 bp, Homo sapiens
cccagcctctgcccggggcaccccggccttccaggcacgccgggccaccatggcagccagggcttgccgggccgcgatggccgcgacggccgcgacggcgcgcccggggctccgggagagaaaggcgagggcgggaggccgggactgccgggacctcgaggggaccccgggccgcgaggagaggcgggacccgcggggcccaccgggcctgccggggagtgctcggtgcctccgcgatccgccttcagcgccaagcgctccgagagccgggtgcctccgccgtctgacgcacccttgcccttcgaccgcgtgctggtgaacgagcagggacattacgacgccgtcaccggcaagttcacctgccaggtgcctggggtctactacttcgccgtccatgccaccgtctaccgggccagcctgcagtttgatctggtgaagaatggcgaatccattgcctctttcttccagtttttcggggggtggcccaagccagcctcgctctcggggggggccatggtgaggctggagcctgaggaccaagtgtgggtgcaggtgggtgtgggtgactacattggcatctatgccagcatcaagacagacagcaccttctccggatttctggtgtactccgactggcacagctccccagtctttgcttagtgcccactgcaaagtgagctcatgctctcactcctagaaggagggtgtgaggctgacaaccaggtcatccaggagggctggcccccctggaatattgtgaatgactagggaggtggggtagagcactctccgtcctgctgctggcaaggaatgggaacagtggctgtctgcgatcaggtctggcagcatggggcagtggctggatttctgcccaagaccagaggagtgtgctgtgctggcaagtgtaagtcccccagttgctctggtccaggagcccacggtggggtgctctcttcctggtcctctgcttctctggatcctccccaccccctcctgctcctggggccggcccttttctcagagatccactcaataaacctaagaaccctcaaaaaaaaaa

SEQ ID NO: 64752 - DNA, 2481 bp, Homo sapiens
tggcgaattcattatagacgtgagccatcacacccagccacagtttgagactttatgatttaggcagtgcaaagcctttgaaaaaactggatcaagtttttacggaggttggtgagttggtgctatgcaaaatgaatttggaggggtaagagacaaagcaaggagaacattcggaaggcttttgcagtagagaacaggctaaatataaggaagacctgaattagaattgcggaggaaggcatggaaaagcaagaaaaaaatcaagaacagatagggctctgactgactggtaggaaatgtaaaaaggccatacatttattctgaatgttggtatctggaagaatggtgatgctgttcaagtaataaggacaaaggggaaccaggcactgtgagcctctgtggggtgtgttactcttttagctcatgtgtttcaagtcattctaccccttgccgtctccacatccaaacctaactactttggattttaattgcagctcctccacccccaccacctgtgatccgaaatggtgccagggatgctccccctcccccaccaccataccgaatgcatgggtcagaacccccgagccgaggaaagcccccacctccaccctcaaggacgccagctgggccaccccctcctcctccaccgcccctgaggaatggccacagagattctatcaccactgtccggtctttcttggatgattttgagtcaaagtattccttccatccagtagaagactttcctgctccagaagaatataaacactttcagaggatatatcccagcaaaacaaaccgagctgcccgtggagccccacctctgccacccattctcaggtgaagcctggcttggtcccgttcctcaggaaaaggatggaccttctcttcttctcagatggtcccttccattcccctgaaacctgcatgagagctcctaacatgtttctccaatgcaatcaagccctagactccaaatgtcctcccagctcacctccatctatgcatctcatctctggatttggtgatcagactctatattgacagtaggatctcaaaccctgcatccatccttcctccagcaagccctgctagccacatgaggaacaagtttccgtgtcttctgccttcctcttggggaaaggtgccttgttgtgatgaattaactcactgttagggcagggtggagaatggtactccttccttctcctgtccactgtgggggaagcttggcaggtatattatatttcatcatttaggaggctggcatgaccaggacttatgggtgggaggggagcatttttagtgaagcaagaaaggagtttgccaagaagtgatctgttttaaaggtcatatttggagaaagggcaaggaattgggtctgctttatttttgggggtattttgtttttgttctcacctgctgcccccccaccccaccaccccagggataaattggatataaacactaaatactaatcagttgaacttaacatttaataaaaagaaagggtgaaataaactgaagaccattttagaactagtcagttctctgcagcaaagggaacaggagccatttgaaccctctgggacccctcaccccactgcttcagggtgctaggctgagggatgtttttcctcccccttaccgcccatgcccttgaaagaaaagtcactttttgtggagggcatcattcattcctgattcacaaaccccaaaaacctctggtgggagataggaagatagggcgtgggcctgggccttaacctcaatcttgtgtctgcctcagtcttttctgactggccctgaagttgtcagtggctctttctgtccttcagcccctggaaggtgctccaggataacaaagaagggcaggttgaagcccctcatggaaggagctggctttgtggggctgcaaaggacttttaagtcctgcctgtactgaagttcacagcccacctgactgagcagactcttcctgttcctttctctaccacccttgccttcccaggactgcacggtttaacacagcagagtacagaagggtgaagaagtgagcagaggcttatgaagatattcagatactcttctatgccaggaagcacaaagactttgttgagatttgcctcagttcagtagatcttccttggcagccagccataggttgtttctttgtcttccgggtcctaaagagcacagagaaaatggaggtccccagtctaggtaggaagctgattggatgaggacttctttttttccgacagcaggatggggctcttgggctccacacaccagatgctttggttttctacaactgttgctatgtgtagagggtgctcagagcgtggcatgagagcaaggagaccatggctactctttgaaatggatggggaaaattagcttaaaaatttaatcacgagattgcgccactgcactccagcctgggcgacagagccagactccgtctcaaaaaaaaaa

SEQ ID NO: 64753 - DNA, 442 bp, Homo sapiens
agaggagcgggccgaggactccagcgtgcccaggtctggcatcctgcacttgctgccctctgacacctgggaagatggccggcccgtggaccttcacccttctctgtggtttgctggcagccaccttgatccaagccaccctcagtcccactgcagttctcatcctcggcccaaaagtcatcaaagaaaagctgacacaggagctgaaggaccacaacgccaccagcatcctgcagcagctgccgctgctcagtgccatgcgggaaaagccagccggaggcatccctgtgctgggcagcctggtgaacaccgtcctgaagcacatcatctggctgaaggtcatcacagctaacatcctccagctgcaggtgaagccctcggccaatgaccaggagctgctagtcaagatccccctggacatggtggctggattcaacacgcc

SEQ ID NO: 64754 - DNA, 1497 bp, Homo sapiens
cggtggcattcgttgtggagtgaatgtaagttggacacagaaaatccctcataatatcctcctgtttggttgtatagtggcctatgagcagattctgtggcttagactcccagtcccatggttcctggctcctgatgtcttttcccataacattttgacattccaacaaactctaattagctgaatgatcaatcacagaaatgtaaatgtagaagcgaatttacagatcatacagctccaccctgtaaataaaccaggatgattagggtattcacgatattgcagattggccagctcatgacttgccctttgttcctagctctgtgcctggcctcagaggagagccttggtgcacgtttgactttttaatctttatttgaacctgttacacaccgtcacccccactgctctgcttgccacagacatggaaggttcactaaggccttaaggcactcatgcaagctcacaagagaaagaaatctgtaaggcatgtagaatttggactcaatcatgttggtctttaatgtgcctagagcaatggaatgggcactttgggggcggtggaattcaagacgctctggctgaagattcagaagtatctggtaactctcttttccttctgggcatcctctcctctgttctaatcctcccttacactcattcctggtccattgtattctgaccacatccttaatcatggtcaaaactattgagtcctgggcacattggtcatgaaggaacaagaaggcaatgagagactctcatgccaaccactgccctgaaagccctgctgttcagacagcaaaggggccagcactggccaagctcttatgcttgctctgaaaccttcttgggaggagtcaatagggtctccttttgaaagtgtccctggccttttgagaaagcagtgtggtggagggagatggttctggcaggggccgtgaatggttgttttctacttgggatttctttcctgctttaggagatctattgggaaactgattataaccactcgggcaccatcgatgcccacgagatgaggacagccctcaggaaggcaggtttcaccctcaacagccaggtgcagcagaccattgccctgcggtatgcgtgcagcaagctcggcatcaactttgacagcttcgtggcttgtatgatccgcctggagaccctcttcaaactattcagccttctggacgaagacaaggatggcatggttcagctctctctggccgagtggctgtgctgcgtgttggtctgacccggggtttcggacatcagtgacactccctgccccactgcttgcttcttgtcaccccttctctacaattttgtgaacatttatgctccagtggcattcactggttgttcatacctttcttgccctgggtctatttcagcagcactgagctatgagctatgtaagccgacccggtgggcccaagtggagggaaagcaatcaattaaagttgtgagccagaatggtaaaaaaaaaaa

SEQ ID NO: 64755 - DNA, 1968 bp, Homo sapiens
acactatctttttgcaaaaaatgaaacttttaatccacatttaaaaataaggctgtgggattttggagaagcattttaaaaacttgaggactttatatgttactcctgggaggttaaacattgtttcagactaatagaactagcattattaacgtgctgactctaactgaatttgttttgttctctctctactaggtgattcgtgaagctaagagaacagcaccaagtatagtgtatgttcctcatatccacgtgtggtgggaaatagttggaccgacacttacagccacatttaccacattattacagaatattccttcatttgctccagttttactacttgcaacttctgacaaaccccattccgctttgccagaagaggtgcaagaattgtttatccgtgattatggagagatttttaatgtccagttaccggataaagaagaacggacaaaattttttgaagatttaattctaaaacaagctgctaagcctcctatatcaaaaaagaaagcagttttgcaggctttggaggtactcccagtagcaccaccacctgagccaagatcactgacagcagaagaagtgaaacgactagaagaacaagaagaagatacatttagagaactgaggattttcttaagaaatgttacacataggcttgctattgacaagcgattccgagtgtttactaagcctgttgaccctgatgaggttcctgattatgtcactgtaataaagcaaccaatggacctttcatctgtaatcagtaaaattgatctacacaagtatctgactgtgaaagactatttgagagatattgatctaatctgtagtaatgccttagaatacaatccagatagagatcctggagatcgtcttattaggcatagagcctgtgctttaagagatactgcctatgccataattaaagaagaacttgatgaagactttgagcagctctgtgaagaaattcaggaatctagaaagaaaagaggttgtagctcctccaaatatgccccgtcttactaccatgtgatgccaaagcaaaattccactcttgttggtgataaaagatcagacccagagcagaatgaaaagctaaagacaccgagtactcctgtggcttgcagcactcctgctcagttgaagaggaaaattcgcaaaaagtcaaactggtacttaggcaccataaaaaagcgaaggaagatttcacaggcaaaggatgatagccagaatgccatagatcacaaaattgagagtgatacagaggaaactcaagacacaagtgtagatcataatgagaccggaaacacaggagagtcttcggtggaagaaaatgaaaaacagcaaaatgcctctgaaagcaaactggaattgagaaataattcaaatacttgtaatatagagaatgagcttgaagactctaggaagactacagcatgtacagaattgagagacaagattgcttgtaatggagatgcttctagctctcagataatacatatttctgatgaaaatgaaggaaaagaaatgtgtgttctgcgaatgactcgagctagacgttcccaggtagaacagcagcagctcatcactgttgaaaaggctttggcaattctttctcagcctacaccctcacttgttgtggatcatgagcgattaaaaaatcttttgaagactgttgttaaaaaaagtcaaaactacaacatatttcagttggaaaatttgtatgcagtaatcagccaatgtatttatcggcatcgcaaggaccatgataaaacatcacttattcagaaaatggagcaagaggtagaaaacttcagttgttccagatgatgatgtcatggtatcgagtattctttatattcagttcctatttaagtcatttttgtcatgtccgcctaattgatgtagtatgaaaccctgcatctttaaggaaaagattaaaatagtaaaataaaaaaaaaa

SEQ ID NO: 64756 - DNA, 504 bp, Homo sapiens
gcggccgcaggagaagccgcggttggcgcaggacgcaggtgctgtagtcgaagcgctcaggctggctggctcgccgctgggccagaagcccgcactgcacaaccgtgttgcccttggagagctccaggagtgggtgggcagtggcagggtccaacttgagaggctccggggctggcaaaactttccggaagagccttttccacacggtcagcttgatgtcagcctggtggaggcctggcttgaaggagatggggctgaatgcgccttctaggggccgggcctgcggcatctctgctctggaggccatggagtggaacttccggatgaacttgtggtggtcctcattgccgaactgttccagcacacactcggcttgggccagccgctcccgggttccctgggcctgctccagctgcatgtccagggaggccaccaggccacgggtgtgaccccctatcccctccaggcagcgggccttctcctcatccaccaggtggtgcagct

SEQ ID NO: 64757 - DNA, 929 bp, Homo sapiens
gaattccaacagccatcgcactggactgcgacctgagggccagccaggccgcgctcttcgagaagaacaaggagctggcagacctgaagcatgtgcatggctatctgaagaagcagttccaggagaaggtggcagagctggcacatgccaaccggcgggtggagcagcacgaggctgaggtgaagaagctgcggctgcgggtggaggagctcaagaaggagctggcccaggctgaggacgagctggacgaggcccacaaccaggcacgtaagctgcagcggtcgctggacgagcagacggagcagagcgagaacctgcaagtgcaactggagcacctgcagtccaggctccgcaggcagcagcagaacgctcccctcttcgggaagatccgcagtgctcgctttggcaccgaggaggccgaggatggaaccagtgacctggacgaggacgaggacctgcaaatccaggtggcctagagcttcctgtggctgggcaggatgggccgccccatacctgcccagggtccaggctaaccagccactcaaactgatgcagtgcctaggctcactctgggaccagtccctgccacagccgactttcttctctcccagggatggcgtcaacagtcccacctaccaacgccctgtggaaaggaagcctatgttttatatatatatatacacacacgcgcgcgcgcgcgcgcgcgcacacccagaagtctttggacccatttggttttataaatacaggacagctccaaggcccagtccagatgacctcacccacccaggacttcatgcagggctgggcatgttgggggcagttgttggagccccaccctgggctgcctctctaggcttcgctgttcatcatacaatgcagtgaacccagttatttgtaataaatgaagttcaagttcaaaaaaaaaa

SEQ ID NO: 64758 - DNA, 2863 bp, Homo sapiens
  misc_feature (1)...(2863): n = a,t,c or g
cacgctggtgaaggagggaggcagagttgtggccgacctgtcttgcgtgggagatgagtacattgccgcgctgggcggggcaggagggaaaggcaaccgcttcttcctggccaacaacaaccgtgcccctgtgacctgtacccctggacagccaggacagcagcgagttctccacctggagctcaagacggtggcccacgccggaatggtgggattccccaacgccgggaagtcctcactgctccgggccatttcaaacgccagacccgccgtggcttcctacccgttcaccaccctgaagccccacgtcgggatcgtccactacgaaggccacctacaaatagcagtggccgacatccccggcatcatacgaggcgcccaccagaacaggggtctggggtccgccttcctcaggcacatcgagcgctgccgctttctcttgttcgtggtggatctttctcagcctgagccgtggactcaagttgacgatttaaaatatgaactggagatgtatgaaaagggcctgtctgcgaggccccacgcaatcgtcgcaaacaagattgacctccctgaagcccaagccaatctgtcccagctccgggatcacttgggacaggaggtcatcgtgctgtcggcgttgaccggcgagaacctggagcagctgctgttgcacctgaaggtgctgtatgacgcctacgcggaggccgagctgggccagggccgccagccgctcaggtggtagccacgccagagcggggtcgcctctgggcctctgtctgagcaaacctgggtgtgaattcggtggttttgaatgcataaagtgccttgtggacacgggggagttgtggtgcttctgggtctctgggccccgcctgcttggcctgaaatgccctcatgttgggaagcattccgtgccccctaccccgcctgccctcccgtatttacttgcacctgtcagccctgcaccggacttgantgagccagtttgctcatttgtgctgattaacacccctaataaggggtttgggggttgcccataaacggggttggccctgccgctgactcgggtctccgccatgcacgcgtggactctcggatgagctcagcagaaccgcacagccagagccccaggtcagaagtgcagaccagggttctcagcacagtgcccgtcgtgcttccatggcttgctacggagagagacctctggatccacactggggctgcgtctggcccgttgtccagcagccctgcggtaccgcaagcccaggcaccagtgtctcggggggcctcactgctgcgcaaggggtggggccgaggatgcaagtccaggcagagcggcgcaggcagctgtgagcttttctccatcagccgtctgagaagagcagtgaggccagctgcttcctgtccttcagaacacttctctgtgctcagtgggagccaggaagcctcaggcttcacgactgaatgcacccaatatccgacctggctgcgtgtttctggctgggctgccgtgtgcacagcaagttaactagaggggctgtgggccatggaactgtcagcgttattctcagaaggcggccgtggcatgggcagggtatagtgaggagtggaaggagacgtgtgcctggtaatatggggcggaatttccactcagctccatttgctggggatttaaagagaacccttgtgctgcgccaggcagttaccgagccgaagggagatgatgggccttcgcccctcagtgggatggcagctgagggggccctgcatttgaccctcgagactgcagcagcgcctttcctgtctgtggtttaagtctttgcagtcaagtactgatgcatccaagccaggcctatgcctggtgtctccctgactgcagaggagccccagggcaaggacagctcagctgctggcagcctgcctggcccatagacatcccccaagtagtctcaggcctctgacatgtccctgaggggcccctaagaaagaaagtggaggggacactccagaggctgtcgtgggaggatcatgtgagcctgggaggtcaaggctgcagtgagccgtgattgcaccactgcactccagcctgagtgacagagcgagaccctgtctcaaaaaacaaacaaacaaacaaacaaaaacagaacattctgggcacggtggctcatgcctgtagtcccagcactttgggaggccgaggctggtggatcacaaggtcaggagattgagaccatcctggctaacacagtgaaaccccgtctctactaaaaatacaaaaaaattagccaggcgtggtggcggtcacctgtagtcccagctactcgggaggctgaagcaggagaatggcgtgaacctgggaggcggagcttgcagtgagccgagatcacaccactgcactccagcctgagcgacagagcaagactccatctcaaaaaaaaaaaataataataataatagctaaatactggaaacaaccaatattccatcaacaggagaatgaataaacaaattgtggtatagctatacaatccaatactatgcagcaataaaaattgaatcaatcactgatacacataacatgcaaggatgaagctcaaaaacattacactgaacaaaagaggccagacacaacagtatgtctgagtccatttacatgaaattctaggaaaggtagaatatcctacagtgtagagaacacaataataagaaaacaaacaacctgatttaaaaataggcaaaccaagagtagtagtgtgtgcctgtagtcccaactacttgggaggctgaggcgggaggatcccctaagcccaggagctcaagacctgcctgggcaacatagcaagactctgtctcaaaaaaaaaa

SEQ ID NO: 64759 - DNA, 618 bp, Homo sapiens
gaattcttgaaggaaaaggagaaattagaaatggagttagcagcagtgcggactgcaagtgaggaccatcggagacacatcgagatcctggaccaggctttgagcaacgcccaggccagggtcatcaagctggaagaggagttacgagagaagcaagcatatgttgagaaagttgagaagctgcagcaggccctgacccagctgcagtctgcatgtgagaagcgagaacagatggagcggagactgcggacttggctggagagagagctggatgcactgagaacccagcagaaacatggaaatggccagccagccaacatgccggaatacaatgccccagccctcctggaacttgtgcgggagaaggaggagcggatcctggccctggaggccgacatgacaaagtgggagcagaagtacctggaggagagcaccatccgacactttgccatgaatgccgcagccactgcagcagctgagagggacaccacgatcatcaaccactcacggaatggcagctacggagagagctcgctggaggcccacatctggcaagaggaggaggaggtggtgcaggccaacagaaggtgtcaggacatggaatacactattaaaaat

SEQ ID NO: 64760 - DNA, 1356 bp, Homo sapiens
ttttttttttttttctctttaaattattttattcaagaagtgggggaggacagacaaggggactgagctgagccctgagtccctgaacctcccagctcagcccccacagcaggactggactcaaagtcagagggtggagactccagccccacccagacacggttggggacagacaggacccagggaataccgactgactgtcctccagggggatggcggccgcagcacacagggcccggcccgtggaccgcccgggtggggctatttgggggtgccgccgcccttcttgggagtggtgggtttcttgccctgccagaggtgtccctggatggtgaaggcatcgacgctcatggacatggtcttggcggggatctgggtgaagcgcttgcggtccgagttgtacttgtagatgccttccaccatggcgggcgtgacggtccggggcccataccctgccagccgcgacagctcctctgtctcccccgacagcgtgtagagcgcccggaactggcagctcgagtcgcgaaagaggatcaggaagtggttggccttgcttttctcaatttcctccagaatgcgattcttctgcggttcgttcaccttgcccgccaggcagcagtgtgatagggcattgtggatgatgaacttgttggacttggcgctgggttctttgtacagccgtggacctgtgtactcgggcactgacgctggggaggaggcattgctgccattttcccagtcccgttcgcggcttccaggcaggcggcttggggacatgagacctgacggggagggagcccgagacgtgggcctcttcaccccgaggttattgtgggcctcgttggccacagtggacagtgacagggtggactgggaatagattttgctcagccgagagcccagcaggccgcgggctgggcttcgtgccagggctgagtcgtcacagcaacccgagcgaggccgggtggccctccgcccgccccgacctggacccccggaccccgcagcccggggccgcagcaccttatcgaggtcgtccatcagcttcagctgggcccggcgctcgtactcctgccgcgtgaagtcccccttccgggggcccgcctcctcctcggctggagcccgggcagcaggggctggagtcgccatcgggactgcggacacaagcggggctgggcccggggcctcctcttgggccagcctcgcggcctcctccctccgctgttccttctccacctccagacacggcctgcgccgccgcgcctcctgtgctggccgataaacccgctcaaacaggctggaccgcttttgggccatctcgtccgcaggcttgcgaaatctccgcgatgatcagaa

SEQ ID NO: 64761 - DNA, 2038 bp, Homo sapiens
gaagtagatgtgacccacctggatgtatgggttttgtattgggcgccagcaggctccagccccacctggagggactgccaccaggggcaccagcagagggaagccgtcccaggactgccggatggaccctgctccaaactcagcctgctctccttgtgacagcagagcctttgcaattcctgagggtcatcatggggcaggagacagacagtcctgtaggatctgtggttgtctccttttgacaatctcactgttcttcgtgcctgccctccaaattcagtagcatgtctcaaagccttacatctctcggcacccagagttcagtgcatttccaacctgtgcacctggcctgtgcaaccacccagcctcttctgggggactcactctccctggctgaggctctgtctcttttgtgtctccaaagctgctgtctcccgacctggggcaggaggggctgaggatacctctcttgggtaatagtccctctcggctgaagcagctcctgctgggccaggcgatcacagggcatgctgggcagaggggctctggccggcttcatcttcccacctgctcctccgggtgtctccctctctcgcagccgggatctgcatggcgtctcatctcgattgctgtgtgaaaatcaggtgaaatgaggcctggtggggctgtggattggcacctggatcttccattgtcagccagctgcagttttgctcagtttacgtgggtcaaaaaaacaaaaaacaaggatgggtcaacatcctgtttctttttcactttttaagctttaaccactcgagttgtggatcttggggcctctcttgattaggggttaccaaacaattcatcaagctcctgcatccactcgtcccctggcccgcctttgatgatggagtccacaaggtctgcaccgtccgggaggccagggaaggaacccccagctccgtcgccactgtaattgtatgacacgtcctgaggggcattccgctcataggcttggctctggctgcttggagcaaagctgccactgggtatctgctgctgtgctgggggctggctgaacgctggcatgcctgggactccctggctcaggccagacatgaccattggcctcgcctggctggtgccttgctgccccgggagcgatggcatcatctgccgacccatggcagctgggttgagggtcctcactgtgcccgtgttagcatccacgactgactggctcagtccctgtgggaagtgctgcttggtcagtctcggctgcccagcttgaagagggtagctggcgccattgttgaatggtcccaattctccactagtcctcccaggcatgccctgcaagctcctctgttgccagctttgtgctccttgctggactgttcccataaggctctgcagccttggaggggcttggggcctaggcaaggcctggcctactggccctttcatctgtggatgttgctgggtaatggctgagttcaccagcatgctctgaccaaagccactcaccattccaaccccctgcccagaggcaggttgcctcggtccctgggcttggttatgtgtgatgctcatgccactttggtttggatgctgcaacatttgggtcatgcctgtgctcatattgtacattcctggttggctggtaggcgtggtgctataaggggccagtcccatctccgactgcgcagctgcggtggccatcgtcccagggttctgggagggtcctattcccatcatgcctgcgttctgtgccatcagccgtgacgttcgcatgctctggagggctgcttggcttcttacggctgctatatcctggggagaacctgcagtgaaaaagaggacacataccactcactcttctccataagcaatatactgcaacaagatgttggaattttctttgggaatgacaaaattcctttatatgaaaggatctactctgataataaatctgtaacaaaaatgattatttttctgattatagcatatgctgattgcgaaaattttgaaagtgttaaaaaatacagagacaaaa

SEQ ID NO: 64762 - DNA, 1009 bp, Homo sapiens
ttttttttttttaatagctaattttttgtaatgaaattacatgcagatgattttttaacaataaaacatgttactatgtatcagaacaaacatgggtgtaaatttttttaaatggtgaaagctataggaattgactctagagatacccatatcaggatgtgggtgacctgcctgtctgcatctttgcaggtcctggaacaacctgtactgtgtgctcaggaacagtgagctaaccttctacaaggatgccaagaacctggccctggggatgccctaccatggggaggaacccctggccctgagacatgccatctgtgagattgctgccaactacaagaagaagaagcacgtctttaagctgaggtgaggccttcctggcctttgaaagctcgggttgatggcttgatttggcattagtggcagggcagaggccctctgtaggggaccagtgccaggcctgagctgctcctcaggggtttttcaaatcaaagaggctgatggtccagactttgacctctcagaaagtgctgggctgcctgagaggggtctggatgttcggctcagggtattgtgggatcagagccagccctctgcccagcgccccctccagaggtgtctccatgacaggaaaccctttgtcctcctaggctgagtaatggcagcgagtggctcttccatggcaaggatgaggtaagcgcgggcagcctagcccagacctggctaagaagggggtaggtggaggaccccaggccgcttgccctggaggccccctcagaaggggcagtcccaagagcccccaccattgttgcctggcccgggaggtggggggctgtgggcctccagactccaccgtgaccctccgccccgcaggaggagatgctgtcctggctgcagggcgtgagcaccgccatcaacgagtcccagagcatccgcgtcaaggcgcagagcctgcccctgccttccctctccggccccgacgccagcctcgaattccaccacgctggactag

SEQ ID NO: 64763 - DNA, 1077 bp, Homo sapiens
ggaattcgcttgctggaagagaagttgagttgccaaccgaaccatcactcgtgtacgaagcagtgtgcaacaggcagaaccggccttcattggctgagctgccccaagccgggcctgagactcccggcttagaaggactgaaggagctaatgcagctctgctggagcagtgagcccaaggacagaccctccttccaggaatgcctaccaaaaactgatgaagtcttccagatggtggagaacaatatgaatgctgctgtctccacggtaaaggatttcctgtctcagctcaagagcagcaataggagattttctatcccagagtcaggccaaggagggacagaaatggatggctttaggagaaccatagaaaaccagcactctcgtaatgatgtcatggtttctgagtggctaaacaaactgaatctagaggagcctcccagctctgttcctaaaaaatgcccgagccttaccaagaggagcagggcacaagaggagcaggttccacaagcctggacagcaggcacatcttcagattcgatggcccaacctccccagactccagagacctcaactttcagaaaccagatgcccagccctacctcaactggaacaccaagtcctggaccccgagggaatcagggggctgagagacaaggcatgaactggtcctgcaggaccccggagccaaatccagtaacagggcgaccgctcgttaacatatacaactgctctggggtgcaagttggagacaacaactacttgactatgcaacagacaactgccttgcccacatggggcttggcaccttcgggcaaggggaggggcttgcagcaccccccaccagtaggttcgcaagaaggccctaaagatcctgaagcctggagcaggccacagggttggtataatcatagcgggaaataaagcaccttccaagcttgcctccaagagttacgagttaaggaagagtgccaccccttgaggcccctgacttccttctatggcagtctggcctgcccacaaactgactttgtgacctgtcccccaggagtcaataaacatgatggaatgctaaaaa

SEQ ID NO: 64764 - DNA, 2101 bp, Homo sapiens
atggctgcggccggcggcggcggcggcggggcggcggcggcgggccgagcctactcgttcaaggtggtgctgctgggggaaggctgcgtggggaagacgtcgctggtgctgcgctactgcgagaacaagtttaacgacaagcacatcaccactctgcaggcatcattcttaacaaagaagttaaatattggtgggaaaagagtaaaccttgccatatgggatacggcaggtcaagagagattccatgcattgggtccaatttactacagagattcaaatggagcgattttagtttatgacataacagatgaagattcttttcagaaggtaaaaaactgggtcaaagaattacggaaaatgttgggaaatgaaatctgtttatgtatagttggtaataaaatagacttggaaaaggagagacatgtttccattcaagaagcagagtcgtatgcagaatctgtgggagcaaaacattatcatacttcagccaaacagaacaaaggaattgaggaactctttcttgacctttgtaaaaggatgatagaaacagcacaagtggatgagagagcaaaaggcaatggctctagtcagccgggaactgcaaggcgaggtgtacagattattgatgatgaacctcaagcccagaccagtggtggagggtgctgttcttctggataactgttcacgcctaagaaattaaaagacagaacaaaactgtggatcattgccctcaacatgaagactgccatattccaagtcacattattttaccaatggaattatagaattaacagtattttaaattacgtttataacactgcagagaccttaagtgctaaacttagtggagtttgtgaccagagaattggcattttctacaaatgtttttttttgttttttttttgtttttttttgtttttttttgagacggagtctcgctctgtcacccaggctggaatgcactggcttgatctctgctcactgcaagctccgcctcccaggttcacgccattctcctgcctcagcctcccgagtagttgggactacaggcgcccgccaccacacccagctaatgtttttgtatttttagtagagacggggtttcaccaggttagccaggatggtctcgatctcctgaccttgtgatccgcccgcctcggcctcccaaagtgctgggattacaggcgtgagccaccgtgcccggcctacaaatgttaacaaagcaattaccaatggcctttttacatattttttctttaatgaggaataatatgcatgtagaaaagacctacttaaagtcttcatttatattctttcaaatcaaatctttatttaataacttatatatgttgttggaatggttacatttttgcagccctttgtattttgtggtagtttaaattgtatcacttctaaacagcaaactgtttttgtttttaattagcagatatctgaagtactatttttgcagggtttgcacaggcccgtaactgtctactactttgatataatctgtatacatcctgtatgctgagctggtaaaatacattgtaaattacatattaaatattttatctgcttttacaagcgcaaggtgcaaaaatatatacaatagtctcattgatgactgtaaagtgaattaacatttggtgattatgcctagcttttttgactaatataaagatcatagctccccttcacttctgtcttaacttgaacatggcgtgtttaaattttcatacatactttacttgaattattgctgttgtcacatatttttgcctctgtgagttcatctgatgattgagcagtagcatttgccttttgggttttttgtttgttattatagaagagatgacttctgctgattttgctttagaatggttaccttagaagaatttgggtggctcatgttgaatttcacttctgcaatagctttcattttctcataggctttataagagatgggttcagtggtatgagcagaggaagagatcccagatagtagccagttaaccaagactcattcatatagcacgtagtttatgttcctgaggcagcacttttagatcctttgtgagcaagttctatttgttcattg

SEQ ID NO: 64765 - DNA, 1323 bp, Homo sapiens
cagtgtggcggaattcacagggctaggggtccagggtgtgggtgcagcagacagccaccctggccatatgcatctcgttcccacaggcattcaccaaggacttcgaggtgagccagctctatgactgcaactggatcgtggtcaactgctccacaccggccaactacttccacgtgctgcgccggcagatcctgctgcccttccgcaagccgctgattatcttcacacctaaatctctgctgaggcacccagaggccaagtccagctttgaccaaatggtatccgggaccagcttccagcgggtgattcctgaagatggggccgcagcacgggcccctgagcaggtgcagcggctcatcttctgcacgggaaaggtgtactatgacctggtgaaggagcggagcagccaggacctggaggagaaagtggccatcacgcgcctggagcagatctctccattccccttcgacctgatcaagcaggaggcagagaagtacccaggtgcggagctggcctggtgtcaggaggagcacaagaacatgggctactatgactacatcagcccacgcttcatgaccatcctgaggcgcgcacggcccatatggtatgttggccgggacccagcggctgcaccagccacaggaaacaggaacactcacctggtgtcactgaagaagtttctggatactgccttcaatctccaggcctttgagggcaagacattttagagctgggcaaaacctgtgtaggtctcgctgtgggtttgctggggaccaagggggtgatgaaaaggggaggggcggagctcctgcccaagagaggggctgtggggccccaggataaaacagacacagtgacagggccaagagccagcactgctggccttggtgtcatgccagaatctaccaggactgagggagccagaggagtcctgtaggcaggctactgtgctggagcatcccccagctgctcccatcttgctggaatttcttgggcggcttctccacctgtatctcaagacagacacccgggggcctgtgtctgtggccgctcccatcccggcagccctggctgctgctcgccccaccctcgcttatctgtagattcaaagcgatgttctcttctgtgctcttagaagtagggagttcagcagtaacagccaggtgaagcgaacctgctgggtgatttgtttgcgctctgttttatggggcattcctgcgagatgtgtcagcttctgtgtgaaatgcagccacagctcatgtgtaccaaagtagaaaaccaaatcacagagaaataaaaacatgcttcagagagaaaaaaaaa

SEQ ID NO: 64766 - DNA, 1158 bp, Homo sapiens
tttggagaggccttatggtaatgtcggccattgagaaattgttgaggcaggtagattggggtcaactggactacttagttgtagacatgccaccaggaactggagatgtgcagttatcagtctcacagaatattcctataacaggtgctgtgattgtctccacgccccaggacatcgcattgatggatgcacacaagggtgctgagatgtttcgcagagtccacgtgcccgtccttggccttgtccaaaacatgagtgttttccagtgtccaaaatgtaaacacaaaactcatatttttggtgctgatggtgcaaggaaactagcacagacccttggtcttgaagttctaggagacattcccttacaccttaatataagggaagcttcagatacaggccagccaattgtgttttcacagcctgaaagtgatgaggccaaagcttacttgaggattgctgtggaagtggtaagaagattgccatcaccttcagaatgattccccaagtgtcctggaaatttgcctggtactgacattaagaggacctttggaaatcagcaatgtggtgatggaacctacagaaataatagaaatcataactgttttatttctaaggaaagaatgtcttcatatttgacttgctaagctaaggttcacaaaactttgatgtatcaatgttaactgctatatttaggaattttttgaaagctggtgtgtaccacctgcaaagaactgcattttattttattgaattacccctttagaaatcatgagtttatgatgttacaagtccattttgggagagaactgtacactttttgcaggaccacagaattagtaatttaaatgatatactaaatttgtgtatgggcataagtattacgccttcccaccaggcaatttggactgtctttgaatcctgtctttggtactgtcttggacatgttcttaatatgaacctctgcttcttcatctggatcacactataccccaaacttaatgaatttcagtctccaggagtggagcctgaacatatgtatttttagtaagaccatgatgatgttgatgatgattctggtaatcatggcagtaagaataatagctaacatttaacaagttaattataattgttcttccatttgtgtgagcgggtactatt

SEQ ID NO: 64767 - DNA, 795 bp, Homo sapiens
cagggccagtgcatattagtggacagcacttagtagctgtggaggaagatgcagagtcagaagatgaagaggaggaggatgtgaaactcttaagtatatctggaaagcggtctgcccctggaggtggtagcaaggttccacagaaaaaagtaaaacttgctgctgatgaagatgatgacgatgatgatgaagaggatgatgatgaagatgatgatgatgatgattttgatgatgaggaagctgaagaaaaagcgccagtgaagaaatctatacgagatactccagccaaaaatgcacaaaagtcaaatcagaatggaaaagactcaaaaccatcatcaacaccaagatcaaaaggacaagaatccttcaagaaacaggaaaaaactcctaaaacaccaaaaggacctagttctgtagaagacattaaagcaaaaatgcaagcaagtatagaaaaagcgcattgaacagtcctgggcactacatgtaaattaagcccaaagatggggagaaaggaaaaggagagacaaatatagtccatactgagtgtcatcaacaatccagactgaagtcttctattttaatctcaatccccttttctgatttgccacccatgcctcttcaggctggaaacaatctcttggttccctaaagcactttcttctgactgctgtgattcagtgaaccttgccctttgctttctattacttgtgcatttgcctcacctgacaatgttttaaatcgcctttgtatctccttagctgctcaataaatatttgaatgcatcaattaaaaaag

SEQ ID NO: 64768 - DNA, 1376 bp, Homo sapiens
tttcgtctgctcggcgtcgtggccttcagcacgttaatgctcaaacgcttcagagaaccaaagcatgaaagacgtccgtggaggatatggtttttagacacttccaaacaagccataggaatgctgttcatccactttgcaaatgtatacctagcagatctcactgaagaggacccttgttcactgtacctcatcaacttcctcctggacgccactgtgggcatgctgctcatctacgtgggggtgcgcgccgtcagcgtcctggtagagtggcagcagtgggagtccctgcgcttcggcgaatatggagaccctctgcagtgtggagcctgggtcgggcagtgcgctctttacatcgtgatcatgatttttgaaaagtctgtcgtcttcatcgtcctcctaatacttcagtggaaaaaggtggccctgttgaatcccattgaaaacccagacttgaagctggccatcgtcatgctgatcgtccccttctttgtcaacgctttgatgttttgggtagtggacaatttcctcatgagaaaggggaagacgaaagctaagctagaagaaaggggagccaaccaggactcgaggaatgggagcaaggtccgctaccggagggccgcatcccacgaggagtctgagtctgagatcctgatctcagcggatgatgagatggaggagtccgacgtggaggaggacctccgcagactgacccccctcaagcctgtgaagaaaaagaagcaccgctttgggctacccgtatgacacattcccatgctgggggtgacgggagggccccgccaaccgctggtgtgcagaggtcatcccgcagcatcgttccttaccctctctctgcccttcctttctacctctgctcctcttgctgtctctgcccgctctcgcctgcccccagactactgtgacttaaaaagagggaagaggagccagcgcccgagggggccactggcggctggaggtccccattcagttgcactacaaacactgaccaaatatgcaaggaaggagctgtgtttgtttgttgtcgtcccagacagtgttgtgagggacctgaggccctgccccgtgtccgaccaccgagtggcaaggtggaaggaagcacaggcacacagaccgtgggtgggtctcctcaccgtggctgtgggcagtgcgaacacataacaccctcgggctaaaagtgactcgttgaccaagttggaaccggaatgctttcttactcaaaatggcttttgtaactattgatttctgaagctggttttatgagttgtgacagtgttaccaggttgggggtatgtgtttatttcctacaaagtacttacgggactaatgggcaaaacagagatttttaagtcttccgt

SEQ ID NO: 64769 - DNA, 957 bp, Homo sapiens
ctgccagtgaagcccaggctgctttttcagactgtgtgtagcaccaagaacgcttccttcacacgatcttcaggatcgagcgggctgactgggagtgtctgcctcagtcccacgtggcacttggaaaaaacagagcgaggcccccccaagaggcagcgcccacccggccgccgtgctcccccaacttggggacgtctggccttggacagctgggcccgtctctcaccacccacctcagaggcaaaaaaggattcacacccagatctctagaaaaatgatcaaaagcaggtttcttctcacagccaagcttcctggacatggcagttcattacatctcgggaaaacgtaaatcatttcttcagctgtcaatactgtgtccctcacatccttgagcctcgttcttgcaaaatcttggccttctcgctgggctcgctggccgtaccgtacggggtgttgtgcagctccttggacaccacacagaggaactcggcttggtcttcgttcccatagttgtaagaggagccgatgctgaccaactgctcgaacttccagccgtcggacatggtggacaccatctgcgtgagctcctcctcctggcactgcagcacacggtacacatgcttcacaggcacctgcgatgttttgctgtctcgttctctaattttgtcctttacaagttttattaatgaggtgatattgtaaaattctgcttcctccaacactccttcctccgcgaggtctttgttaatcaccagcttgccgtgtctcaggtagttcagcacaggcccaaagtaggtggggtctctgtcgattaaataggcgcctgtttcatccttgtctgagtccaggtcgggatcggcctggcataagcggtacaggaaggatttcgggtcccggcacagggtctgccgagtggtgaggaagtaggtgccgccgacgttgagtcggacccacttg

SEQ ID NO: 64770 - DNA, 520 bp, Homo sapiens
  misc_feature (1)...(520): n = a,t,c or g
ctcagagtgtaagggcaaacaatatgtcaaaaggacatggtataaaaaatttgtaggagtgcagctgtgcaactctctcagatacaagattttctgtgagggagtcgctggctatgagtcattaaatatgcatgataatatttttgaaacgatgagttatcaagacactcattaaattgtataactaattttttagtatatatcctttgcagttaaccagtgattattatatatcaatattgccctacttttgtggaagattttaggatccttttgtgtgttggtcattatctctattaaaagggaaagtccaaaaatctaggtttttggaatctttatttttagaaggtaacttttaaatttttatttgaaatgtacaagtggctctttgccacatataacttaccttttcaaattaaaaatacgtattttatttttatttcctggacccaacaaacagatgacangtatgggagtgtgaaggtgaagagtaaccactataaactgacttgaagaggcg

SEQ ID NO: 64771 - DNA, 1514 bp, Homo sapiens
aacagcttttgatggggaaaccatggtggcaagtgggcccaggagtcctagtcctgcagccaggtggccaggtgggaggggatcaccctttttctgtgggcctgatgacagctgaggtcccgcaggccctcatcctccccactgcccccaggccgcctggacattggcgtagagcatgtgagtgactgtgagcgcctggccaagcaatgccagctgtgggacctgctcagcgacctggaggccaagtgcgagaaggtgtctgagtttgtggcgtctaagccaggcacgtgtgtgaaggtgctgaccatcgagcccccacctgcagacccccgcctccgggaggacatggcgctgctggccgattgtgccctgccccccgagctccgaggtgatctttgggagctgcccttcccttgtcctgacggcttcaacagctgccctgacatctgcttccgagtggctggctgcagcttcctctgccacaaggcctttttctgtggccgcagtgactacttccgagccctgctggatgaccacttccgagagagcgaggagccagcgacctcagggggccccccagccgtcaccctgcatggcatctcacccgacgtcttcactcacgtgctctactacatgtacagcgaccacactgagctgtcccccgaggcagcctatgatgtgctgagcgtcgccgacatgtacctgctgccaggcctgaagaggctgtgcggccgcagcctggctcagatgctagacgaggacactgtggtgggtgtgtggcgcgtggccaagctcttccgcctggcgcggcttgaggaccagtgcactgagtacatggccaaggtcattgagaagctggtggagcgggaggacttcgtggaggcggtgaaggaggaggcagcggctgtggcagcccggcaggagacggactctatcccgctggtggacgacatccgcttccacgtggccagcacggtgcagacctacagcgccatagaggaggcgcagcagcgtctgcgggcactcgaggacctgctcgtgtccatcggtctggactgttgagcccctggctgggcagccccaggggccaggagctctcttggagacaagcatgtgtatgcgtttgtgtgcagctcttcttcctgctccctgcacattgagggcttcatggggggtgcgaggggctcagtggggcttctcttccctccatgagcctggagaccccaggggaggatccatttgggatgagccccctccccccaatgcacaagccagcccccaagaccctgggggtggacaccactcagggaaacctggggtgggggtgggctttggtcttagcactttccttctccagatcccccctacccaccccagtcccaaatccagtcctctggcccttgcctagccctgaattgcttctctaagctggtgttcccatgcacagggccattcaggaagggctgggggagtgtgtgtggcaataaagcttgaaggcaccgtgaaaaaaaaaa

SEQ ID NO: 64772 - DNA, 904 bp, Homo sapiens
tccggaattcccgggtcgagcctgcatccgagtagcggttctcgaagcagctggggcattaggggcttcccccaggcagggcatatcgtcccccgcccagaggcccggcgcagtcctggcaacagaagtggttctcatgccagcgctgtccctccgcctcggtgcagcgccaggagaagatcagctgggagagggagagggagaggggaacgcttcattcattcattccctcattcattcatccagtaaccacgccttttacccagttaacgctaaagcacgtctgcacacattcccatttaattcactcagccacttttggacgcagggaggactgattggcttaaccaggatcccagctagcaagtgggacaatccccagtgcgacctgggggtctggactcccaacccagggctccaggcttccttttatgctgacatcaagggaatttctagcatgatgaggcacagcactgggcactcggcatctactgagatgagcatgtgtccaagactccctgctctatagaaattcgatgagtccaggaacatttgagggactctgcagtgggggaggccagagagaagggcactgggtcctacatgcccagagctcaagtcagaacacagggaacttggtagtcccaggctggttcctacttctccccactccctgatactgggagaaactgtggcccaggagagtgtccctttgtatcctgccactctggactctgggcagacccccagttcctcccctccaggctgtacctggtcacaagccgggcagcgcgggcgcagcaactctgcatgatgacggccgcagtagagttgtccatcatggtagaagtagatgaggtttatcagggcctggccacaggcctggcaggcaaagcaaggctgg

SEQ ID NO: 64773 - DNA, 988 bp, Homo sapiens
cgcctcaccttccctaccaccagccggggccattgacacccgggacacagggtcctctgagcctcagccaccaccggagccgcctcggtcagggccaccactgcccaacggcctgaagcccgagttcgccctggcactgccccctgagccgcccccggggcctgaggtcaaggggggcagctgcggcctggagcacgaactgagctgctccaagaacgagaaggagctcgaggagctgcttctggaagccagtcaggaatccgggcaggagacactgtgacactttagttccctttttccggtcggtctgcgatgagctgaggccagagccatgagaatctgctcaccttccccccagccttcctgaggcccaggatgccaggggtgggggccattctggggcccccctccccccacagcaacactacaaggggtgcaggagctacagggagtggccctccgcgcgtgactcaagcacttctatttatgagcccagcactggaagactctgggggtgaatgggaggagggggagcaggaggaggaggaggtctccaaggacatcaggcgcctgttctggaggggccaggcttgccctgcggagggcaggcgtcctgggtggtggtgggatggtcccctgtggccccgggcacagggccgggcaggcagcctggtgccggagaggcggtgcgtgctggtggtggttgagatgcgcagaacagccccagacagcgcaggccgggcagggtggggggatgggagcagaggatcagagctttctttttctcaagtgcaataaatctatcagggagctggggcgggagcagccggcactccgggaccctgctgtccaggccactggaggctgcgccctgagaggcactacagccctttgggggcgagtggcatgggtgtgggtgagggtgggcagagggctggggctactcctgtcggtgcaactctgttcacaccttttctaataaactggg

SEQ ID NO: 64774 - DNA, 1496 bp, Homo sapiens
atgtgtgtgggaaagccttcagtcagagctcagatcttattctgcatcagagaatccatactggggagaaaccatatccatgtaatcagtgtagcaaaagtttcagtcagaattcagaccttattaaacatcgaaggatccacactggagagaaaccctataaatgtaatgagtgtgggaaagcttttaatcagagctcagtccttattttacatcagaggattcatactggagagaaaccctatccctgtgatcaatgtagcaaaaccttcagtaggctttcagatcttattaatcatcaacgaattcacactggagagaagccttacccatgtaatcagtgcaataaaatgtttagtcgaagatgagatcttgttaaacatcacagaattcatacaggtgagaaaccctatgaatgtgatgaatgtgggaaaacctttagtcagagctccaaccttattcttcatcagagaatccacactggagagaaaccttatgcatgtagtgattgtactaaaagctttagtcgccgttcagatcttgttaagcatcaaagaatacacactggagagaaaccatatgcatgtaatcagtgtgataaaagttttagtcaaagctcagacctcactaaacatcagagagtacactctggtgaaaagccttatcattgcaatagttgtgagaaagccttcagtcagagttctgaccttattcttcatcagagaattcacactggagaaaaactattatctgtgcacacagtgcagcaaaagtttcagtcagatctcagacctcattaaacaccagagaatccacactggggaaaaaccatataaatgcagtgagtgcaggaaggctttcagtcagtgctcagctcttaccctacaccagagaatccacactgggaagaaaccaaatccatgtgatgagtgtggcaaaagctttagtcggcgttctgatctcattaaccatcaaaaaatacacactggtgaaaagccgtataagtgtgatgcatgtgggaaagccttcagcacatgtactgatcttattgaacaccagaaaacccatgctgaggagaaaccctaccagtgtgttcagtgcagcagaagttgtagccaactctctgaacttactattcatgaggaagtccattgtggagaagacagtcaaaatgtgatgaatgtgagaaaacctttagtgtgtacaccaactctattcagtaccagagacactgtaccagaaaaaaatctaatgaatgctgttgattattgatgagtatgaaaaaggttttaatcagtgttcaactcttatgctacattaaaaccacactggatccggatacgtgtggtggctcacgcctgtaatcccaacactttgggaggcagatgtggaagcatcatttgagcccaggagtttgaggctgcagtgagctatgattccaccattgcactccagtctgggcaacagagcaagaccctgtctatttaaaaaaaaaa

SEQ ID NO: 64775 - DNA, 1160 bp, Homo sapiens
gctgcgcggacgtctttatttttccccgggtggggagcaggatacacagcccacactgcagtcacttagcttgtaaaaatatctcaataaataaaacaaacaagcaacatatacactgaacagagaatattttttttaaaatggctagccaagcaatcacggagaaaggaaaagaatagcggcgtgaaagtaagaattccaggctgacttgaaacaatcatgcagaggctcgggggaggggaaggaactcgggggtcctcttctgagagccttggtccagtttcaacagaattgtacaagaatgcatttctgttttattaaaaaaatagacattaaaaaaggcacttagagggaaatacaaattcaaaatccaaatcctcataaatgtgttcctggaatctagacattttcagaaagaataaacctccccccaaacataagacccagaagaaaaatccaaacagaaacaagatgaccgatgacaatgtcaccagcaagagggctgggagtgcccttcctatgtggggaccgtcctgggggaggacgggagcccgggtcttctgtccgatgtcactgcttgtcccttctctcgacgctggtggagggcagaggtgggggcctcctgaggttgttccaggtttccagaagttacagactcgaatgcatcccaattccacttgcgccgccgacgcgacggacagccctggcgcgccggtccggggtgggtggcgcggcgctagtgggaggcggacatggaccacgcgccctccatgcgccacacggagaaggcgtagctgaggcgctcgtgggccacgtagctgcagctggtcatcttattgtccatctcgtcgctctgcaggacctggtagaggaagtctatgtacctggcggccagcttgagcgtctggatcttgctcagcttgtcagagggcagcgtggggatgatcttgcgcagcgccgcgaaggcctcgttgagcgactgggtgcgctggcgctcgcgcacgttggccaggatgcgctggctctgcagctcctcgaaggactgcgcgctggggctgcccttcttgccgcgcttgcccggggtcgggctgccatcttcgctcgacttcttgctgtagcgccgcttccggccgaagcgcttgggctgcctctcgacccgg

SEQ ID NO: 64776 - DNA, 6277 bp, Homo sapiens
  misc_feature (1)...(6277): n = a,t,c or g
gggtcgacccacgcgtccgcccacgcgtccgtgttctttctgagaggggactttcggctcctcagtgtctgggatgcaaacaggttgcggagggtgggatgacagcctgaacccaggttgcgggggtcccctgtgtgcagggaggctggtcaccctgccctctgcagcctttctggcctgggcctctgtgatcatccaggcgggagggggatgcagagggaagctggcggtggcccgtgatgttggcacagggcctcaccggatgctgtctcctccccctgctccccaggtgtaccaggatgagtttgtgtcctcccagatcaagatcccctcagacacgctgtccttgtaccctgcctttgacatctactacatctacggcttcgtcagcgcctccttcgtgtacttcctgacgctgcagctggacacccagcagacgctgttggacacagcgggcgagaaatttttcacgtccaagatcgtgcgcatgtgcgcgggagactcagagttctactcatacgtggaattccccatcggctgctcctggcgcggcgtggagtaccgcttggtgcagagcgcccacctggccaagcctggcctgctgctggcccaggccctgggcgtgccggctgatgaggacgtcctcttcaccatcttctctcagggccagaagaaccgggccagcccaccccggcagaccatcctctgcctcttcaccctcagcaacatcaatgcccacatccggcgccgcatccagtcctgctatcgtggggagggcactctggctctgccctggctgctgaacaaggagctgccctgcatcaacacccccatncagatcaacggcaacttctgtgggctggtgttgaaccagcctctgggaggcctgcatgtgatcgaggggctgcccctgctggccgacagcaccgacggcatggccagcgtggccgcctacacctaccgccagcactctgtggtcttcattggcacgcgcagcggcagcttgaagaaggtgcgggtcgatggcttccaggatgcccacctgtatgagacagtccccgtggtggatggcagccccatcctccgagacctgctcttcagcccggaccaccggcacatctatctcctgagtgagaagcaggtgagccagctcccggtggagacctgtgagcagtaccagagctgcgcagcctgcctgggctccggggacccgcactgtggttggtgtgtgctgcgacacaggtgctgccgcgaaggggcctgtctgggcgcctctgccccacacggctttgctgaggagctgagcaagtgtgtccaggtgcgggtccggcccaacaatgtgtcagtgacgtcacctggggtgcagctgaccgtcaccctgcacaacgtgccagacctcagtgcgggcgtgagctgcgccttcgaggcggcggcggagaacgaggcggtcctgctgccctccggtgaactgctctgcccctcaccctccctccaggagctccgagctcttaccagggggcatggggccacccgcactgtgcggctgcagcttctctccaaggagacaggcgtgaggtttgccggtgctgactttgtcttctacaactgcagcgtcctccagtcgtgcatgtcctgtgttggcagcccttacccctgccactggtgtaagtaccgccacacgtgtaccagccgcccccacgagtgctccttccaggagggcagggtccacagccctgagggctgccctgagatcctgcccagtggggacctcctgatccccgttggggtcatgcagcctcttaccttgcgggctaagaacctacctcagccgcagtcgggccagaagaactatgagtgcgtggtgcgggtgcaggggcggcagcagcgggtgcctgccgtgcgcttcaacagcagcagtgtgcagtgccagaacgcctcgtactcctatgaaggtgatgagcatggtgacaccgagctggacttctccgtggtctgggatggagacttccccatagacaagcctcccagcttccgagccctcctgtacaagtgctgggcgcagcggcccagctgtggcctctgcctcaaggctgatccccgcttcaactgtggctggtgcatctcagagcacaggtgccagctgcggacccactgcccggccccgaagaccaactggatgcacctgagccagaagggcacccggtgcagccacccccgcatcacgcagatccaccctctcgtggggcccaaggaaggaggcacccgggtcaccatcgtgggtgacaacctgggcctcttgtcccgagaggtgggcctgcgggtggctggcgtgcgttgcaactccattccggccgagtacatcagtgctgagaggatcgtgtgtgagatggaggagtcgctggtgcccagcccgccgccggggcccgtggagctgtgtgtgggtgactgttcagccgacttccgcacgcagtcggagcaggtctacagctttgtgaccccaacgtttgaccaagtgagtcccagccgtggcccggcgtccgggggcacacggcttaccatctcaggcagctctctggatgctggcagcagggtcacagtgactgtragggacagcgagtgccagtttgtaaggagagatgccaaggcgatcgtgtgcatctcacctctctccaccctgggccccagccaggcccccatcacacttgccattgaccgggctaacatctccagccccgggctcatctacacctacactcaggaccccaccgtcacccgccttgagcccacctggagcatcatcaatggaagcactgccatcactgtgagtgggacccacctgctgacggtccaggagccccgggtccgtgccaagtaccgcggcattgagaccaccaatacatgccaagtgatcaacgacactgccatgctgtgtaaggcccccggcatctttcttgggcggccccagcctcgggcgcaaggcgagcaccctgatgagtttggcttcctgctggaccacgtgcaaacggcccgctccctcaaccgctcctcctttacctactaccctgatcccagctttgagccgctggggccctctggcgtgctggacgtcaaaccgggctcccacgtggtgctgaagggcaagaacctgattcccgcggcagccggcagctcccgcctcaactacactgtgctgataggaggccagccgtgttcgctcactgtctcggacacacaactcctgtgcgactcacccagccagactggccggcagcctgtcatggtgctggtgggtggcctggagttctggctgggcaccctgcacatctcggcagagcgggcgctgaccctaccggccatgatggggctggcggcggggggtgggctcctgctgctggccatcacagccgtgctggtggcgtacaagcgcaagactcaggacgcggaccgtaccctcaagcgtctgcagctgcagatggacaacctggagtcccgtgtggccctggagtgcaaggaagcttttgcagagctgcagacggacatcaatgagctgactaaccacatggacgaggtgcagatccccttcctggactaccggacttacgccgtgcgcgtgctcttcccgggcatcgaggcccacccggtgctcaaggagctggatacgccacccaacgtggagaaggccctgcgcctcttcgggcagctgctgcacagccgcgcgttcgtgcttaccttcatccacacgctggaggcccagagcagcttctccatgcgcgaccgcggcaccgtggcctcgctcaccatggtggccctgcagagccggctcgactatgccacggggctgctcaagcaactgctggccgacctcatcgagaagaacctcgagagcaagaaccaccccaagctgctgctacgcaggacagagtcagtggctgagaagatgcttaccaactggttcacgttcctgctgcataagtttctgaaggagtgtgctggggagcctctcttcctgctttactgtgccatcaagcagcagatggagaagggccccattgatgccatcacgggcgaggcacgatactccctgagcgaggacaagctcatccgtcagcagatcgactacaagacactgacccttcactgcgtgtgtccggagaacgagggcagcgcccaggtcccagtgaaggttctcaactgtgacagcatcacccaggccaaagataagctgctggacactgtgtacaagggcattccgtactcccagcgtcccaaagctgaggacatggacctggagtggcgccagggccgcatgactcgcatcatcctccaggatgaggatgtcaccaccaagatcgagtgtgactggaagaggctcaactcactggcccactaccaggtgacagacggttccttggtggcattggtgcccaaacaagtgtctgcctataacatggccaactccttcaccttcacccgctccctcagccgctacgagagcttgctccgcacggccagcagccctgatagcctccgctcacgggcacccatgattacgcctgaccaggagacaggcaccaaattgtggcacctggtgaaaaaccacgaccatgccgaccatcgcgagggggaccgtggcagcaagatggtctccgagatctacctgacacggctgctggccaccaagggcacactgcagaagttcgtggatgacctctttgagacagtgttcagcacagcccaccggggctcggccctgcccctggccatcaagtacatgttcgacttcctggatgagcaggcggaccagcgccagatcagcgaccccgatgtgcgccacacctggaagagcaactgcctgccgctgcgcttctgggtgaatgtgatcaagaacccgcagttcgtgttcgacatccacaagaacagcatcacggatgcctgcctgtcggtggtagcccagaccttcatggactcctgctctacatccgagcaccgcctggggaaggactcgccctccaacaaactgctctacgccaaggacatccccaactacaagagctgggtggagaggtattatcgagacattgcaaagatggcatccatcagcgaccaggacatggatgcctacctggtggagcagtcccgcctccacgccagcgacttcagcgtcctgagtgcgctcaacgagctgtatttctatgtcaccaagtaccgccaggagattctcacggctctggaccgagatgcctcttgtcggaagcataagttgcggcagaaactggaacagatcatcagcctcgtgtccagcgacagctaaggtggtggaatcggtgaggagggggcttctcagtcctgtgccgtcctcccatccaggggagtggctggctcaagcctgggtccccgggctgagccctggattgggtatcgtggggcaggtcaccctggccacgatgcccccggcacacccaggcccccttcattagtgccttgctttgggccctgcagggggaggggtgacagggcgagcccccaccccagcagcagcaatacccccaccctcctgccctgtgcccaggtgttgggacagtcccaccctccctgctatttatatccctctgcctatttattgaatcgaacttcgcctctgtctccatctgtaaatatgtgtccccccaccggatgtcgccaccctcactcacctgcctcttcttgagctgtcctgggccctgccacccgtctgggctcctttgtgtagcattatcagcctcggtctggcctctggcacctcacccttgccatggctgaccccacccattccaaggcggggtcacggtaccagcagcacttggggtgaggcctccaaagcttcctcagaattgtggctgtgccacgctggaccacagggtccccctcaagcatctcggggccctattctctctgagcacctggagggctggactcaggcttgtgccagggcctgacttgggcctgggggccctagaacactcctcctcctgagcctactgccaaacgtcctcagtgttgtctgcacctgctccgactccttcagccgccccattcagcgcccgctccgtccagtgcccgccctgtggggccaaggcggccgtgccttactactctgtgtcttctgcctcctctgaggaatctggccctgtctgacagtcccagaccccccgttctctcctctttagttgcatgagtttttctttgttcatggaatgttttttcctgattaaatgttggggaaatgccaaaaaaaaaa

SEQ ID NO: 64777 - DNA, 566 bp, Homo sapiens
cgccccccgagcaccccttctttgtatatggccagggttggtcctcttgcagccctgggcggacgacacaactcttctctctgccctgccatcggttacaggtgggagatgtctgcatctctatcagtttacagagcttgaacagtaactcagtttctcaggccggctgtgctccctcaagccagctgggtcccccccgagaaaggcctgagaggacggtcttgggatccagagagctatgtgacagtgaggggaagagccagccggcaggagagggctcccgtgtggtagagccttcccagcttgagtccggtgctcaggcctgctggccagccccgagcttccaaagatacagcatgcaaggggaggaggcacgggctgcgctgctccgtccctctttcattccacaggaggtaaagctgtccattgaagggcgctccaatgcgggaaaatgaacctcttccccagaccaggactggggctttaccccagagcctcgcctcgccgccgtgagcaggcagaggatttgcacacgcccgagcaaggaatgggctttctggcagtgg

SEQ ID NO: 64778 - DNA, 902 bp, Homo sapiens
tggtctgtactatggggagactgctcagatccagtcccacatcagcgacacgtccatcatcctgtccatggacaacaaccggaacctggacctggacagcatcattgctgaggtccgtgcccagtatgaggagatcgcccggaagagcaaggccgaggccgaggccctgtaccagaccaagttccaggagctgcagctagcagccggccggcatggggatgacctgaaacacaccaaaaatgagatctcagagctgacccgtctcatccaaagactgcgctcggagattgagagtgtgaagaagcagtgtgccaacctggagacggccatcgctgacgccgagcagcggggggactgtgccctcaaggatgccagggccaagctggatgagctggagggcgccctgcagcaggccaaggaggagctggcacggatgctgcgcgagtaccaagagcttttgagcgtcaagctggccctggatgtggagatcgccacctaccgcaagctgctggagggcgaggagtgcaggatgtccggagaatataccaactccgtgagcatttcggtcatcaacagctccatggccgggatggcaggcacaggggctggctttggattcagcaatgctggcacctacggctactggcccagctctgtcagcgggggctacagcatgctgcctgggggctgtgtcactggcagtgggaactgtagcccccgtggggaagccaggaccaggctggggagtgcaagtgaattcagggactcccagggaaagaccttagctctaagctcacccaccaaaaaaaccatgagataaaagtgcaacacagcccatttcccagtagtctgccttgccctggcagactgctccggactcttctaggaaattcctctgtctc

SEQ ID NO: 64779 - DNA, 1762 bp, Homo sapiens
ttttttttttttgaatgacaaaagcattttattgaagattcacctgcagatggataagagggaatgagaggagtagaatgggacactaagtggttctcatcctaagcttgcagggccaagtgctgccgggtgttggagaagtagttttggttctgatgtaaatggataataccaggatctagtggggagatggcattggactgggaagggacatatgtgaccccaataatttctggagatgacactcctggtcattttcttctctgcccatgggaggtgagaggtcagctgacatccttcccattccaggtgggtcaccaggcccaaatcaagaagtagctaccaaactccaagaggcagagtccctgtcccagcacagaagatcatcctggggcagagagagcccatgggatagtggaggggatactagtaagatgagccccagagacagaggatggaggtgaagtgaaggaagcacagagacaccagtgctgggcccagctggacacagtgagctgcagggacctcgtctcctctatcgtctcttgttcagggtggtggtagagatgatcttgctgctggaactgccagagacactgccaccaaacccaaagccacttccagagccggagccaaagccactactcaggccaaacccggagcccattcctaatcctccgctgatgcctccagtgctggtgctaccgctgaccacagagatgctcacggcactctggcattctccagacattctgtactcctcgccctccagcagtttgcggtaggtggcgatctcgatgtccaaggccagcttcacactcatgagctcctggtactcacgcagcattcgtgccagctcctccttggcctgctgcagggcagcctccagctctacgcgcttgctgtgggcatctttaagggcattctcacctcgctgctctgcatcagccacggatacctgaagagtctggcactgcttcttgatgttctcgatctctgcccgcagcctctggatcatcctgttgagctctgcaatttcactcttggtgttcttcaggttgtcaccatgttggtcaaccgagatctggagctgctggaccttggtctggtacagggcttcagcctcagccttgctcctctgggcaatctcctcgtactgggcacggacctcggcaataatgctgtccaggtccaggttgcggttgttgtccatggaaaggaccacggacgtgtcgctgacatgggtctgcatctgggacagctccgcatcatagaggaccttcaggaagttgatctcgtcattaagactgtccaccttggcctccaactccaccttgttcaggtaggcagcatccacgtccttctttaggaccacaaagtcattctcggctgctgtgcgtttgttgatctcctcttcatacttagtcttgaagtcctccacgctgtcctgcatggtcttcagctcagactgcaggcgccctttgtcattgcccaaggtatctagctgcttcctcaggacactgaggtaggtctcaaagaggggctcaaggtttttgctggaggtggtggtcgtctgctgctggagcaggttccatttggtctccaggaccttattctgttgctctaagaactgcaccttgtcgatgaaggaggcaaacttgttgttgaggagcttgatctgttcgcgctcttccgtccggactttctggatctcagggtcaatctccacgtggaggggggtgagcaagctctggttgagtga

SEQ ID NO: 64780 - DNA, 1935 bp, Homo sapiens
tggctctgcagcaggaagcacctacgaaccatcctccatgcgactggaggccttacaggtattgactcttctggcaaggggctacttttcaatgactcaagcctacttgatggagcttggagaggtgatttgcaagtgcatgggggaagcagatccatccattcagcttcatggagcaaagcttctggaagaactgggcacaggcttaatacagcagtataaaccagactccactgcagcacctgatcagagagcaccagtcttcttggtggtgatgttctggactatgatgctgaacggtcctttacccagagccctgcagaattcagaacacccaactctccaggcgagcgcctgtgatgccctgtcttccatcttgccagaggccttcagcaatctgccgaatgacaggcagatgctgtgcatcacagtgctgctcgggctgaatgacagcaagaatcgcttagtgaaagctgcaacttcacgggccctgggagtctatgtgctttttccctgtctcagacaggatgtcatatttgttgcagacgcagcaaatgcaatattgatgtcacttgaagacaagtctctgaatgttcgagccaaagcagcctggtccctgggcaacctgacagacactctgattgtcaacatggaaacaccagacccaagtttccaggaagagttctctggtctcctgctcttgaaaatgttacgatcagctatagaagcatccaaggataaagacaaggtaaaaagcaatgcagtccgggcccttggaaatttgcttcattttctgcaaccctctcatatagaaaaacccacatttgcagaaatcattgaggagtctatccaggccctaatttctactgttctaacagaagctgccatgaaagtccgatggaatgcttgttatgcaatgggaaatgtatttaaaaatcctgcccttcctttagggacagccccatggacctcccaggcctacaatgccctgacatcggtcgtgacatcatgcaagaacttcaaagtgcgcatcagatctgcagctgccctttccgtcccggggaagagagagcagtacgggtctgttgaccagtatgctcggatctggaatgcattggtcaccgctttacagaagagtgaagacaccatagactttttggaattcaagtactgtgtcagcctacggacccaaatctgccaggcactgattcacctcttgagcttggccagtgcctcggacctcccttgtatgaaagaaacccttgaactgagtgggaatatggtccagtcctatattctacagtttttaaaatcaggagcagagggagatgacactggagcaccccacagcccacaggaaagagaccagatggtcagaatggcccttaaacacatgggcagcatccaggcaccaactggagacacagccagaagggccatcatgggctttttaggaagagatcctggccgtttgttttggactcatctggtttcacaagggggcactcccagggttaacaaatccagtgaagatccccacccatactttcctagatgtccgaaggcggcagtaggaaggacctgaagcttgagcataagcatctgtgggatttcatccttcggggcagaaacaatccgttcacgtatttatttagaatgaccttagcagcccatttaaattttcacagagggctcaacccacctttggagtgactcccatagcactggccatggtcagggttgttggaacatctgacctgtgcatcccaggagccgaggagtcaggttgtaataccaggccaagcagacgggctttgagggcatttagtctcagaaaaaaaaaaatgtagaaggatttcggaattagaattttgtgtattgtatctgtagttttgtaataaactaacgaaaaatagtgtgtccccaaaaaaaaaa

SEQ ID NO: 64781 - DNA, 1293 bp, Homo sapiens
ggctttgggaggggagccctgatccgcctgaatatctggccggcggttcaaggggcctgcaaacagctggaggtctgtgagcactgcgtggagggagacagagcgcgcaatctctccagctgcatgtgggagcagtgccggccagaggagccaggacactgtgtggcccaatctgaggtggtcaaggaaggttgctccatctacaaccgctcagaggcatgtccagctgctcaccaccaccccacctatgaaccgaagacagtcacaacagggagccccccagtccctgaggcccacagccctggatttgacggggccagctttatcggaggtgtcgtgctggtgttgagcctacaggcggtggctttctttgtgctgcacttcctcaaggccaaggacagcacctaccagacgctgtgagtacctggccagcagcaagtacctgagtcccagctcacctcctggttcctgccccaccgttccccttcagtacccagggtgctgtcttctccatgggcaagccctcaggacggtgacagcgtgctccatgtgagccacaccccttttgtctcctccagttggggtgtttcctttgtcagatgttggctgggaccaggactcagcctgggccagtctaggagcccagctgagccctcctgtgtcttttcccttcatgctgccagcagggaagagaaccagtaggtgccagcccaggcaagcctgtggcccgcgtttctgtggctgtgggcaggagctgggccttgtgtctagttgggttttgctctgagaaggggagctgtgcctgaggccctctgtgtgccgtgtgtgctgtggggcgggtcgccacagcctgtgttaaagtgtttgctcttcctctgctgcctcctctcgaggcagggggtccttggctggctgaggcagtgtcaccttcctgagtgtcctctttggcctctgcagaatctgacccctttgggcctggactccatcctgaggggaaaggaggatgcagagggtggcctctgggcacccttgtgggtaagcggggggcgggggcgggaaaaactctggccgccagtttttggctcctgcgggcaccaagcaggccaagtgtttaatgcctgacatctcctcctgtcctgggcctggaacctgcagctgagaaaatccctcaaccacctcgtctcctccatcgcccctgctgggccccccagccctgacagtgggttgtatgcctgcctctttccaccaactggcctgggcactgcccccaaataaaggaactctgcactgcaa

SEQ ID NO: 64782 - DNA, 1890 bp, Homo sapiens
ttttttttttttggtaaaatagctttatcctctgtcagaacacaaacaaacaaactttgagaggggaggaaggaaaccgtctagctcagggctcacttaggagagggatgagattagaaagttcaacacactgcttgtgcagctggagataaagtcaagaccctagcacccacttataaatatctcgttatattaaaaaaaaaaaaaatgtccagggcccacctggctctgctcctgcacagaaagggttcatcttcactttgtgatctcacaggtcatggagtgagggtggtagagaggggcagaaatttcagggggaggggtggctgggaaaaagtaaaggggacaagccaatgtgtaactagcgctctccaagacatgcagaggagtgggggtggcctgtcaggggctgaaaagaaaagccagtgctgtacctggggggttgtctcactcctgtccccacaatccctgatactccggagtgatctgtcctttcagacacccactgtgaggtcccaatatcggggtttatcctttcctcagtcccagcctgttcagctctccaaccaagttttgggggcccctctaatgggggggatggccccagttgcttaggcctctgaggtcaacccctttacatcacagccctctccccaaataagaagcatgaggtgagctggaggaccctccctgggaggagggtgttctggggggtgagccagttttggggtcccccttcagtccctgaccaggcggtaaatgtgatgctgggccccacgctcgctggtggagacctcgaagacataggcggtgcagagcagcagttcctgggtgtctctgtttgtcaccacctggaggatggtgaagttttccaggacgctgttcatcatgtatcgctcaggcagctgccgcaacttgtgcaagaagttcaccaggtactcgcacatgggcgagcgcagcaggcggtacacaaatctgccgtcctccagctgggcccgttccgtctccaccttctccaccacctgcttgccaaaagagcagaccttggaggaacaggtgagggtcatgtgttccaggctctcatactggctgctcactccgtagaagccaccactgctgatgctgccaccggcccctgcctcctcaccacttgggccccagttcaggtccgcccagaacttgaccaggaagaaggcatggggggggccacgatcatatagctctcggaggccaccctttttctcagggaatttgtcgtagatctgccggacgtccacactctcgagcggcggcgctccggggctggggcagtgctggctgatgtgcacgaacaggtgcctctggtaagaatcaactgcatctggcggttccacgaaggctgagaactctaccagctgcaaccgggcggtgcccaggccccgagcctgccaggctgggggcgatggggtaggtgggggcaggggtgagagggcttgggggggctcgtaccctgggaggtcagtagatgggggagtcagtgacaaggtgaacggtgtctgtgagaatggcttcacatctggaacattccaggggggcccagatcctccagaccaaaactggaaaagctcagaggcctggaccacctgaggaccagtgggacccagtttggcctgcagagaaggcgcggagatgagctgggcagaggacatggttgccattgtctggaaagccttgtccttggaaacctggtccacgttcagagccttcaacttggactggatttcccttgatttccttcgggccaaaccctggatgtgactagaaacctgttttcgagttcgggtcttccccgttctcagcttgatgtagcgggcgatcagttcattccgaccatacatcttgccttcatca

SEQ ID NO: 64783 - DNA, 1046 bp, Homo sapiens
  misc_feature (1)...(1046): n = a,t,c or g
gggctcagacaggtctgaccagtctttaatgggcaggcaggtgcccgaggcagcctccagcatgaggcgggacaggcattgcccggaggtcctctgggtggggagggcatgctcggtgcttgctgccagctggagccagggctgaggcgtgcagggatccctggccctcacggccaccctgggtgcttcaaggatgagggcggagctggcttcactggggcacagggctgggggcagcctccagtcttgccctgctgggcctttcggctccagttgaggaggggccggggactggcccacgtggatgccggggtcttgcaaccatgctccctctggctccttagaagccccctggggcccagcaggacgggccggcggtcccccaagctgggcagtctagagctgggcagcagcgacaccacctgcaggctggcgcccgcctctcccgcagccttcagctccgtcaccacctccgcgtgtctccaccacctgcatggctgcccattcactgacacaatgtagtcgccctccttcaggccagccgccgcggcctggctccctggaatgacggcagcgatgaggacaggcgagtctccccgaagcgtgaggccaaagccgccctctcctcgggtcaggtggacgggccccaccagccgccaccggttcttggctgagaacacagacaggggcccctggcaggggctcagaggtcagaggcccagctgggccacacactgaggagaccccacctgactagcacatccatccaacctgtgcaccgagggacaccgtggggttccacaaggtgggtggggagggctggaccaccatcaatggcctgtctgaggccatgtgctggtcagagccacacagcccaagctgcccatgctgggcggtgcctggggacgggtgtgctcaccagccgatggaagatgtcaggccccttcccctgggacaggcgtggcatcctggcctctggnnttccnccgcnctggcgcagtggactcaggtttttcaattggngggggngccctggaaccataaca

SEQ ID NO: 64784 - DNA, 1020 bp, Homo sapiens
agctgtgtaaaatatttgttgtgcttgtttagaattgaattgtaatgttctaaagcgagcaattatttcttaccatggaagctgccaaacctctaatacttctatactttgccagtgtgtctaaattgcaggagatattggtaccctaagcagaacagacacaaccttctcagacacaggaggatgaccctgtttctaaatagctgcacagtctagttctctctcctgtttactcgttgttagtttagttgtctaagactatgcgcttgctgaggacagtcatttttgaattctccagcccctatcgcagtgtctggcatgtgatgagagaacaggaatatttgttgaaaagtgaaaatgcatattccatcccatcctgccccctttcctccctctccctccttcttcctaccctcacactaacctttgggttttgctttctaggcaaagcaggaaaaatgccagctcggtctcccaggactcttgggagcagaactactcccctggggaaggcttccagagtgccaaagagaaccccaggtactccagctaccaaggctccaggaacggctacctgggaggacatggcttcaacgccagggtcatgctggaaactcaggagctccttcgccaggaacagaggcggaaggagcagcagatgaagaagcagcctccttccgaggggcccagcaactatgactcgtataagaaagtccaggaccccagttacgcccctcccaaggggcccttccggcaagatgtgcccccctccccttctcaggttgcgaggctgaacagacttcagactcctgagaaagggaggcccttctattcctgagcacgcaaataacggatgcttcatgtcgcgcaataaaagacattttcctatgaagacttgtattttgggagtttttttaaaacctcgatggtactatggagtatttctgttgttggtatcagtgcctttaagcggtgtaggcaaagaaatggaaggccttaatgtctttgccactatgtctc

SEQ ID NO: 64785 - DNA, 1476 bp, Homo sapiens
agggaggagccctcacagacatcgtctcccaagtcaggctgaatgaggagcagattgccactgtgtgtgaggctgtgctgcaggccctggcctacctgcatgctcagggtgtcatccaccgggacatcaagagtgactccatcctgctgaccctcgatggcagggtgaagctctcggacttcggattctgtgctcagatcagcaaagacgtccctaagaggaagtccctggtgggaaccccctactggatggctcctgaagtgatctccaggtctttgtatgccactgaggtggatatctggtctctgggcatcatggtgattgagatggtagatggggagccaccgtacttcagtgactccccagtgcaagccatgaagaggctccgggacagccccccacccaagctgaaaaactctcacaaggtctccccagtgctgcgagacttcctggagcggatgctggtgcgggacccccaagagagagccacagcccaggagctcctagaccaccccttcctgctgcagacagggctacctgagtgcctggtgcccctgatccagctctaccgaaagcagacctccacctgctgagcccaccccaagtatgcctgccacctacgcccacaggcagggcacactgggcagccagcctgccggcaggacttgcctgcctcctcctctcagtattctctccaaagattgaaatgtgaagccccagccccaccctctgcccttcagcctactgggccaggccggacctgccccctcagtgtctctccctcccgagtccccagatggagacccctttctacaggatgaccccttgatatttgcacagggatatttctaagaaacgcagaggccagcgttcctggcctctgcagccaacacagtagaaaaggctgctgtggttttttaaaggcagttgtccactagtgtcctaggccactgcagagggcagactgctggtctccacagatacctgctgttctcagctccagcttcaaacctcgagtctcgagagggccacggggtggtttttatgaccggaatcccgcttcctccctcacgtctgatgtcctgaaggtgcagtcccacctgtacagcccctccccgccaagaactgtgaatggcctgctccaggccatggctgggggcagggagtgaggggacaatttctgagtgaaagagaaagaatggggtcggtggtgaaggtgctctcactttacagaatggagagaacatcgtgtgtgtgtgtgtgtgtgtgtgtgtgtgtgtgtgtgtgtgtgtgtgtaaggggaggaaagccaccttgagagtccaggtctctataggtcacccacagacagtttgaggagggctgcctctctctcccactaatttctggcctgaagggacctgctttattggtgtgtcttccacctctacactcgtgtgtatacctggcgagtggagtggtccacgctatgtctca

SEQ ID NO: 64786 - DNA, 1687 bp, Homo sapiens
gcggccgcatctggctcctccagggattcggcggcggggctgccaggctgaggctcggcgtcgcggtcctcgggagggcccctctctgctccaggtgcactcatttcatccgtcgagcctttcagtttgttgctaagcctgaaggtctctaagattttgtcttctgggagagacagcaaaggagcaggcatcaactttccaggaagaccgtttgccttagcaaagggattttctgagtgcagggcaggctggccttggcagctgggcaccatcaggcgctaggccgttttctttcgggtcactgtcgctgtctgcactattagcaccgtttagggtcatgggttcttgaagctcgtgcggagtggcctcctcatcttcggcatcttggccgggagagtgggagctcacaatcgtaccaatcccattctccttgcccagcccctttgactcctcgtcagagtcctcagaggactcggcgccatagggcaccagcacgctggagttcagcttggatttgccattcatcacgggctgggagcaggattcactgcgggggatcggttttgttactttactagaaactgacatcgtagatgcgttcgaggtagactgtactgcagaattggtaatggtagaaaagggaacgggcttggtagggttctccaaagaattactatgaaggttaggttgagactgacactggcgaacaggcaacttgttgtgaatactgattgtaattttttgtttcttaggatgttctgggatcactgaggacctattaactgaccagttttggacagaagctgaagcattaacaggactagccctgttgacactggaattcccgttaggactcgacatggaactgcttggcgtgtctttcaatggtccagtcccatttaagtgaggtggattctttatcatgtgagagggaagctgtggtccgataaagcctggcgcagcctgtttgttggtgacaacccgctgactgatgacggggcggggagaggactggccggggctatgggtgggatgagtaagttcacctccatttttcacatcatgggacctgatataaaagagcacataggcttgttggctgagtaccgatctaatatcactggtagatacaatggagtcattcatttgataccagaggccattgctagcttttatgtagcagaagtaatggccagcatggcaattaaaaccagtgtggaccagcactgcatacaagacgtagacaattggctctccgttgggttgagacatatatggccgaatatcaagatactcagggtatttcacatccttagcaatttttccaccggtaaaatttgcaaaacgtttcagagaaagtgtaagaacattagaggatctatggatagtgaacctctttgaagctggaaccatctttttacacttgctgcacttgtacgagttttctccatcaagctgttccggcttcacaaactgctccaatgccttgttgacactctgagcagcctttatctccaatgttatatcaagatatggatcaaaagtatctgaaacgcccttgcaatttaaacatttgactctagatcttaggtatcctccaaatatctgacaaacaagagtggtggcctgggtgtgtctgtctaatttattgctgccattcaagcatgccgacgcgtgggtcgacccg

SEQ ID NO: 64787 - DNA, 789 bp, Homo sapiens
ggtttaaaaaaatcattcttaccaccaatacagcaattaataaagttcctactctttggaatttattcactaaataagcaccaccttttaaaatctactccattagaactctaccccacaacctccccaccatatatatgcaagtccatataaatccaaatctcaaaaagctgatatacaaaccactcagaacatttttcgtgaaatatctgttttaattcagcagtaaaaggcagcacatgatcagaaatatgtagggttgtgaaagagcttgccaggaaatgagagctgttgcacagggtatcagcaactgtgtacagcttggcaaggttttcagtcctgtcctccagggaggatcttgacttctcagttcccacttcaggaatacatggtcaactgcagccactctttgatagacacttgaatcaggccatctctatctctatccagagacttgaaggcacgaaacatggcatccaggcggaccaagcagctgatgaaattgttaaaatccatatctccatcttcattagcataccggcggacaatcatttggtaaagttgttcatttagctggaagcctgcggcctgcagagctccccgcagctgagaacttcccagagacccagaatggtccctgtcatactgcttataaacacactgccatttcttgatgttgttccacagatacttaaattcttcaaagcccagcttaccagtcgtgtcactgtccatgacagacacaatgctccggcaggtgtcaagactaaaaccgtcagtcttaagatc

SEQ ID NO: 64788 - DNA, 2142 bp, Homo sapiens
aaggaaatcagcaagagaaagaaaggtctgtggatttaaactttcttccatcggttgatcctgaaacagttcttcagacagggcatgaattgttgtccgaattacagcagcgtcgatttaatggctcagacggaggggtttcatggtctcctatggatgatgaacttcttgcacagccacaggttatgaaattattagattcactccgagagcaatatacccgctaccaggaagtttgtaggcaacgtagcaagcgcacacagttagaagagattcaacagaaggtaatgcaggtggtgaactggctaaaagggcctggatcagaacaactaagagcccagtggggcattggagactccattagggcctcccaggccctacagcagaaacacgaagagattgagagccagcacagtgaatggtttgcagtgtatgtggaacttaatcagcaaattgcagcactcttgaatgctggcgatgaggaagatcttgtggaactaaagtcactgcagcaacaacttagtgatgtttgttatcgacaggccagtcagctggaatttaggcaaaatctcttacaagcagctcttgaatttcatggtgttgcccaagatttgtctcagcagttggatggcttattagggatgttgtgcgtagatgtagcaccagctgatggagcatcgattcagcaaactttaaaactgcttgaagagaagctgaaaagtgttgatgtgggattgcaaggtttgcgtgaaaaaggtcaaggtctcctggatcagatctccaatcaggcatcctgggcctatggaaaggatgtaaccattgaaaataaagaaaatgtggaccacatacaaggagtgatggaagatatgcagcttagaaaacaaagatgtgaagacatggtagatgtgcgaaggttaaagatgcttcagatggtgcagttgtttaaatgtgaagaagatgctgcccaggcagtagaatggctaagtgaacttctggatgctctgcttaagactcacatcagattgggcgatgatgctcaagaaacgaaagttttgctggaaaagcatagaaaatttgttgatgttgcacagagcacttatgactatggcaggcagttgctacaggccacagttgtgttatgccaatctttgcgctgcacttctcggtcatctggggatacacttcctcgactgaacagagtatggaaacaatttacaatagcatctgaagagagagtacatagattggaaatggctattgcatttcactcaaatgctgaaaagattttgcaggactgtccagaagagcctgaagctattaatgatgaggagcaatttgatgaaattgaagcagttgggaaatcacttttggatagattaactgttccagtagtttatcctgatggaaccgaacaatattttgggagtcccaagtgacatggcttctactggcagaaaacatcagagacaggatgaaactagttaatctcaaaaggcagcagctgagacattctgaaatggtgaccacagagagctaatagctaccagctacctacagatttgcagttcataatcccgcatgttgtcaacatactacagcattagccaccacaccttaagatgcatttcacagccaaaataagtctcatttcttttcatgacacatttctctttacatgttaacaccttgctactaccaaggcataattacttaacatgcttcgaggctgtagattccaagtatcttaaaagaaggaactataaacattgcactgaaaacttgctttaaagctttacctgacctgtcagtttgtagacaaacaactgataataagctttgaatggtgctaataagagtaggaattctctctattaaaaagaaaaaaaaaagttgcccttcctccacaggtgatttattaaatttagacagtagttaaactcttgttagtagacaggggtgtcctcaaaattttactttgtaattcttcaaaattgattatttttattgtgtcaatacagagaaagcctttcagatctttgatatatcatagtcattaaaagaccttttcctatttgtattgataatgtattaaaagttgtttgtgcttaataaaagacttctttaaacatcttaaaaaaaaaa

SEQ ID NO: 64789 - DNA, 922 bp, Homo sapiens
tttttttttttttgacttgcaacaggaagaacttttattgaaacaccaccatagagaaaaagccaaagaaatggtactattctaaaaataacttgtcttaattcattggaagaaaagcagaaaaataaggggacccttatttaggaaactagcttcattttggtattttaatttgggggccattctgtctcagaggctggagttcaggaagacaccctctgttcattcttgttgttgactttggtggatttctcttccacagtgtgaactctggatgagagaactttgccacgaggatctatctcttcaacaactgttttgacaatggtggttttagatgaatcttttgtttgatttcctgggcctccatagccttttgatttagaacaggagccatcttctccatctatcaggaggcagtaggtctcaatttctttttccaggtggaccttgatgtcaaggagctgctcatactcgagcttctggccctcggtctcggttctgacctggtgcagctgctcctccagggccccgatctgagcctggatctgtgccagctgtgcacagtagttactctcggtctctgtcaaggagcactccagggagtgtttcgttgctaagagggactgaagttcaatctcaagggtttgaagagtgcgtttcatctcggtaagctcattccgggctgaggtggtggcgccagcgtcgtcagagatctgctgctgcagcgaggcgctcttttcgttgaaccaggcctccgcgtccctgcggttctgctctgcgagggcttcgtactcagctcgcatattgttcagcagaaccgtgaggtctaccccgggggccgcgttcatctccacgttcacgttgcctccagccgcgcactgaagagctttcatttcctcctcatgattcttcttgagga

SEQ ID NO: 64790 - DNA, 2891 bp, Homo sapiens
cccacgcgtacggccaggtgggagtgaagattgtgatgtgttggaggccacccagcccctggaacaggggttcctgcagcagctggaggagggccccagcagttctggacagcatcagccacagcaggaggaggaggaatcaaagccagaaccagagaggtctggcctcagttggagcaaccgggagaaggcaaagcaggcattcaaggaactgctgagggacaaggctgtcccctccaatgcctcatgggaacaggccatgaagatggtggtcaccgacccccgttacagtgccttgcctaaactgagtgagaaaaagcaggcattcaatgcctacaaggcgcagcgggagaaggaggagaaggaggaggcccggctaagggccaaagaggccaagcagaccctgcagcatttcctggagcagcatgaacgcatgacctccaccacccgctaccggcgggcagaacagacctttggggagctggaggtctgggctgtggtccctgagagggatcgaaaagaggtttatgatgatgtcctcttcttcctggccaagaaggagaaggaacaggccaagcagctccggcgccgcaatatccaggccctaaagagcatcctggatgggatgagtagtgtcaacttccaaaccacgtggtcccaggcccagcagtacctcatggataaccccagctttgctcaggaccatcagctgcagaacatggacaaggaagatgcactgatctgttttgaggagcacatccgagctttggagagggaagaggaggaggaacgggagcgggcccggcttcgggagcgacgccaacaacgcaagaatcgggaggccttccagaccttcctggacgagctgcatgagacagggcagctgcactctatgtccacctggatggagctatatccagcagtcagcactgatgtccgctttgccaacatgctgggccagccgggctccacccctctggacttattcaagttctatgtggaggagttgaaggcacgattccatgatgaaaagaagatcattaaggacatccttaaggaccggggcttctgcgtggaggtgaacacggcctttgaggacttcgcccacgtcataagctttgacaagagggctgccgcactggacgcaggcaacatcaagctgaccttcaatagtctgctggagaaagcagaggcacgggagagggagcgggagaaggaggaggcacgcaggatgcggcgcagggaagctgcctttcgaagcatgctgaggcaggctgtgcctgctctggagctaggcactgcctgggaagaggtccgtgagcgttttgtgtgtgactcagcctttgagcagatcaccctggagtcggagcggatccggctcttccgggagttcctacaggtgctggagactgaatgccagcacctccacaccaaaggccgaaagcatggcaggaaaggcaagaagcaccatcacaagcgttcccactcaccctcaggctctgagtcagaagaagaggagctgcccccaccatctctccggccccccaagcggaggaggcggaacccctcagagtcaggctctgagccctcttcctcacttgattcagttgaaagtgggggtgctgcccttggaggacggggctccccttcctcccatcttcttggagcagatcatggccttcggaaagccaagaaaccaaaaaagaaaactaagaagagaagacacaagtcgaatagtcctgagagtgagacagaccctgaggagaaagctggcaaggagagcgatgagaaagaacaagaacaggacaaggacagggagctccaacaggcagagctccctaaccgttccccaggctttggaatcaagaaggagaagacaggctgggacacgtcagaaagtgagctgagtgagggtgagctggagaggcggcggcggacactcctacagcagctggatgatcaccagtgacccaatgagctgttctctgcctcgggtctgtgtgaggccatggctcctgggccaccctcaccgtctgcctcagacttcttccttagtctggtctgtgtccactttttctaaagtaaccccacccccagcacaccattgttggcacctctcaaggttgctcttggtgttcaagggtcccctactccctggactagtgcagtccttgccctcagccccagaccagagatgggtggtatatgccatgtggggtgggtgatgccagtagataaaagtgtgagagaaggggtctccagggaagagtcacaggctgttggacacagcctgggtggcagagggcagggtcatcaccctctagcatcagtgcctgctcctgcctgccctggccctgaggctccaccacttcttcctccacccaggacctaatgtacgtgtgttttgttttttgttttttaaataacaatatttataacatggccagtgactcttttccatgtgctactggggcaggctggggactggacacatgcccagcagagggcactagtgtctcatggcaggcctgcttccctttgtgtggctagagcccacctagccggttctcctttccccagagttctgatctcatctcctccaaaacagatgcagtgccccaaagatttcttttctatccccatagcccaggtcagactaaatggccaccctagccccctaagctcagaaagaggagacaaagtcaggcctggtgcatcaagcctttgttgagagggggagagtctgaggtttatgtacagtaagaggaaagggaggtggtacatgtacaaaaaagtgggcccccacattcccttccaggggcagaggagaaacgggaaggtaagcaaatagccaagaccaccatgctccttgtcccctgccaaaaaaaaaa

SEQ ID NO: 64791 - DNA, 2214 bp, Homo sapiens
atgcaggcggtccgcgccactgcctctcagtccctgtcctgcgcccgcgcgccccgggagcctacccagcacgcgctccgcgcccactggttccctccagccgccgccgtccagccgagtccccactccggagtcgccgctgccgcggggacatggtcctctgcgttcaggggtgagcacccccttgtaagctcagggctactgttgggtgtcagggaacaaagttttagactgctgcgctccaaagcgggcacacacatgtacctagaacacaccagccactgtccccaccatgatgatgacacagccatggacacacccctgcccagacctcgccctttgctggctgtggagcggactgggcagcggcccctgtgggccccgtccctggaactgcccaagccagacatgcagcccttgcctgctggggccttcctcgaggaggtggcagagggtaccccagcccagacagagagtgagccaaaggtgctggacccagaggaggatctgctgtgcatagccaagaccttctcctaccttcgggaatctggctggtattggggttccattacggccagcgaggcccgacaacacctgcagaagatgccagaaggcacgttcttagtacgtgacagcacgcaccccagctacctgttcacgctgtcagtgaaaaccactcgtggccccaccaatgtacgcattgagtatgctgactccagcttccgtctggactccaactgcttgtccaggccacgcatcctggcctttccggatgtggtcagccttgtgcagcactatgtggcctcctgcactgctgatacccgaagcgacagccccgatcctgctcccaccccggccctgcctatgcctaaggaggatgcgcctagtgacccagcactgcctgctcctccaccagccactgctgtacacctaaaactggtgcagccctttgtacgcagaagcagtgcccgcagcctgcaacacctgtgccgccttgtcatcaaccgtctggtggccgacgtggactgcctgccactgccccggcgcatggccgactacctccgacagtaccccttccagctctgactgtacggggcaatctgcccaccctcacccagtcgcaccctggaggggacatcagccccagctggacttgggcccccactgtccctcctccaggcatcctggtgcctgcatacctctggcagctggcccaggaagagccagcaagagcaaggcatgggagaggggaggtgtcacacaacttggaggtaaatgcccccaggccgcatgtggcttcattatactgagccatgtgtcagaggatggggagacaggcaggaccttgtctcacctgtgggctgggcccagacctccactcgcttgcctgccctggccacctgaactgtatgggcactctcagccctggtttttcaatccccagggtcgggtaggacccctactggcagccagcctctgtttctgggaggatgacatgcagaggaactgagatcgacagtgactagtgaccccttgttgaggggtaagccaggctaggggactgcacaattatacactatttatttatttattctccttggggttggtgtcaggggcgagccaaccccacctctatgccctgagccctggtagtccagagaccccaactctgccctggcttctctggttcttccctgtggaaagcccatcctgagacatcttgctggaaccaaggcaatcctggatgtcctggtactgacccacccgtctgtgaatgtgtccactctcttctgcccccagccatatttggggaggatggacaactacaataggtaagaaaatgcagccggagcctcagtccccagcagagcctgtgtctcaccccctcacaggacagagctgtatctgcatagagctggtctcactgtggccgcaggccccggggggagtgcctgtgctgtcaggaagagggggtgctggtttgagggccgccactgcagttctgctaggtctgcttcctgcccaggaaggtgcctgcacatgagaggagagaaatacacgtctgataagacttcatgaaataataattatagcaaagaacagtttggtggtcttttctcttccactgatttttctgtaatgacattatacctttattacctctttattttattacctctataataaaatgatacctttcatgtaaaaaaaaaa

SEQ ID NO: 64792 - DNA, 1512 bp, Homo sapiens
ttttattttggtagttgtttttatggatgtgaaaaatattaccactgcaactagcaagaactataaatgatacattattgcaagtgttctaaaaaatcaggaacaaaactaatttattatagttctgtcttcattatacaccacgtgttggtgagttaaacacaacaaaattgtcttttcttttaaaagtgtctactaaagataaaaagaataagataacaattaacatgtagtttgttacattaaaaaatctgatatacatatttctattgcctgttagcttgttctaagcctctttaactattacaacaaaaaaaaaaaaggaaagaaaaagaaaattcattgtttaaaggcaaacattcaattcagttgatacaacattacagtacagtcaactaacatcattcaacgaaggtaacaagtctagccttagcttcttgagttaaaagtctatagaccagattgctacaaaagtttcaatgctgcttcaaaaccgtatgttagctttttggaggacaaagtactttctacggatggcttcagaaggggtcatgctactggtaaaagcacaggggaaccccatcctgtcattaatcattttattgagcactgtagttagaacagcattattgagtttagcacaacaactaaaataaaataataatataataacaatcataataatgataagaataaaaaccaaacacagactggaagcctagagtcgctggcagccgtgtcaaacccttgcgatacgctatactaaaaaaatttgaaatatccacccgtcctctccactctgccacaaactagcaaagtcaaaaatacaaaagtcttcaacttgttcacttttgcagaataaagcaaaaacgtctttgtgctccttactaccagaagcaaaatatcctctgagttaccacatgtaatagcttctggatgtgtcgacctgggttggcttggtgtctgcagaaccatctttgtctttctcgctgtcaccttcccagaggttaatgagtggtgggtacagctcatttagtgggattgaagaggttttttgcatatacttttttaatgagtggtggtagttttttctcttaaatcttttggcaaagtacacagcaatggacgcaaggctaatgacggcaaacatagaccccattactgcagcaagggctgtactggtttcttgatcagagatgtccactgcgaaggcggcatttttggttgtgacatttacgcatgacttttgagtctgctgatgaatattggacactgtgagacacacttcataatctgtggaaggctgcagatgcgttaggttgtattcatggacatcgactgggaccctggcagtatatgttatgtgagggttatcaatcttcatggtggcagacgaccattttaagtttgacgtcatgacattggaattaactttccaggacactaagatggaatgggattctgtctgcttgacgtatatttttagcacctgggtaccatccagaagggtcc

SEQ ID NO: 64793 - DNA, 1520 bp, Homo sapiens
tttttcagtagggattctggccaagactccagcaagcatattgagctgataaaagggtaccagaacaagtaccccaaagcagaaatgaccctgatcccaatgaagggagagttttccagaggtcttggtcttgaaatggcttctgcccagtttgacaatgacactttgctgctattttgtgatgttgacttgatcttcagagaagattttctccaacgatgtagagacaatacaattcagggacaacaggtgtactatcccatcatctttagccagtatgacccaaaggtaacaaacgggggaaatcctcccactgatgattacttcatattctcaaaaaagactggattttggagagactatggatatggcatcacctgtatttacaaaagtgatcttctaggtgcaggtggatttgatacctcaatacaaggctggggactagaagatgtagatctctacaataaagtcattctatctggcttaaggccattcagaagccaagaagtaggagtggtgcatattttccatccagttcattgtgatcctaacttggaccctaagcagtataagatgtgcttaggatccaaggcaagtactttcgcctcaaccatgcaactggctgaactctggcttgaaaaacatttaggtgtcaggtacaatcgaactctctcctgacagtccaggcaacacattttgccttttttaaggggagtttacctcattgttggttgttgttatttttattgtattattgttattttattattattattgttataattttattttgttgtcctggtcttaaactactcttggttgtcttcctaagggtgtttgttgacctcaagcaagaagagtctgcagttcactgatgtttcagatttctactgaagtcaatatgttattacttttatataactttatttgagattgagttaaatcatagcaatcaaatgacttttgaaacgcattcatcacaagagacagcttagaagaatgttctcttggggcttaaagatgcaatatcgacttttatttggtttctcaaattcaatgtgatacaaatatttactggtgaaaggtaccacaaaagtgctttatgcttcctatggggaagggactctgtaacataaacttgagttttgtaatttatacaaggacttaaatatataaacaataattttcttcatctttagaatttttaaagtaaatgaatacctatgattgtatgtttattttttaaaaaaagttttaaaaattgaggagttttgttccacaagcaaccggtactggctaccctggtcttatgacaattatgagctcctcacaactgtctgctataaatgcgaatgaactttattttctcaaggaaatatgatttaattaaatattcatgtacattttagaagctttatgaaacaatgtccttcatttgctggcaagaagataaaatatgacagaacctgtttatttaaaataaaacacaggtatagcagtattctttttcaaaaacactg

SEQ ID NO: 64794 - DNA, 2850 bp, Homo sapiens
tttttttttagacccgcagcttttattagccatcgttacagtctctcgtccacaaacactgcccagctcccttcccagggcactttactggaggcaagtgcaaaacactgtggtgctttctattcaaagaaacagaagatgtagctgtggtggtaatggacagcccagctacccaccagttttacagcaggatccgcagtgagcttgatacagatagaggatagatgacggtaaagggggaaaagagtttaaaattatccaagtttccctcttgaaaggtcttttccccaaagcactgtgaagaggactgctgcttaggcaattttctagggacttaaacacaccgatgggaatataaatatttcaaacacaacccctgttacattcttacagctagtttcatcacttaggtctcttcttagcttaaatgatgctccttgaatctgtttggtccttggaggggcaatccatttttgttttctgtaatattgacaatcaccttctttaatgcagctataacatcaaagctctgttaggttacttaacccttcactcttaaactaaaagttttcattatcatctcacgtgaatccaatgtgcaggttttgcttgcttatttaagaataaaacaaaacaaacataaagggttgaaaaacaaaaactctgctttttttttcttcaagaggaaactatgtaagaatacataaaaggcaaagttggctacttgaaatccaagaatggttttaatgtgttggccgagaaaaataaactgtaaagttctgtgaggtcttctaaaaatttacaagaaaaactgatgggcagttctaatcagacttggatgttatcttttcccccctttttaaaaatgacaacagatacagttccacaaaatacaatagaaactgtttttttatcttgactgccagagacgctcctttgcaatgccttccggtaaccaaatttttgggcacaacacacagctggccttcatttcttcaggggctggtaaacagaggcattggggtcaagtccagaggggctggtctccacaaatttgggaagtagtagtgggggggaaaacaggggctcagggggctgggtggcgggcactgtatgttatggctgggcatgacggcccatgacttcggctatcttctgttttaggtccttgatttcctgatctttctgaaggatttgtccttgggcaatctcgagctgccgctttgcatcgcccagtgcggagaacaggtccagcttgattctcgtctctgcacttaagctgttctccaggtgctgtgttttgtcttgcatggctgagagggctgacattaacacctcagtgtccttctcattttccttatatttccgaagctcctggacttttagttctagttctctgatttggtcttctttcaccttcatgtccatcgtgagcttcttgccctctgcttctagttctctgatccgattccgtaaggtttcggtgcattctcccctagatgcagcagcaaacgcaacagcccgggcagcagtggcttcttctaacttcttcctctttttctcttccattaactgtttctctacaaaacttcgggcttcctgctcagcttttagctttttctccaactggctgatattctgcttgtctttttgcttcatttgcacagcattatgtaacttgttctgcagcagctcgttctcctgccgaagctggcccatttctgagcggatccctcgctcggtgctcgaaagggagctgatctgactgcggagctcttgttccacttgtctgctggcttgcaggtcagcctttaactttttaatgtcttgttccagcctgaccagtgcgtctggtttgcttagctggttattaggaatacagttttccattaagtccttgtgtgtacttgggctcttgctagtgcatttctgcttcttctcatttttactagatgaggaaggaatgctcccatttgtggcgctatgacttcgaggtgaagagttcacaactccactggcatttttgtaattttttgaggaagcagtgcatgagtcctctttcaagagattttctgtacttcccacaagatcattatttaatcttttactattgatatggttttccatatactcaatctcttgtattttagagtctacaggttgtagaatattgttgttatttattccaaggttgtgttttttggcatccttgtccttttctttccctttttctcggtattctatctctggcaaagttgtggagagttttttgttggctgggatacctccattgtggtgtataaggatcgaagaatccatatcaggtaatcctttggctgcttcctcggcctctttttcttgcttctgtagcatctgttgctctggagggagagcttgttgaagaagttgcatgtaaaactcgttctctttttgtacttctttttgcttccttaaccgcattttgtagcttacgtaacttttgaagccaaaccccaaagttaccacagggtacccaatacagtgagcagcaaatggacgacaaaggtctacatgaaagtttttgagatctttaaatctaatggctgcttcaatataaacaaaaaggatccagagagacactgtaggcaaacacactcccctttctgtgtgccatacgtactgaacccatacatatgtgctagcagcaaaaaaaagccactgtatggggatgaacagcaggcatattatatttgacgtgaatgctacacaaacaaaaaatactgagaaggcctaaagggaaaaataaaacaaaataaaagattcatcttagaaccccacgcgtccgcggacgcgtgggtcgaaccgggaagt

SEQ ID NO: 64795 - DNA, 663 bp, Homo sapiens
ggggctgtcaaggccgtagcatggtgtccctggaagtccaatgtcccggcaacaggagggggcaccagtgatcgacacattggcatctggaacgtgtgctctggggcctgtctgagtgccgtggatgccctttcccaggtgtgctccaccctctggtctccccactacaaggagctcatctcaggccatggctttgcacagaaccagctggttatttggaagtacccaaccatggccaaggtggctgaactcaaaggtcacacatcccgggtcctgactctgaccatgagcccagatggggccacagtggcatctgcagcagcagatgagaccccgaggctatggcactgttttgagttggaccctgtgtggcggcgggagcgggagaaggccagtgcagccaaaagcagcttcatccaccaaggcatccgctgaagaccaacccctcgcctcagttgttttttatttttctaataaagtcatgtctcccttcaaaaaaaaaaaaacaaaactgggggggaattaccaaattggattcaatcctggtttaaaaaatagggggcctttttcctttaaaaaaaaaaaaaagggggggccctttaaagggtacaaattttaaaacccgggggggcggaggttaagttttttaaaggggccccaaaa

SEQ ID NO: 64796 - DNA, 692 bp, Homo sapiens
tctcccctaatacaactatgttttaaatgcactgatgtcatgcaaatgggctgtgcgcctgctgattacaattaaagtgatttaacaaaaaagagactcaaaaggtctcacccaacctttgaacacatgggaagtttaatccctcctcctccctttttttttttaaataattaagggaatgactagcttgtcattcctaccagaacaactggtacctgtactcatttctctaccatattgtttctctttagcatagctacagacctcctcagggcatgctatcccattttctgaaagtcaaataagacaaaatcaaacatccaagtgagagacacattagacagttctcattccccagagcatctccatggcacagatgcatgaaaaaaatgggaacagattcctcatttgcatagaagctaaatagctatattaaatcttattttaagagtttccttttacctttgcttcgtaaccattaacaacttctgctttatctgtcctccagccccagaatccggatttagttctgataaaaagtgaacaccacaaatttctacatgtacaatatgccattcagatttatatctgtagcctttatagtttttttcccccccagcttaagttagtgaaggacacttggaaatcatggtcctattgtccacaggaggcggttagcaatgacagatggc

SEQ ID NO: 64797 - DNA, 4703 bp, Homo sapiens
ttttttttttttgtacaaaacctggaaatatttttacttttttaaaactttgatctaagttgccttagacctcatggactcgatacaagagtaaatatgaattgggaaataaaaccactttaatagccacgataaactttgttagaaatgtacatgttgccaaaataataataataaaattaaaaaaaagagagagagagaacagcttgatgtccaggttagattatataaatgttcaacaagggcagggtaaaggaaactttaaaaacaccagttctgaataagcctggggccccgtgagactccccctctcccacccagtctcgggccctagggactgcgtccctccaaacaggacaagtgggagtggataaggcctccaccaagctgcctctcccagtggacaaaaacatccaggtaatgggtatataaacaaagctcataagaaatgtacaaatataaaaagctacaaacattaataaattacagcatcacaaaacacggaaacacttcacaaggtgctagtaaaataactgtatcccccaatcccctcatcatacaaggaaaacaaagagctggtattaaagttgaagattcatcttcaaaatgtgtctgaaatagatcttttgtgtactatttgcttctgtaaagacagagtgtaaggctgcacagacatcacttgtttttcaggcaataccttagttcttaaaagaaaaaaataataataataaaaggaaaggagaaggaaaaagcatcagaacccaactgtccatctgactcagcaaaaaactcgtataaatgttaatgaagaactctatagaaagaaattcctaaagatacttttactcttataaaaaagaagttatttaaaaagctatttacacgctacattctatgaaaaatatgcttcaggaaatacatctaaaattaaaatacaggattgcctgagaaacaaatccagcccctccgtgtcgatggtggacacaccatccaggtacgacccatgcaggcgacaccacacgctgacacgggagaacagagaagtgccgaccgtaagtcctcgggccgcctggccactgtccctgcccctgcccctgccctgccagtcccagggcaggggtgccttggctgagaagtgcttctccagagtgtggccagcagggcaagacggtccctgccacatggcttagcctgggcctcccagaccccaagatgtggctgagcccttgccctttcctggggaccccacaatggctcccctgcccgctaacacaccaacccagctgccagtcttagctgccccccagaaatgctcctgggcattcaggctgaacacccaccatcctgctgccacctgccaaccagaaagctcggggcagacccttcctcacccgccgagcactgtctggacttggctgagaatcactcaggaagagaaggggggacataaacatcccacttgctcctcctctttctgtgttctttgcctttttttttaagcccctggaggctgccagcctgtggccagctctgactctggggctggtgagcattggctcactctgtcttccttgaaggactcatgctctcagcagagctgcagaggccctgcaatcacacccacgctcagggggcctgaaggctgtccttaaagtggaataagcggtcctcaaacttgcagggccgcttttctgggacagatcactcttagcaacttgagaaaagacgtccattttcaaattgaggggccacgctgggctcgctctgccggctgaagggacagacgcttgttggggagatggcagccgggaagaggcaaggccctccctggtgaggcagctcggcaccctcctgggaggcagatgttttcgcggggctccgggggtcctgagcggagcagaaggatcctggctttccaaatcttaaaggagtagtttcccgttccgatgaattttcaaaattttcccaagcctctgcttggcggtcgccatgccctttttcgtacgttttcctttggcagcggtgttgttgtttggagacgatgcggagggccgcctctgtgtgagaaagaccccaggggccatgggctgggaggtgcggccagcctgggccccggtgaaggtgccagcggctgtgtactcatggtccgccaggctgctgctatgcgactcaggcgggggctctggcgagctgccctcctgcgaggcctggctgctggccgtgctggtggaggccggggtggtggaggccggtgtggtggaggcaggggtggtagaggctggcgtggtggaggtggaggtggtacccgtggaggcggaggcagaggtggagatggagggggaggcagtgttaggagccggcttccttttggtgttcttcttcttcctgtttttctgctcctcctgctgggacagcttggctgcagcagctgccagccccgtctcaatggaggccactctggtcccctcacgcacaggcctgtcttgtcttggcaccgatggaccgaccctggctgtggggctgtacggagcatcgtctgagcctttcctcttctttgaccgggacttgaagacggggttatcttcgtcagactccagtgaggggtaaacatagtctgagtccttgaagcaggcatccaggtgatcctgctcttcctcgtagtcgtccaggtcgacactgttcttggcagccctcttcagcagtcgtttgcctgcactcttgccactgccacccccattcttccgggcaccatgggcagccagcgagctccccttggcctggccagctccccacgtggtctgcaggcaggagtcggaggcctgcaggttggccatggacagcattccctgaatggcttcctgtgtgctgggggaggccgggggctggctgctggggttgtactccagcgcgccaacctcctcactggcctgcagcaggtccaagatgccagctgccgagctcccactctccttcttgactctggcattgcggccgggcttggtgtctgtgtcgatgtgcagcgaaccctcgtccgaggagtcatcactctgcttgtacgctgccgagtccagctttggcttcgtgacaggcgtgggcagcacagccttcttatccaacaagaaggacaagtcccttttcggggcgtttttcttcctcctgatgggaaactcgtcgatcttgagctcaccgtcatccgacacgtactcatactcatcccgcacgggcttgggcttgtcctccttgaagttctgcaaggccccgaacacaccagggctcgtcgggggcctgagagccttggagccgaggagtttcttgttggagaaagaaaaagagaacttattgtctttgtttccagctagaggcgacttctctagcttctgctcctcttccatcttcagtaaggagtcaggtttgctgttcttgtacttccacttggcctctgacttgctcttggtttgctctcgaatttccagcctctccacatcattctgcatgtgaaccacatctttgttgggcacactcaggacactctttgtggccttgcccttcttgggcggctccatcttggtcagtgcctccttggtgtgggcttcgagcaggtccaggttggggatggtgggtgaggctgactcccgggacttcttccctttcttcttgcctccatctttgagcttcagcgttttggggggccttgggggcttagggggcttcgggggcttggggattttggatggcttgggcatcttcacagttttgggagtcttttttttggacactttctccaggagggattgaggcggggtggcctcaatgggagacgggggctcctccttctcccggtccccgtcacacacctcatctgacgaggcgacagtattcacttccggtcggacggctttggaggcattctcactgagccggatctctttggccaggtctttgattagctgtgaaggtttgaagtgctccgggagctcgtcctcatgctctgccaaagcctgcttcttcgtccacgatcggaaagcaccattgagaattttagctccttggactagatgagggggcagctgcttcccagatttgtgagagcctttgaatgcctccagcaggtgcttccccatgtaccagcacgcagtttcaaagttgggaaactgagtcaggctgcccagtttcaacctcctttccacttcatatgctctcatctgcatctccacactcaggctgtggaggaaatgtcccgcgaaggccaggcagtccacaggggtgagtgtggcgtagatccagcctgaggggatgaagagggtctggccctgcttgacgatgcacttgtagcatttgtcgacctggtcagcaaagaacatctcgctgtggttagaggcagaccgccagcgctcatacagggagatgttggccgaggccggcctgatgagatagaaggtcttctcccccttgagcacgtggtaccaggcagaggcgcccccagagtcgatgtggaagtcggtgtaactgtccttcacgcagattaggcagtacttggtcactttgggcttggccagcaatgcatcatctggccagtagttttctacccatgacagtttctttacaatgtcaggtggctccacgaagctggacattcgggtgtcagagaactcgaggttggtgacgttgaggacccgcttgcggttggtgctgtagtaatagtc

SEQ ID NO: 64798 - DNA, 803 bp, Homo sapiens
acctcatcctttctgaggaccaaagatgtgtaaggcttggagacagacggcagcctgtacctgacaacccccagagatttgatttcgttgtcagcatcctaggctctgagtacttcacgactggctgccactactgggaggtgtatgtgggagacaagaccaaatggattcttggagtatgtagtgagtcagtgagcaggaaggggaaggttactgcctcacctgccaatggacactggcttctgcgacagagtcgtgggaatgagtatgaagctctcacatccccgcagacctccttccgccttaaagagcctccacggtgtgtggggattttcctggactatgaagcaggagtcatctctttctacaatgtgaccaacaagtcccacatctttactttcacccacaatttctctggcccccttcgccctttctttgaaccttgccttcatgatggaggaaaaaacacagcacctctagtcatttgttcagaactacacaaatcagaggaatcaattgtccccaggccagaagggaaaggccatgctaatggagatgtgtccctcaaggtgaactcttctttactacccccgaaggccccagagctgaaggatataatcctgtccttgccccctgaccttggcccagcccttcaggagctcaaggctccttctttttagggatatgccacattacctgctcccatcaccatccagcccagcaccctgggacttcagtcgcctggcccaaccccatgattatggaacgtctaatcaaattaacccaaatccagaccctgtatt

SEQ ID NO: 64799 - DNA, 1280 bp, Homo sapiens
cctatgaggaaatgtcactttatcatcagccagcaaataggaagagacctatcatcttgattggtccacagaactgtggccagaatgaattgcgtcagaggctcatgaacaaagaaaaggaccgctttgcatctgcagttcctcatacaacccggagtaggcgagaccaagaagtagccggtagagattaccactttgtttcgcggcaagcattcgaggcagacatagcagctggaaagttcattgagcatggtgaatttgagaagaatttgtatggaactagcatagattctgtacggcaagtgatcaactctggcaaaatatgtcttttaagtcttcgtacacagtcattgaagactctccggaattcagatttgaaaccatatattatcttcattgcacccccttcacaagaaagacttcgggcattattggccaaagaaggcaagaatccaaagcctgaagagttgagagaaatcattgagaagacaagagagatggagcagaacaatggccactactttgatacggcaattgtgaattccgatcttgataaagcctatcaggaattgcttaggttaattaacaaacttgatactgaacctcagtgggtaccatccacttggctgaggtgaaagaaacatccattctgtggcatgttggacttgatctggcaaaaactgccaataggaggactgcccgacactgcagcaagattgaggataagatggaaggcagcagtataagctgtagatctgttcttagatctcttgaattagtgagacgacagttcccttaggcagtttgtgcatggcatcctttattctctatacatggctttagcggttcttgcctcattttgggattctaaatggaagctttcaacagagcattccattttgtcctgttaaaaccttttgttttcacctaaaccctttctgcttagttgtatctctgtgaaaaacttgtatacacaagcgtccatgtctcacacaaatattgatgtgattattcttaagtgttaaatcattaacacttaaatgacttcattgggaatattgagcagagggactgtgcttctatgcactgggcaaggcagtatttgcttaggaaactaatttagtcatcagagatactttcctaaaaaggaaaaataaaaaacaaaatggtgccactttgggttgaagctacttttgttaggcttgaattcatttatatgtcttttgattcttaaaaaaacaaaaaacattccattagaagcaccagtttttttggctcag

SEQ ID NO: 64800 - DNA, 543 bp, Homo sapiens
gctgcaaagtgaggaggcccggggtctccattgtacatgggtctatttgacagtgaccttactctggaaataatgatattccttcagtctgaggtaattgatgttgatgaaaccggtggcatcgattggctcataattcccctgcacgttgacgctcaccagctcctccttgtagagagagagtagagactcctggctgaggatgtgcacctggcccttgaagatgggcacctgcacttttccttccatttgctcctgggacttggtgatgcaatggtggacagatttacactcagggttgattttgtgcacttcccgatccatagtgaagtcctcgatgtctaaatcagcctgttgaaggatggtgcctgctggggtcttgtagatacctctggactttattctaatgaagcagttctccataatgtcaatacagcccatgccgtgcttgcccgtgacttcgttcaggtacacgaagagctccaaggaggtctggtgaggtggtgccatcttgatggtcactttcacggggacccctttttt

SEQ ID NO: 64801 - DNA, 388 bp, Homo sapiens
ctgggagagataggaagacgtggatcaaaatgctcatgatttggaggccaaagtggcgagcctgagaggaatggagttacaggggtgcgccaccactcaggttgaattacaagataaccgagaagaacagaaacaggtgcgcttaccacaaagccgcctgacaccatgggaggtgcggtttattggcaaagaaaaagaacaacgtgaccgggtgcgactgagagctctacaggaattaagtcgaccactacaaaaacgaactgaaatggaagaatgtgaaaaaagaaagataattgctgaagaaaagcacaaggaatggcttcagaacaagattgagtccaaaagaatagaaagagaactggaaagttatatagaaatgggggtacaa

SEQ ID NO: 64802 - DNA, 1212 bp, Homo sapiens
ccggaagtaaagccccaatccacaggaaggagcaaagcctacctattattggggaaaagaagcaagttccagacttttaatccggaacgggaatatgaaagcatggatggaaagaatttaaaaatgatatgcctaactgagaaagatgccccgataccctggctgttaaaagaagtgctttgtcatcctaattgaatgcaataaagatgttcccagggatctctcagatcaattgggttattcatgtggttgattccccaattattaatgccttcgtgcttccaaatggacaaatgtttgttttcactggatttttaaatagtgtaaccgatattcatcaactttctttccttctgggccatgaactagcacatgcagtacttgggcatgctgcagaaaaggctggcatggttcatttgttggatttcctaggtatgattttcctcacaatgatttgggccatttgtcctcgagatagcttggcacttttgtgccagtggatacagtctaaattgcaggagtatatgtttaatagaccatacagcagaaaattggaggccgaagctgacaaaattggactactgcttgctgcaaaggcttgtgcagacataagagccagttcagtgttttggcagcaaatggagttcgttgatagcctgcatggccaacccaagatgccagaatggttatctacacacccttctcatggcaatcgagttgagtacttggatagacttatacctcaggctctcaaaattagagagatgtgtaattgtccaccactgtcttaatccagaccctcggttactattcaaaatcagcacggagcattttcttgaagaatcagagaaagaagacctaaatatcacgaagaaacagaaaatggatactcttcctattcaaaaacaggagcaaataccattaacatacatagttgagaaaagaacgggcagttgaattaaaatttatgagacacaagatatatgaagaatgttgcagtccttatcattttatgttactttttaaaaaatgatgtttgaagtgaaaaaaaaaaggatattcagggtcaaatcatgtacattacagatattatctaaattcttctagaatttatttttcatgaaatattgatgtattttaatctatgttaaaatatcttcaacgaggaaaatgtcacagaataaatttatattacacattttaaaaaaaaaa

SEQ ID NO: 64803 - DNA, 2038 bp, Homo sapiens
gggccgaccagcccggtggaattcctctgtcaaagccaagcttacagtaaatatgcttccctcattcaccaagacccccatggatctcaccatccgagctggggccatggcacgcttggagtgtgctgctgtggggcacccagccccccagatagcctggcagaaggatgggggcacagacttcccagctgcacgggagagacgcatgcatgtgatgcccgaggatgacgtgttctttatcgtggatgtgaagatagaggacattggggtatacagctgcacagctcagaacagtgcaggaagtatttcagcaaatgcaactctgactgtcctagaaacaccatcatttttgcggccactgttggaccgaactgtaaccaagggagaaacagccgtcctacagtgcattgctggaggaagccctccccctaaactgaactggaccaaagatgatagcccattggtggtaaccgagaggcacttttttgcagcaggcaatcagcttctgattattgtggactcagatgtcagtgatgctgggaaatacacatgtgagatgtctaacacccttggcactgagagaggaaacgtgcgcctcagtgtgatccccactccaacctgcgactcccctcagatgacagccccatcgttagacgatgacggatgggccactgtgggtgtcgtgatcatagccgtggtttgctgtgtggtgggcacgtcactcatgtgggtggtcatcatataccacacaaggcggaggaatgaagattgcagcattaccaacacagatgagaccaacttgccagcagatattcctagttatttgtcatctcagggaacgttagctgacaggcaggatgggtacgtgtcttcagaaagtggaagccaccaccagtttgtcacatcttcaggtgctggatttttcttaccacaacatgacagtagtgggacctgccatattgacaatagcagtgaagctgatgtggaagctgccacagatctgttcctttgtccgtttttgggatccacaggccctatgtatttgaagggaaatgtgtatggctcagatccttttgaaacatatcatacaggttgcagtcctgacccaagaacagttttaatggaccactatgagcccagttacataaagaaaaaggagtgctacccatgttctcatccttcagaagaatcctgcgaacggagcttcagtaatatatcgtggccttcacatgtgaggaagctacttaacactagttactctcacaatgaaggacctggaatgaaaaatctgtgtctaaacaagtcctctttagattttagtgcaaatccagagccagcgtcggttgcctcgagtaattctttcatgggtacctttggaaaagctctcaggagacctcacctagatgcctattcaagctttggacagccatcagattgtcagccaagagccttttatttgaaagctcattcttccccagacttggactctgggtcagaggaagatgggaaagaaaggacagattttcaggaagaaaatcacatttgtacctttaaacagactttagaaaactacaggactccaaattttcagtcttatgacttggacacatagactgaatgagaccaaaggaaaagcttaacatactacctcaagtgaacttttatttaaaagagagagaatcttatgttttttaaatggagttatgaattttaaaaggataaaaatgctttatttatacagatgaaccaaaattacaaaaagttatgaaaatttttatactgggaatgatgctcatataagaatacctttttaaactattttttaactttgttttatgcaaaaaagtatcttacgtaaattaatgatataaatcatgattattttatgtatttttataatgccagatttctttttatggaaaatgagttactaaagcattttaaataatacctgccttgtaccattttttaaatagaagttacttcattatattttgcacattatatttaataaaatgtgtcaatttgaaaaaaaaaa

SEQ ID NO: 64804 - DNA, 998 bp, Homo sapiens
tattattaggtcagaacgaatgaagtagcagcaaaagggtctctcctatgatctgtctttcactggtcctcagggcaaggaggaaacttgggcaggagatgattgctcaatcccagcagactctcagaatctcacttggacccgaaagtgcatctgcttggtggcattgttcttcattcctgtcttcagcatccattttgatttcatcctttggacatactgcatgtctcgctctcgcataagagccgctcctgtgctgccagtccatcccagggctctgtactgctgaagtactcggcccacggccttccgatttttggcaactgccacagctcttgacaagccaaatcgctgtttgtagtatctcatcaaggagcgatgacccactctggcaccagaaggcagaatcaattccatggtttcatcatcatattccaagttcttttctgagggcaactcctcagccttattggggtcctccccttccttgtgatctggatagctactcctaaaatcatagaagtctgcaaattccaaagcagcatcgccatctgtgaagagcttacagtggcttttgtcattcatatgtgcctgtacagcttctgtggagtagaaggacttccctttctcgttgcaccacaagcaaatcttgccaacaccaactttctctcccaagtatttaatcagtcccttaatatctgaaagatattctatatcaggaataaagaaactgtggtctttggtcatgtgagccacattcttcatcagcgagctggaatgatgggaacaaaataagcagtccgtgatagggatggcaccaaggggtgggccttcctcagcctcttcctcctctgcatcctgctccaccacatcgtccattgcttcagtatcctcacattccaattcttcatcagaatcaatatcttcccaatcgtctccatccaggtcctcttcctcctcctcgctgtcctcctcctgctgctttgccaacttcttcg

SEQ ID NO: 64805 - DNA, 2985 bp, Homo sapiens
gggaaaggtccaactggcccaccttcaacactccctctaagcacccagacctctagtggcagctccaccctatccaagaagaggcctcctcccccaccacccggacacaagagaaccctatccgaccctcccagcccactacctcatgggcccccaaacaaaggcgcagttccttggggtaacgatgggggtccatcctcttcaagtaagactacaaacaagtttgagggactatcccagcagtcgagcaccagttctgcaaagactgcccttggcccaagagttcttcctaaactacctcagaaagtggcactaaggaaaacagatcatctctccctagacaaagccaccatcccgcccgaaatctttcagaaatcatcacagttggcagagttgccacaaaagccaccacctggagacctgcccccaaagcccacagaactggcccccaagccccaaattggagatttgccgcctaagccaggagaactgccccccaaaccacagctgggggacctgccacccaaaccccaactctcagacttacctcccaaaccacagatgaaggacctgccccccaaaccacagctgggagacctgctagcaaaatcccagactggagatgtctcacccaaggctcagcaaccctctgaggtcacactgaagtcacacccattggatctatccccaaatgtgcagtccagagacgccatccaaaagcaagcatctgaagactccaacgacctcacgcctactctgccagagacgcccgtaccactgcccagaaaaatcaatacggggaaaaataaagtgaggcgagtgaagaccatttatgactgccaggcagacaacgatgacgagctcacattcatcgagggagaagtgattatcgtcacaggggaagaggaccaggagtggtggattggccacatcgaaggacagcctgaaaggaagggggtctttccagtgtcctttgttcatatcctgtctgactagcaaaacgcagaaccttaagattgtccacatccttcatgcaagactgctgccttcatgtaaccctgggcacagtgtgtatatagctgctgttacagagtaagaaactcatggaagggccacctcaggagggggatataatgtgtgttgtaaatatcctgtggttttctgccttcaccagtatgagggtagcctcggacccggcgcgccttactggtttgccaaagccatccttggcatctagcacttacatctctctatgctgttctacaagcaaacaaacaaaaataggagtataggaactgctggctttgcaaatagaagtggtctccagcaaccgttgaaaggcatagaattgactctgttcctaacaatgcagtattctcaattgtgttactgaaaatgcaacattagcaaagaggtgggttctgttttccaggtgaaacttttagctccatgacagaccagcctgtagttatctgtgtacacagtttacagctacaaaaacctactttggtatttattacagaaaagtgctcagttaaatgtaagtgttattccttcagcaaaatattcactgacccaaaactctttatggcattttacaatgcacacagcctcatgcaagtttagacaagtggatttatactgtcttatgagtgcccgcccctgatatattacctcattatgcaaaaataacatatctttcatgactattttgacaaaagtttaaaacacatatgaagttcaaatttcaggaaccaaggactgccagaaaatattagcctctacattacgcatgcatttagaagcttacctgaaatctgccttttataaaggaatagtatggataagtggaattgtacattttttaaacttgattgccattaaagcagaaattataaggttgcaacaatatttgtttctaatcactggctttctcaagagtatggattgacatattgtgttatgaatgcacatctctcagatgtgttgaagcatccattgcatccattttttattattttcttagttttgttcttggacaaatttaaacttttaaaagattattcaagatgaatttaaaagtcaacccttcacacagtttccctactgtatgtagaatccaggtgctgaaaccaagtgtttcttttcccatgctctttgttaaaccccaattatagataatttttccagtcttaagctctgtccaccttcaagtcaattcataaccaagtttttgaacgctgctatgaattgcactgtgaaaagcactcttccctctcagttttcttttcatcccagccatgtttatcagatccttaagaacattgtatttcagtcttttacatcagtctgaattttggaaaagaatgcaatagttgtactccacagtcagtggaactgttccctgagtccgaggctcatgtgtcattctggcactacatttgcttaaattgctattttggcaacagcacagaaaactaatatttttaagcagagaatcttggcaatgagtgagagatgttaatttcacagaagcacaactcccaacccaacccttaggaaaagccctcttccatcgttacagtgctcagtgaatattaatttagttctgcttaagtggttgctatacaaactttgaatagccacctaataaataaaccttgcatgacaaacctgcaaaatattttatcagctgttattggaaagtgattttaagcaattgcttcctcagtgtcagggcacatgtgaatttccacaccaaacagagcatgaggaaccagttgacatgctgggttgtgactggcagctttagcagcctcggtactgaagccacaccagtgtccggatggaagtctgcatctgaggttgctcagtgtcccggtcattcatttacacattttaacttgcattaaagagctgttcttttctgtggcctagactcttttcactgatctcaaaataaactggtttttttcaaaaaaaaaa

SEQ ID NO: 64806 - DNA, 1268 bp, Homo sapiens
gccaggaagagatacttaagagttgatatatacactaagaaagatgaaaagatccagccatacaactatctaaggaaagatattctctttctatgggcacaagaagcacacaaaacaacaggtctcagtgtattgtaaacaccatcaaagacctccacaccattaggcttataatctcacaagcattctgcctttgtcagacacttcacagggtgcaactgggttacttttgcaggcaaagcggagattttgatttctgttgtaaaaagcccaacagagagaaatcggaggctttctcatctctgacccatcagtccaattcttttgtcgtcctttatggaagtcttttctctgttgcagccactttcagtaattgcaaaaggaaagaaaaagtgtctcccacaatccttctctgggagttcatgtttttttgctacttgtcttctgtttctgtttgcgaaggtgagcctctatctcgtgcctgaacaccagcatgcccagctggccgtgggatgcctcgttcatggccttggactgcatgcacatcttgtactgctcgggggtcagctcgtccatgcagcgcttctcatgccagaggtggaagagtcctcgcacaggcgtccgtaccactatgaggttgctgtggagatacttgcgataaaggtgcacatcctctccgccccagcctttgatgtccagatcaaacccacctgtcgggacagaacacactgttgaatcacactgcactgatctgttttgcttccctgagttgcaacaagcacaaacttttcattaagacatgactgggggggatgcgtgcttcaccaccacccctccaaggtacgagagtgtccacctgggtcagaagccccgagaattccccaacaaagacgacttttatggcagacagcaccgacttcttcagatgacaggacctccaagaaaattccaagcatttgcctgcattcaagagttatcagcaatgctaatgaacagccccagcctcgtggttaatgggtacaaaaataagatctagtattcggtagcattattactgacagacttattgtgattatgaattagctattgttaacaatttattgtatatttaaaaatagctagaagactgataaatatgataaataattgaaatgatggatacctcccatgaccctgatgtgatgattacacattgtatgcctgtatcaaaacatcacatgtaccccataaacatgcgcataataattaaaaatagaggtttcgtaaaa

SEQ ID NO: 64807 - DNA, 1222 bp, Homo sapiens
ttttttttgggagtactttcacgtttaatacgcaagggcataaaatagaatgttaggaaacaatttggatttttttccctaaaatataggtgactatgggctagtttacaactttccttctctcactgaaataaaaatacatagttaaggattagggacgaatacataacaggtgacatttgacagtttgggcatattccttgttactttctaatcttgagaatcacagtttgctgttttaggaggtatctgaggaggttccagataaaaggcgatggcctaaatgctcttaaactttgagcgtgcctggatgctctaaagtaggagaggaatttataacagaagcttacaatgaagaaccagacattccgagccatctgagatcttgcaatgagaaggcgccaggcgataaggaagagggcagtattaaagaggtagtgaatatttcggagcctttttaagcgttgctttgcttttgggatcccagccatatcctctttcaataagtattttttaactcccaaaacataattttcaatgtattccaaccagttcaactggcgcacgtcaaagttgaatactctctggtcttcaggactcagctcagacatcagcatttctgtattgtacgtgctccattcccaactccggttgatgaaatactccaacatggaaacagttcttaaaagccgattcatgagctttgtcatcctgggcttccttccagtgagccgcagatagcagtcatagataatggcaggggcccggtggctgaccgcattccagtactgtgatgtgaagctgttgctggtaaaattagcatttggcctcctgaaaggtctctcaaatgggattttttcaaaggttgccaagacttggactcccattttgtgccaattgcagggattcatgttaccagatgtaatgtggtagactaatgttgacttaggtctgtgaactgcagtataccatcctacagctagcatgagattgacgactgtatcaactggaattacgtctgccacagccattggagtagcttttatggcccgaagaaaccctttcccagtcgcaataatgattccattaggtccatttatattatcaacccaacctgggaaaggctcctgccaagttgctcccacaatggagggccttatgatggcaatgttcaggttcctgctctcttgctgcaccaccatttctccccatgtgccgaatt

SEQ ID NO: 64808 - DNA, 399 bp, Homo sapiens
ggaaactttttcagtattgctcttctcttctctctcacattttccatgattgacatctggtaaccacagaggtatcccgagtgaaggtggccctggcctgcagcagctctgctcttttttttcccctactttcctaaactttattaaagaaaaaagcactagaacatagtcacttttctgggattcctccccgcaaaatgtgacgtttgattttcaaacatgccagaagtggacatggttcccagttgtactaaataggtgagaagctgaagtcctaaagtgttcatcttccaacttttcccagtctgtggtctgtccttggatcagtaataattgtctgaacagctactatggcttcattaatttttggctggagctctctgagctcttctatatgcg

SEQ ID NO: 64809 - DNA, 2951 bp, Homo sapiens
atctcactgaggaccaacctttcgacattcttcagaaatccttgcaagaggccaatatcactgaacagacattggcagaagaggcatatttggatgccagtataggttcaagccaacagtttgcacaagctcagcttcatccttcttcatcagcatcctttactcaggcttctaatgtttctaattactcaggtcagacgctgcagcctataggggtgacgcatgtgcctgttggagcatcgtttgcaagcaatacagtgggtgtacaacatggctttatgcaacatgtggggatcagtgttcccagccagcatttgtctaatagcagtcagattagtggttctggtcaaatacagttaattgggtcatttggtaatcatccttccatgatgactattaataacctagatggatctcaaatcatattaaagggcagcgggcagcaagccccatcaaatgtgagtggagggctcctggttcatagacagactcctaatggcaactccttgtttgggaactctagttccagtccagtagcacagcctgttaccgttccatttaacagcacaaattttcaaacatctttacctgtgcataacatcatcatacaaaggggtcttgcaccaaattcaaataaagtcccaattaatatacagccaaagcctatccagatgggtcagcaaaatacatacaatgtgaacaatttgggaattcagcagcaccacgtacaacaagggatctcttttgcttctgcaagctcaccccagggctcagtagttggtccacacatgtctgtgaacattgtaaaccaacagaacacaagaaagccagtcacctcacaggcagtgagcagcactgggggcagtattgttattcattcccccatgggccaacctcacgcaccccaaagtcagttccttatacctacaagcctttctgtcagttccaactcggtacaccacgtccagactataaatgggcaacttcttcaaactcaaccctctcagctcatttctggccaagtggcctcagagcatgtcatgttgaacagaaactcttccaacatgctcaggaccaaccaaccatatactggaccgatgcttaacaaccagaatactgctgtccacttagtgtctgggcagacatttgctgcctctggaagtccagtgatagccaatcatgcctctcctcagcttgtgggtggacagatgcccttgcagcaggcatccccaactgtattacacctgtcacctgggcagagcagcgtttcccaaggaagacctggcttcgccaccatgccatcggtgacaagcatgtcaggacctagtcggttccctgctgtcagctcagccagcactgcccatcctagtcttgggtctgcagttcagtctggttcatcaggatcaaactttacaggagatcagctgacccagccaaacaggactccagtaccagtcagtgtgtctcatcgtcttccagtttcttcttccaagtctaccagcaccttcagtaacacacctggaacaggaacccagcaacaattcttctgccaggctcagaaaaaatgtctgaatcagacttcccccatttctgctcccaagaccacagacggcctgaggcaagcacagatccctgggctcttgagcaccacactgccagggcaggattctggaagcaaagttatatccgcatccttaggaaccgcacaaccacagcaggaaaaagtagttggatcatctcctggccatccagctgtgcaggtggagagtcattcgggaggacaaaaaaggcctgctgcgaaacagctaacgaaaggagctttcattctccagcagttgcagagggaccaagcccacactgtgacaccagacaaaagtcacttccgatcactaagtgatgcggtacagagactgctctcctaccacgtgtgccagggctccatgcccactgaagaagacttgagaaaagtggacaatgaatttgagacagttgccactcagctcctaaaaaggacccaagctatgcttaacaaatacagatgcctgctcctagaagatgccatgcgaatcaatccccctgctgagatggtgatgatcgataggatgttcaaccaggaggaaagagcttccctgtcccgagacaagcgtttggcacttgtagaccctgagggttttcaggctgatttctgttgttccttcaaacttgataaagctgctcatgagacacagtttggccggagtgaccagcatggcagtaaagcaagcagctctctgcaaccgccagccaaggcccaaggcagagaccgagccaaaaccggtgtgacggaacccatgaatcatgaccagtttcatctagtgcctaatcacatcgtggtctctgcagaaggaaacatttctaaaaaaacagaatgccttggcagagcactgaaatttgacaaagtgggcttagtgcagtaccagagcacgtctgaagagaaggccagccggagagagcctctgaaggccagtcagtgctctcccggccctgaggggcaccggaaaacctcatccagatcggatcatggtactgagagcaaactgtcaagcatcctagcagattcgcacttggagatgacgtgtaacaattccttccaggacaaaagtctgaggaattctccaaagaatgaagttttacacacagacatcatgaaagggtcaggcgaaccccagccagatctccagctgacaaagagcttggaaaccacatttaagaacatcttggaactcaaaaaggcgggacggcagccccagagtgaccccacggttagcggctctgttgagttagatttccccaacttttctcctatggcttcacaggaaaactgcctggaaaagttcatcccggaccacagtgaaggtgttgtagaaactgactccattttagaagcagctgtaaatagtatcctagagtgt

SEQ ID NO: 64810 - DNA, 1439 bp, Homo sapiens
caaataaaagccagaataacagataccatttgaccaacatatacctcaattgcaccaagacaaagaccaaaggccaactctgctactactgccactcccagtgtgctgaccattcaaagttcagcaacacctgttaaagtccttgctcctggtgaattcggtaaccatagaccaaaaggggcactaagacctggaaatggccctgaaattttattgggtcagggacctcctcagcagccgccacagcagcatagagtactccagcaactacagcagggagattggagattacagcaactccatttacagcatcgtcatcctcaccagcagcagcagcagcagcagcagcaacagcaacagcagcagcagcaacagcaacagcagcagcagcagcagcagcagcagcaccaccaccaccaccaccaccacctacttcaagatgcttatatgcagcagtatcaacatgcaacacagcagcaacagatgcttcaacaacaatttttaatgcattcggtatatcaaccacaaccttctgcatcacagtatcctacaatgatgccgcagtatcagcaggctttctttcaacagcagatgctagctcaacatcagccgtctcaacaacaggcatcacctgaatatcttacctcccctcaagagttctcaccagccttagtttcctacacttcatcacttccagctcaggttggaaccataatggactcctcctatagtgccaataggtcagttgctgataaagaggccattgcaaatttcacaaatcagaagaacatcagcaatccacctgatatgtcagggtggaatccttttggagaggataatttctctaagttaacagaagaggaactattggacagagaatttgaccttctaagatcaagtaagggacacttgaaggcttattttgcttcacagtaaaataacagctctattattattcagcaaggccaaagacttttgagaatgtgtatggaaaattctttttgtgcatttgagggcaaaattcaggccatcttcttatacatatactatcaaattatgttgtgtgcattagaaatcagttgcttgatagtagctattaaacccaatattgctgatagtatgctaatatcctaaaacttaaatattgcatatctatgaatgttaaattcagaatatctctaaaacatggaaaattgatgtttcaataaaaagggagacattttattattttgccttactaatgattttgcagctctgtttttctgcacactcaatagaaaatattgtgggtctgagatgccctttgaaaatgcctgaaagaaaacatgggctactacattaatggtaatgttttggaatggccttttaaatgagtggtgacataaaagggctgctttgttgtcctgatataacaaaaccttaaataaattctttttcac

SEQ ID NO: 64811 - DNA, 5930 bp, Homo sapiens
ccaactcctggagtcccctgggagctgccgctgcaggcccccgagccgctaggccccgccgccaggccaccgctgctgcggcagccatggcggaagttcatagacgtcagcatgctcgggttaaaggagaagcccccgcgaaatcctccacactccgagatgaggaggagctggggatggcgtcggccgaaacgctgaccgtgtttctgaagctgctggccgccggcttttacggcgtgagctccttcctgatcgtggtggtgaataagagcgtgctcaccaattacagatttccctcctcactatgtgttggacttggccagatggtggccacagtggcagttctctgggtgggaaaggcgctcagagtagtcaagtttcctgaccttgacagaaatgtacctcgaaagacgtttccactacctctactatattttgggaaccaaatcacgggactgttcagcacaaagaaactgaacttgccaatgtttacagttctgagaaggttctccatcctgtttacaatgtttgctgaaggagttttactcaagaagactttttcttggggtattaaaatgactgtatttgcaatgattattggagcctttgtagctgccagctctgacttggcatttgatctggaaggatatgcttttattctgataaacgatgtcctaacagcagcaaatggtgcatacgtaaaacaaaaattagattcaaaagagctgggaaaatatggactgctctattacaatgcactgttcatgattctgcccaccctggccattgcgtatttcacaggagatgcacaaaaggctgtggagtttgaaggctgggctgacaccctctttcttctgcagttcaccctctcctgtgtgatggggtttatcttaatgtacgccacagtactctgcacgcagtataattctgctcttacaactacaatagttggctgtattaagaatatattaataacttatattggaatggtctttggtggagattatattttcacgtggacaaacttcattggtttaaatatcagcattgctgggagcctggtatattcctatatcactttcactgaagagcagctgagcaaacagtcagaggctaataacaagctggacattaaggggaaaggagcagtgtgaccagaggattgcttcatctgatacgtaggcctaagtttttaatcaactcagaacactggcagttcctacagagacactgaggtgtcttgattatggaggaaataaccattcctttgcacttgtacaatctgaggattgattgctgccttttaaaattttatgaagagagaaacttataattgactctattttaaatatgttgtttgaattaatttatatcagactggaaaaggtactgggctttttaatttatttttcttatatgccgacagtgaaacatcagtgttttgaaagtattttatttcataatttgatatccaggtgtccctgagagctgcatatgtaatgtttgccaactggagcttcatcattcaaattgttgctgcatctggaggcagtttagcctttcctctgctggaaatgcagacgaatatgtgaaatttctcttctttgaatcttatttcttatgattgcattgtcttcatcatatcatcattccatttgccaaggaaaacaactttggcactataaaaatatgtggggctttgaagtgtattgctatctatgttggcttccctgactttcataggatgagcagagtgcattccttgaaaacatgttctttttttgttgtgtagaatggggataatgaagggggtgagaaagtaggccttttactaatttttcatctatttgacttattgattcaactaaaatgttttaagtatatgtgccaggcattgtgctaaatgctggggatacagagatgtttgcagaggtagttgaaacatctcactcctgccatagtgactcaggtaaggttgagaatttagctctgttaatctattcagaagatgtcactaagagtaagttgtttcagcactcaaaagccgcaaatctgtaaattggattaagaacacctgccctacctacccggcaatagtgtgaatccaaatgctgcaatgtgagatgaggtacaagtaaagagctgtgttttgtaaaccagtgcagctcagcattgactccctctctaagtgaaaattgcagacaggcaagtctgttttcccttgccaccttcctttgggtttggttgctctttggatgaatatgatgagggcccacatttctgaatttattggtttgaggggaaaggctggttagacgtctttgtattgtcaatggttggtttttctctggcagtgtcagtgttaaagctatcattttccttcttaaatggcatgagcaatgagcaaacttccctcctttcaacattctcacctacatcatgtgccccttggctcacctactgagcttgccaacttctctcaaaaccaatgctgcattttgggagagcagctgtgaatgggcactgcctaaattgcctcttggggtaatctggagggtggaggtgttaactcaaacataaccctatgacttgactcagagatatccattgactttgaggattagtgtgtttgctcaggccagttgtacagccagtgtgcaagagatttggtacctttgcactaatgcacacaccagtgtctatttcattgggtttggaatccactggactctgttgacctaaacagttaggggttttgattttttttgatatgcaaatttatattgagatcattttcatattcctgtcttttggtttgtctttactaaagcttggctggtggtgctgtgtccctagaattatccctgcaaccaactcccaagttacaagcttcattaagagccttagactcacttttttctagcatcttctgacctgagaaaattccactgggagtaaaggatagtatcttgtgtcatatgggtcttactctccctattttaccaatgagaaaacaaaactcagagaaagatgacttgctaatacatcaaacccatgtcctttttattgaactatgctgccatttaattaaccgcccttcccctctgagggagtaaggaaacagatcctgagttcacttgagcactttcaaaaaagcaagcagttgattgaatttggtgtcagagaggagcatactttgcaaatcaggaagagtgacagcttaccctgtcctggaacccttatcccgcttccaggctgactttagttgataatgcacttctggctgtaaatgttgccaacacttcctggttttgcttaggtacagtgaaagggcatagtgagagctatttttagtgattctgttctttctgtcagcaacatgaaggagggacgtttgaataatttttgttgtagaatatttcttcatgaaaggcttttgggtgtctttaacaggtgttgggctagagccccaccaggagttgaactgcctcttgggggtcaggttccctaggagatctgtcacctcttcaggagtatttgagaacattgtgtagttacagcttcactaaatgcacgtgacaggcttctgtgccttgggagccctggcttatgctgaaacttctggctgaccagagcagtacagcaactttgccctgtctgtgttctgcttcctggatgcatccttcagccactaaccagcattgcaagatggagcagggtgaacaagctggagactgaatagtcttttggagtttgcgttttgattattgcaggcgtgttacaatatactggtgatttacctggtactgtggcacctcccagaaagtctggtttttgccccatgtttgatatttactaggcagaaattctttgtcctgttaactgcctcctgggagaaaaagaggcaatacagagttaaatccttaatttgcccactgagacagatgagctgtggtattccaaaagacaaattctatgactagtgtctcctgttcaatgtaagtgagaccctctttggccaatctgcttctagtcaaggctaaatggattggaataaccctagttggccaggctacacattgccagcatgtcccgttgagttttaattgcctcatgtggctgtggactttatgagtcaatcatttgtaggctccagtttgcacctagtttttttttttaaaaagtgcatttacacgcttttggtagtcctgttttatcaagaatccatggagggttttggtcagtacagctggtgcaggatcctcacggagaaacagtggagtttcacattgagttggtttgaaatggcaccccaggactttgggcctgccttacttgatagcctcgttcagtgagcaaagacttagtgagcagctcttgtatgccaagtattttgctaagctctggaaaaaagataaacaagacatggttcttgctttcaaggagtgtgtaattctttagccagatatggaaacctggaccctgagtgggagaaaggagacagatgaaaggagtccgtgattttgtaaccaagagctgcctgcatggttatgagtatcactgattttagggacgccccacagagctaaagcattttttttaatccgagaggacttttgtaactcatattagttaatcttctagctctgagatagcaacacagctcttagaattctgtaagtagcttgaggcctcctcctctactgtacatgttcttgctttcccaaaattgtaagtttggtttttcctatgaacaagactgtaattgatttttctctccctgaggaaaaaagttcggaataaatgagacatggatatgaaactacttagcacaatgcctggtacatattaggccctcagcaaatgtggctaccgtgtcattatttcatggtgagactcaaggcaaaacaagattcttaatttatgctccgtaaatgctagaggcttgggcaatacggtctgtcctgaaaaacaggactctgtgtctcattgcctctagaatccttaggtagcagtttctgttcactgtcttttcttttttaaaaatatctgctggacacaattacggccattacatgatgcaggtgattctacctattttttaaaaagaacaaaatttcttttatattgtgacagtacattttaataaaggaaaattattttcttccccctactccccctccttttttttttctggtaaagacagggtctcactctgttgccagactggtctcaaactcctggcctcaagtaacccttctgtctcagcctcccaaagtgctgggattacaggtgtgtgccacatgtccggccaggaaaattattttctatcttaaagaaacatagttacattttagaatgtcaattcagttaaatctttctcagtttttacctttagatggctcctggaaaggccagcgttccttttcccctctctgaattgaaagcacttgaccccatgctgcccctgcttccaggcctgtctcagttgtcatatattgtgagtccctggcaccattactgttttctaagccagtcttctaggtcttactttcaggatgctgcttcatggcatgaggatatagtttacagtgttgtagtttttttttttttaaagctttgttctttaaaaatactttttaaaaaaaaatctactggttaaatttattgtctcacaaaaatgtttttagaagattatttttttccacaaatgttttcctttcctcatgctgatgatcaactgatttttgtcctacaggtggttagcttctcacgagtatttttttcatttttagagtctatttaccaaatgaccatttttagtgttaaaaggtactgaggaattgaggtatgtaaatcaggtgacataaacatgaaaattatgtgcctaaatatttttgtaatggtgtaaaataaatactttttcctga

SEQ ID NO: 64812 - DNA, 1198 bp, Homo sapiens
gtcatttgcaagggctttctcgtcctgtgctcgtctcttgatctgactaccctggtccctgagcgtcaagtggaccagggcaggggttttgagagcatcctggatgtcctctctgtcatgtacatcaacgcccagctgcctcgggagcagcggcaccgctggcgcctgctcttttcgtctgagctccatggacacagcttctcccagctctgtggccacatcactcaccgggggccctgtgtggctgtcctcgaggaccatgacaagcatgtgttcggtgggtttgcctcttgctcttgggaggtgaagcctcagtttcaaggggacaatagatgcttcctgttctccatctgccccagcatggctgtgtacacacacacgggctacaacgaccactacatgtacttgaaccatggacagcagacgatcccgaacggactgggtatgggggggcagcacaattactttgggctttgggtggatgttgattttgggaaaggacacagcagagccaagcccacgtgcaccacgtacaacagcccgcagctgtcggctcaggagaacttccagtttgataagatggaggtgtgggcggttggagacccctcagaggagcagttggccaagggcaacaagagcatcctggatgcggaccctgaggcccaggccctgctggagatcagcgggcattcgcgccacagcgaagggctccgggaagtcccggacgatgaatgaggagccgcctgagccttcctggagccaggacctggattcctctgggtagagggcaccgcctgcagcccctcttccctcccacatggtttaactgtaatagcgtaccgcacgggtcacagcctggtagtcccacatgtgccaagaagacgccctctgaagccatgtcctgactcatgggtggatctcccagaaatagatgttttttaagttttcttttttgccctacagggtcaccctcaggatctctccaagaaatcttgtgtcaaattagtaactcagtcttatactttgttcttttttaccaacgaaatcctaagcagctgagacctttcagacccccgctggcattagggaattccgctggcattagggaattccgctggcattagcattgctgggatctcaacttctctattgaagagggggttcctcccgctggggttcatatggcctcactcacgcc

SEQ ID NO: 64813 - DNA, 645 bp, Homo sapiens
gatcaaggaaggactcaccgtaatcacttgcttaaaaagaacacttaagcaaggactgaaagggagtgaagatgtgagacaaataggtatctggaggaggagcgttccagccaaggaaatgcccagtgctttggactcatggcagaaatgtacttgagtattctaggaccaactgggaagcccatggaagccagagtggaggtcggggagggagcaggaggacacagagccaaagcctttctgaaccaagagggacaggaattgggtgaccgttaataacttgtaattttctgcctccaggattcagagtttggttggagaaatgtcttcttgctttcagctgctgttaacatatcgggcctggttttctacctcatctttggccgagcagatgtgcaggactgggctaaagagcagacattcacccacctctgagcaaaccgagagatgtgctagatcctggtgcttagttcatcattgttttccctcacagacatttctctttcatgcctgcttgactgataagccattagctagaccctgactatgtaacgctaaagattttaccatgcctggaaattttacaggggaagaaaacacgctagttatttaactgcaagctactaaaagcataggtgtgttgag

SEQ ID NO: 64814 - DNA, 745 bp, Homo sapiens
gtcactctttttgttctggcgtgtcatgtggtactttaggtagcttcacattttatgttctagttaagtaaaattcttagagaatgaggtactatctctggatagtctgtttgatcttgaaaatgtacagaattctttgcctcttgatcctggaggactagtgactttccagctctgagagagaacaggatccctctgccaatttttttctgtggtgtaaggcagagcctggtcactccatctaatgctgtctatctcatctcacgtataggagcgggatgctgcactccaaccctggggactatgcctggggtcagacagggcttgatgccattgtaacccagggtgaggagctgccttttgagggtgtctgttcagtgtgtctcatggttccacaggcttcctgctttccttctgctactttctgaaatggcagtcactctgctttctctaatattttgagctttggggtttccattttactaaagggatgaatgatttatggggttagctcagcatccatgcacttcctaggtctgagggaatttctagaagatggtttcacctccataggaagaaaagacttctataacaaatagtattttgtatttttgtctctcttgctcagttctataaggattctattaacaaatatttcacaaaaaaaggagggtttcctcacatgttgaagcagggatttctgctagatggagcaaagtaggggaaggaagcagagaaaaaagta

SEQ ID NO: 64815 - DNA, 3043 bp, Homo sapiens
gaggaggagctggagggggcgcggcttcctctcggtcgctccctggcgccgggcctctttctctgcctggcccagggctggcggccggcgggggtcgcggcggcggcagtgggggcgctggcgggccgcgggtggcgggggccgggccgcggctccgggtgttaggagacaagatggcggcggctctcagaaggccggtctcctcctctccgccgtcctccgccccgccgctcgccgcctcctcctctcgggtctcctcctcctcgtttgctgcctcctcctcctcctgcagcagcaccagcgaccgccgaagcgccggctcgctcacccggagctccggaggtggatagacggggcagctgcaggctccggcgaccgaggccgagctggggccggggcggggacggcggcggcggcggcggcgacggcggcggcgccgggtggggatggggtcgcagacgctgcagatcctccgacagggggtgtgggccgcgctcagcgggggctggtactacgacccgcaccaggccaccttcgtgaacgcgctgcacctctacctgtggctcttctgctgggcctacccttcaccctctacatggcccttccttctaccatgattatagtagcagtttattgtcctgtgatagctgctgttttcattgttctgaagatggtcaactatcgactacacagagcacttgatgctggagaagttgtagataggactgcaaatgagttcacggatcagcgaaccaaagctgaacaaggcaactgttcaaccaggagaaaagacagcaatggaccgagtgatcctggtggagggattgaaatgtctgagttcatccgagaggccacacccccagttggttgcagttccagaaattcttatgccggtctagatccaagcaaccagattggatctggttcctcgcgtcttggaacagcagcaactattaaaggagatacagacactgctaagacttctgatgatatcagtttaagtctgggccaaagttctagtctttgtaaggaaggaagtgaagaacaagatttggcagctgatcggaagctctttcgtcttgtctccaatgactccttcatctctattcagccttccttatcctcttgtggacaggacttgccaagggacttcagtgacaaagtgaacctgccaagtcataaccaccaccaccatgttgatcagtctctgtccagcgcctgtgacacagaagtagcttctcttgtacctttacactcacactcttatagaaaagaccaccggccgcgaggtgtaccacggacttctagctctgctgtggcttttccagacacttcactgaatgattttcccctttatcagcaaagacgtggattagatccagttagtgagttagaatcttccaagcctctttctggatccaaagaatccttggtggaaaattctggtttatctggggaatttcagcttgctggtgacttgaaaatcaatacttctcagccacccacaaaaagtgggaagagcaaacctttgaaagcagagaaaagcatggacagcttgaggagcctgagcacacggagtagtgggtcaacagaaagctactgcagtggaacggaccgggacactaacagtactgtcagcagctataaaagtgagcagaccagctcaactcacatagagagcatcctgtcagagcatgaggagtctcctaaagcaggaacaaaaagtgggaggaagaaagagtgctgtgcaggcccagaggagaagaatagctgtgccagtgacaaaaggactagcagtgaaaagattgctatggaagcgagtaccaacagtggggttcacgaggccaaggaccccaccccctctgatgagatgcacaaccagagaggtctcagcacctctgcatctgaagaagccaataaaaatccccatgcaaatgaatttacttcccaaggggacagaccacctgggaacactgcagaaaacaaagaagagaagagtgataagtcagctgtttctgtggattccaaagtgcgtaaagatgttggtggaaagcaaaaggaaggggatgttcgacctaaatcttctagcgtaatccatcggacagcttctgcccacaagtcaggcaggagacgcacaggaaaaaaacgggctagcagttttgattcaagccggcatagggactatgtttgctttcgaggtgtttctggtaccaagccacacagtgctatattttgtcatgacgaagactctagtgatcagagtgacttgagtagagcatcaagtgttcagtctgctcaccagttcagcagtgatagctcttctagcaccacttctcattcctgtcagtctcctgagggcagatacagtgctctaaagaccaaacacactcataaagaaaggggcacagactctgaacacacacacaaagctcatttggttcctgaaggaaccagcaaaaagcgtgcaacacgacggacttctagcacaaatagtgccaagactcgtgcccgagtgttgagcctggacagtggcacagtagcatgtttgaatgactcaaacaggttaatggcacctgaaagtataaagcccttaaccacttcaaaatcagatcttgaggccaaagagggagaggtgctagatgagctatctttattaggacgggcttcccagttagagacagtcactcgatctaggaatagcttgccaaaccaggttgcatttcctgaaggggaagagcaagatgcagtcagtggagcagcacaagccagcgaggaggcagtgtcatttcgccgtgaacgcagcacatttaggcgccaggcagtacggcgccggcacaatgcagggagtaaccctacccctcctacattgctcatcggatcacccctaagccttcaagatggtcagcaaggccagcagtccacagcccaggtcaaagtccagtcccgccccccttcccaggctgcagtgctcagtgctagtgcctccttgctggtaagttctcttctacgctgtatgagactggtggctgtgatatgtcacttg

SEQ ID NO: 64816 - DNA, 769 bp, Homo sapiens
accaaaaggaatactcccattgaagctctctgtgagaactttccagaggagatggcaacctaccttcgatatgtcaggcgactggacttctttgaaaaacctgattatgagtatttacggaccctcttcacagacctctttgaaaagaaaggctacacctttgactatgcctatgattgggttgggagacctattcctactccagtagggtcagttcacgtagattctggtgcatctgcaataactcgagaaagccacacacatagggatcggccatcacaacagcagcctcttcgaaatcaggtggttagctcaaccaatggagagctgaatgttgatgatcccacgggagcccactccaatgcaccaatcacagctcatgccgaggtggaggtagtggaggaagctaagtgctgctgtttctttaagaggaaaaggaagaagactgctcagcgccacaagtgacccagtgcctcccaggagtcctcaggccctggggactctgactcaattgtacctgcagctcctgccatttctcattggaagggactcctctttgggggagggtggatatccaaactaaaaagaagaaaacagatgcccccagaaggggccagtgcgggcagccagggcctagtgggtcattggccatctccgcctgcctaaggctctgagcaggtcccagagctgctgttcctccactgcttgcccatagggctgcctggttgactctccttcccattgtttacagtgaaggtcgtcattcaca

SEQ ID NO: 64817 - DNA, 933 bp, Homo sapiens
accatcagcagtgacacggacgaggaggaggaacagaaacacgcccccaccagcactgtctccaagcaaagaaaaaacgtcatcagctgtgtcacagtccacgactccccctactccgactcctccagcaacaccagcccctactccgtgcagcagcgtgctgggcacaacaatgccaatgcctttgacaccaaggggagcctggagaatcactgcacggggaacccccgaaccatcatcgtgccacccctgaaaacccaggccagcgaagtattggtggagtgtgatagcctggtgccaggtaatttggggccaggacagggcaggaacctctccctggagagtggttttcctgcttttctgctgctagaaatgttgctgtatgggagctagtacaatagaaagtgcccagtgactgcaggcgacccttaccgaggattttattcaagtatccaggggaggcttctgctgaacagcacattgtataagcagcgttttccttctttaatcctgtaatcaatacctctctgcctttacaatggctctgcttccaactaggttgattaatagaaaataaaagcctcctggttctttatgcctgagcctggaagaatacctggtctggggagttcctggctgacatctagcaccactctctgccaggaagccctggtggtcagatgggcttcttgtgtaggaagaacctcctccgagtcttgctagggaagggtgaaattggcccctctcagcccctcctcggaatcagctgctgggcggcgagaccaagccatgtgtgtttctctgctcatgcactgctatcttcagaggactcctcctgtcccgcgaaggcttgtcttgaaaattgggccctggaataaaggctgagaacgtaaccttctgaataaactcagtggctcactgtaaaaaaaaaaa

SEQ ID NO: 64818 - DNA, 312 bp, Homo sapiens
taccggtaaggactgcaacccgcagcccgctaactgcctgaaagatcaatacgtcttacgccattgctgcgtggatgatcggtcgggcaaaatgggttattccgtaaaatttcttgttttaacaaggatggacacggaaacggcctcattattccactgcaagccttgttatagcaagatgacttttaccatttatcacccgcttactcacagttttttcacttcttgctggtgattggtttaataaccatcaataaagtgatcacgcagtgaagtaataaggtgcaaaagtaaatataagcatagaaaaat

SEQ ID NO: 64819 - DNA, 788 bp, Homo sapiens
ttttttttttttttaaaggtaagagcactttattcttatttgaaccacactgtattgttgattaccgagtgtgaaggtagtatgttcagagtcttgttttatgcctttgtagctgtgttgccagcatttgaaggtaactcctccacataagcggcaggaaaatggccttttttcccattcaaagatccaaaccaccatccttcttcttttttctcgtgtataatcacaatgtcacccttttccaaattcaactcatcatcttgcctggcttgaaaagaatacaaggccttgcaaagtctgctgctgagctgggctgcaccaggggctggagttgaagaacctggattgctctgcccaccagaagatgccttgctcacaatattctctaatctcttcattaaaaaaggccgagatattttcacatagctatgagtatgctccttttccctccacctgaagatggaattactacaaggatggctgggttgaggtctttgctcaagttctgctaacattgatgacagtttgtaggagttcgcttccaaaaggtctagtttcaaattgttctcatccattaacgctgctgtgtctttctggctctttgcatcagagaaggaggaggtgctggagtacgttttaagcattcgttccaggccttccttgtcttttgaggctttttcaatgtctctctgcagtctcaataattttggttttagtaaagactttcgtctctctttatccattgcactgttaggatcttcttcaaagtaatccgttaacaggaactc

SEQ ID NO: 64820 - DNA, 415 bp, Homo sapiens
  misc_feature (1)...(415): n = a,t,c or g
ctcagcttatgaaggcctcacaagctctggctttaacaatggcctgggctccagctgtggctttggcagggcctctggcttcttcagctgtaccagctcctatagggccatggttgtgaggaagatcaagacctatgatgggaagccaatgttcgagtcctctgatgcactgcccaagtgaatggctgtagcagcccctcccaacctccccttcctgtggctgccccagagcctgtgagggatgctgcagtacaggggagcatagggaacaggagatccatctgaggctcatccttacccctcagcccacccttgtnggaaggttttatttgcatggagtacccccantttgcccattgcccccaacaaatttattttgtattttttcccaaaattaaaaggncttcagtttagg

SEQ ID NO: 64821 - DNA, 957 bp, Homo sapiens
ttaagtaacaaatattgaaaaatttcatttgtacagtttatggttttaaagaaaccatcctgaataagctcaagttatagctaccagttatgaatttataaagtttatcgtgacctttattataattaatatttgtattaatcatcacatattattatatataagatataaatttaatataactatctggtaattatacctatgtttactaacaattttacaactgctggctgcagcggtcgcatcgacattcatttattattacatttcccattttgcaaaatgtttagaggaacttcccttccaatttgtcaggtgtgaccccatgacttgcatgtctctggggacactctgggaagatgtcttcatagataagagctcagataaacatgagacagaacagtcccaaaatccctcagcatgccccagccctcaggggagttcctacttgtttatgaatctgtccatattatagctcgttgagtagagaaattccaggatcttcctgcatggatttctgatcagaagagtggtccagagtgagctgtcataatacacttcttcttggcgcagagctccccctttgatgatctccagggcacattcctcctttggagctgcttgcatatggactatcccagaaactgccttcatggctgtttctgtgtctatgaggccaagaacacagagagtgattgatacattgaccctggacactgaatattcctttctgatggaggagaagaacccatccaaagcaaacttgcttgcagaataggcagcaaccattggataagccactttcccagccagagaggagacgacaacaatgcttccattgctctgcttcagcatgggcaaggcagctacagtcaggaccacgtaactgaggaagttgacttccatgcttttgcgcacatggtgaatatcatcatgaaaaagattcaaagaagtgtt

SEQ ID NO: 64822 - DNA, 1316 bp, Homo sapiens
aaaaagacaaaagcaagtatttatgaaagtccatcagattcctcagtaaagctgaagtcacacactagagacaggtggtctgaaggataattgaaggaaggtaacctgttgggtccaatctgttcttcagtgagcagatcgagagctgaccttacatttagagcatgtttagaataccagatgtaatccagggtgtgcctgcactcccctgaggtccggatcttccaggtagtgtatgggggttctgactgcccatcagcactcagcagcttgtaggcgctgttcaggttgaggctggaggaagcaaagtgtttgtagacctcttctgttggctctgcattgaagtccccacacacaataaggggaatcttggctccttgggtgatgttttgcaggttctgaaggaggtcacagccttgagctgatcgaaaccgctcccagccagtgcgtgcttttagatgggtaacagcgatgcagaactgtcggcctgactccttgcactccagggtctgtgcaatggccacctggttggttttcaatgtcatggctgtcagcctaatattggcactgttgactagcttgaatcggttttgaagaaaaaataaggcacaaccatctggtccattgttgtgttctacatctagacaaggtgaccagggtttggggaaaaacgtgccttgatagcctagtctactgaggagtggctggaaggtgtcaaaatagtggtccacctcttggaggcacaatatatcaggctggtaggccaggatttcttccaggatgagacatttcctttcttcccatttgagtgcttcaacagggcactgtacaaagttgtctttgccttctccaagagcttgggcgaggatgttccattgcataaccctgataggtgggtgggtactagggcaatctgtcctcagatccacaaaatccctctggaaccggggaggtcgggtgtgcaggacggccctgcattcctcaagaagctctttaggatcaatgggctccagatgctctgggtcaggtgacaccaaatactctgggtgctgggaggcagcgctgctgttcagtgtcttggcgagaccactatagagtctgcttgtaccggttcccatggaacacactgttcgggaacacgacctcgcggcgcccgaggccgccgaggccgccgccagcagccggggggatgcgggcctgggaacagcagccggcggggacaacgggcggcgcagccctggggcgggcaggcggcgcaggccgggcgcgcccctctgcagcagggccgagcagagccgccgcggactatgaaacat

SEQ ID NO: 64823 - DNA, 1382 bp, Homo sapiens
ttttttttttttaaaaatcactgtcaattttactaggatttagaatataaaacctttacatctcttttacaataaagagaatttagagctcacttgtcaggaaaatatttttcattattaaaaaaaattgttataaagttatttcttctgatatggagtttcaaagcatctaacataaccgcttcagaatctccacagtgcaaaaataaacaacatgcatacacttaagaactttacattctttgaaaaacaatacaaattggaaagaaaattagtatgtgatcaaagagagtcagagctcaagtctgaactttgccaataaaggcagatgatctgaagagttattttcgtttggaagtccattaacagtccataagtcttgttctgtaagaagtgacagtctagctagaagtttcaagccaccaaccaaagcaacttcagctcctgggtgcccagcaacatcttccttttctgcagagtagaaaatataatccacagttatggcacttcgggaatgacaggtggtcacttctggaattccagtgtcaggaaagtaatgtgaataaacagatgacaaactgaaatggtgctgtaaatttgaagacaatttttcagctgtcactaggacctctgtttgcttcagctgtgtttgtgtcagatcactgtctgtcttttctacttttggtacctgctgtacctcatacacacagttctgtgagatacctaggtttgggggccaaattggaatagataaaattctttgtccccgtgaagactgttcctggccagatacctttcctatgggaagtccttcataattcaattttccttcctttatgaaactatatagtggagaaccaggaacagaattaaagtcaccacacataacaatagggcagaagctgccatctttctggtgggcaacactggaaatctctgccagtagcattgccaattgcgtcagcttaatatcacctcgccttggattatacaacagatgcgtatttgctacgcagattgcagggcaggcagcatatggaattttgggctgtaagagtaaaactaatccaacattgtctctgtccaacagagaaatatcagggcggaagaattccactgggttcactgacaagagtgaaaatttggaatgtttgaagcaaatagcacagccatcaggtttccttcctgtccgcatcttatattcacagtgataacctacaagaaacaaatgaatttaaaacaaatgactgcttttatatatttatcaaaacacagctcacgtgatacttctgaacaatgtttaccaaactgtattctgcaaaacattagtaatgtaggatgtcaataaacattggaataaaaaacgtttgacactgggtcta

SEQ ID NO: 64824 - DNA, 3450 bp, Homo sapiens
cagggtggtgaactaaaaaagctggttcctgtgaaccttgggaaatggtctcacccctctgagccctggagatgacctgatggggcagctaggaggtccaaatggaaggactgcaaataaaaggcactgggaactctcaggggccacacacatgtgagatcttcccaataaaatcagccttagctttaaaaccaggaaattgttagcaacaggctctcaccttcctccaacacccacagcattgcctatctccctgtgatagcttgattctaaagataacagcctgcctttactcagaaaccaggactgtgacgtgttttgcacacattctcttttcactttcacagtgtgtgactatggcatgcaacttatgttctctgtgcctcagtttactcaagtgttaaacaggaatactcacatgaggattacatgagttaaaatggataaaatggataaaagtagagagtaaattatttaaactttatcaaatccttggtacatgaccttaatacaattaagtatttgttaaatacatacattttaaagaaacgtcatcatatccacacacctatgaggcacctgcccaggaccacagagccaatcaatcaggtgatgagtgattccaggccagcaggaaaccaccgcccactgacacagggactgcaccatccatccttggtttgcatggtgcctgccatgcttcctgtattactgttaaatacatggggcaggcctttggaggatcccaatgttttaaaagggcaatacgaatatgattctaatacataaaaagtatgagggcagcaagaatttagttacaaaacccaaaaatcctcaaagagaagccacatagcactgtgcagtgttaccactgcctcgagtctggacagggcacaggtgaccgagacaagtcttatttaactgatttcacaagaagggtccgagttttattagacaacccatgtcaaggtacaaaatgattaatgacaatatcagccatattctattagccaagtgccacctgtcactatgaaactatcctgtaggacatccctgggctctcagttgctaatgggctgctgaagaaatgaatgtcctcaaatcgagaccctaacacaaagagattccagagagtggcttagaaaacccagctactcttaccaatgtggggaaagggtcaggggaatgaacctctgcaggacaatttgaattcccaaactgagtaagagcgaaacaaatatgcaggcaaggcaaagcctcaggggggctcctgggtctggggcagggggtgggagacaggagaggcaaaatggcagggacttgacagcaggttcctcttgtctacttcttcctcccgcctctctccttgagggccaggtggatgactgcgccattggccatgttgtagtaagccagtgagttggaatctttgatgaagataccctcatactgtagcttctgtttccctgcaggcatgcctgtggcttcatgaatcttcaccttaatgacagagacctggtccgtgagtgggagggtgaagaccagcacctgcccattcagtttccattccgtcttatcctgcatgttgggcacctggactttgatggacactggacccttgtttctgcgcaggaactcctcctctggcatgaggctgtcctctgtcttcagttttttggaggtgggctcatcttccatgggaggtgggggatgcacagggggcattggggctggagctgggacaggtgccacaggtggagcaggcacaaaggctgttggcacaatcatggggggtgggcggggggccataataggaggggccgagggaggcatgggcaccacgttgattctgggcgcgtggatgatgggcggcatgggggcgatcactgagcctgggggcagccggaccacagatgccattgggggccggggcatgacgggtactgcggagacaactgtagtacgaactggaggtggcattgtgggtggtcggggcactgaagtgatgggtggagccgagctggggatgttggtggctgaagatggtggcggtggctgttgagggatttcattgggcttgctggggccaatcttctctttagtgtcatcctctggcaccaggcctttggccttgtgaatggcctcaatctgctcctggagggtgatgttggcctgggcagcctgctgggtccgggccatgctgcctgagtggccatcccaggtcaccttttcctctggcttctggatctcctcctcaccgatcttcttaccaatggctgtttcctctacaccgaagatgtcagtacgccgctcagccaactgcttcaagctgctctcaatatccagacctggtgcgtacacctcatcatcgctctgcttctcacggatggagcgatcccgctgctccagccagcgagggtcaagaagtccaatgcgcatgtgttcctgcattttgctggcggggatcttctccccagtaatgggggacacaagatactcatctggagcaggggctggaggcaagggcttggaggctttgggatcataatccttgcggacaatgacttggtctggagttgggggcagaggtggaggcatgggtgtctctgggggtgggggcactttctgcccttcttcttcatcatctgaaccctcatccatatcttgtacttgggtgtcctggtccagctgggaaggaggctcctccgccttctcctgtttgtcatcctcctcatcagactcgacctccatctcaacttcctcactctccccaaacttttcatagcgctcctgaatgaggattcgggcccccagctcctctggcgtggtggggggagggaagttcccttgctcattgggttggaagtccactgtttccaccaccacaaaatcatgccagtcgatctgagcataggccacccgctccttctccttctcctcttcttccttcttcctctcacgttcctggaatttggcccattccactcggtaacacacctgatccaaaacttctcgggggttttcagcctctttcttgagctttgaaaataaacctttgggtggaatcaagatcttggtgtactgttccactagcttcgtgaagtagttgaagaggctgtgctgtgggcggagaaagtcaaactggtagttgcgctgctctttctgcatcagctgggtcagaaactggcgcccattcctggccacaaattgagccgtcagcttcaccacatccaagtcgaaggctgagatagagggaggatcagcaatgaactcaaactcaggaggaggctctttgggcacgatggtctcttggattacttgggcttggaccttctggggcagctgctgctgggtggtctgctgctgctgctgcatgaccttggggatggcggcggacggctcctgagccttcccttccttgaactcgctgaccttgtggcggtagtaggc

SEQ ID NO: 64825 - DNA, 1927 bp, Homo sapiens
ggcacgaggtggacatggcgtgcggctttcgccgcgctattgcttgccagctttccagagtgttgaatcttccaccagaaaacttgatcacatcaatatctgcagttccaatttcccaaaaagaagaagtagctgattttcagctttctgtggattctttattggaaaaagacaatgaccattcaagaccagatattcaagttcaagccaagagactagcagagaagctaagatgtgatacagtggtgagtgaaatcagtactggtcaaaggactgtaaatttcaaaataaacagagagctcttaacaaagacagtgctacaacaagtaattgaagatggctcaaaatatggattaaaaagtgaacttttctctggacttccccagaagaagattgtggttgaattcagttcacctaatgttgccaaaaaatttcatgttggacatttgcgttctaccatcataggaaattttatagcaaatctcaaagaagctttaggacatcaagtaataagaataaattaccttggcgattggggcatgcagtttggtcttctgggaactggcttccagctgtttggctatgaggaaaaactgcagtccaatcctctacagcatctctttgaagtttatgtacaagttaataaagaagcagcagatgataaaagtgtagcaaaagcagcacaggagttcttccaacgattggaactgggcgatgtgcaagcactttcactgtggcaaaaatttcgggacttgagcattgaagagtacattcgggtttacaagcgtctgggagtatattttgatgaatattcaggagaatcattttatcgtgaaaaatctcaagaggtcttaaagttgctggagagtaaaggactcctactgaaaacaataaaaggaacggctgtagtagatctctctgggaatggcgacccctcctcaatttgtactgtaatgcgaagtgatgggacttctctctatgcaaccagagatcttgcagctgctatagatcgaatggacaagtataattttgatacaatgatatatgtgacagataaaggacaaaaaaagcattttcagcaagtattccaaatgctgaagatcatgggatatgactgggcagaaaggtgccagcacgtgccctttggagtagtacagggaatgaagactcgaagaggagatgtcactttcctggaagatgttttaaatgagattcaattaaggatgctacagaacatggcttcaattaagacaactaaagaactcaagaacccacaagagactgcagagagggtcgggctcgcagcactcattattcaggacttcaaaggtttactcttatctgactacaagttcagctgggatcgtgttttccagagtcgcggggacacaggagtcttcctacagtacacacacgcccgcctccacagtttggaagagacttttggatgtgggtacctgaatgacttcaacactgcttgtttacaagagccacagtctgtttcaattcttcagcatcttctcaggttcgacgaggtgctttataaatcatctcaggactttcaacccaggcatatcgtcagttaccttctaactttaagtcatcttgcagctgtggcacacaaaacactacaaataaaagatagtcctcctgaagtggctggggccagacttcatcttttcaaagctgtccgttctgtcctagccaatggaatgaaacttcttggaataacacctgtatgtaggatgtaatttccattaaaatggcttttaaaatgtcaaaaaaaaaaaaaagggggggcccttttaaaagaatcaaattttactgccgggggcggggagagtaatattttttttatggggccaccaaattaaaattggggggcgggtttaaaaacggcggggagggaaaaacccctggttttccc

SEQ ID NO: 64826 - DNA, 2725 bp, Homo sapiens
tgaaatctctagaggaagaacagagagcccgcaaagacctggagaagctggtgaggaaagtcctgaagaacatgaatgatcctgcctgggatgagaccaatctataagggacgtcctcagttctttctgttgaagaccagttctgaggtgaagctgggcacccctgacccaagtcggggtgcactcaggaccacagggcagggctgggtggggcgccaccttgctctctgtatatagaaaagctggagcttattctgcgaatggagacgatcaaaccatgactgatgaatccagacaggagggattgactctgaggacctgagctacatcaatccactctgtgaacatctcagttacctcattctgcaataagttcagtgactgactaaaagtcttgtttttccagactttgaattgaatatataaatattatatatacatgtttcttgtaaatatcccattttgaatgcatacctgtggtggttctgtccgggctaatccccatgctagaatgtcctttccagctacgtgaataagaagtcccatgcccgcatccaccggaagcagaagcctggtggatgcctggttcgttccgcagcaccagggcctccaccgtgctgtggcagcaccccccatgtcggtatttctaaataaccttatttatacctgcagagatacacttcagtcccattcagaagtcttctcttaaagcagcattacagtcccagacctgcgggtttctgagggcagcttgctggctgacagactcagtcttgacctcaaggaaggcccatacggcactgccgcatccacctagaggtgtttgctcttgtccgctgtctgagtactgtgattctcagatgagtttgctgcgttttgggaggacacagacggttctgtataggctagttcagtaacaacaaaatacactgttttgtcttccctcaaagagagatcttactagaacctgtaaatagaatgtattatttattataagtcactgcagctgatgaaaacagatggaggccatgctgcaggctgatactgatgggtggagttttgtcatcaggccagcctcatcccgaggtctcctccaccattggccgtagccagcaggcttcagtgctcaccgaaagtaaaatcccctccttcagcaagaataaagcaatatacaccttaggttccactaagtaacataggcataagcagggaacgtttcccccactgtgttccagtgcagaggagacgaagcctgtcctcaccgcggctcgctgggcccaggctggctctggaaagcctgtgcggtcctgggcaggaagcccggcccgtggagcaggttttcgttctgcttcagcaataaataagggtgaccacagggactttgcttttggtttcctttcctgtgaaaaggttggttttaaagtgagatacacttttccgtagaacaagtgttctatctttaaaaacccaaattgcagcaccgtggattactggtctcagaacaactcattgcgcatcagatttgactctctgattttctgtctattggccaaattgccctttaactgcacctgaatcctttgtgtactgatgcctttgagctgggcaccttgggagagtgttgtgttgctgtttacggttcttccttgcccttgctaattacagtctctggtgcccagcaagcccctttggcttccttccgtgactggtcacgttgtctgcctgggctcagcgtggacctgccccatgctgcagaacctggcctcacctggacttttcactagaattgccagcttcctcaacttagcagatcattcactcatgcgggcacaagcaaagatcaacactttcttttttggtaagcttgagttttacaagttattttttggtgatgcgtaagacattgcagtgggaaaccattcaacttgagtttattggagtttgctgttgtagcaggttttaactcaggaacaactcttgtctgatctctccgcccctctgccgggaggcgacattaactgtcctctcggagccggtagcgttgctgtccgagtccccaggacggatctcctgcagacctgccttaatgctcagatcgaagtatttcacaagaatacttgtgtttttaacagcccttcccctggacggtgcggccatgagggcctcatgttacggcattgccttttctttctgtggatccagtatcttcctcggctttttagggagcaggaaaaatgcgtctgagagcaactctttttaaaaacctgccctgttgtatataactgtgtctgtttcaccgtgtgacctcccaagggggtgggaacttgatataaacgtttaaaggggccacgatttgcccgagggttactcctttgctctcaccttgtatggatgaggagatgaagccatttcttatcctgtagatgtgaagcactttcagttttcagcgatgttggaatgtagcatcagaagctcgttccttcacactcagtggcgtctgtgcttgtccacatgcactgggcgtctgggaccttgaatgcctgccctggttgtgtggactccttaatgccaatcatttcttcacttctctgggacacccagggcgcctgttgacaagtgtggagaaactcctaatttaaatgtcacagacaatgtcctagtgttgactactacaatgttgatgctacactgttgtaattattaaactgattatttttcttatgtc

SEQ ID NO: 64827 - DNA, 414 bp, Homo sapiens
cccacgcgtccgggactatctttgagttcatcttgttctgaatgtgagtctgagtctttgtttccagatgacacagtgctgtctgagtcctctgaatcacctgcctcagaactgcagcaaagtttctgctgcccagaaactgaatgggctgcttgtaatgcagattcttcctcctggacaagaagtgctgctgcttctagttcttccagttctaaccccaactgggcctttgtaagggagacttcctttaaggcttctgcaagagctgccaacgttttggatttgactttctgagtccacacacagtagtatgagatgtagagatcattcagtatgtatgcctgggtcgtttcctgaaaaattttgtgaatatccaggagacactttaaaactgcacttttacttaattgcagg

SEQ ID NO: 64828 - DNA, 896 bp, Homo sapiens
accgggtcgacccacgcgtccgcagtctcgccggcctccgtgccggggcagcgccgcttggcatcacgtaacggggacctgaatttacaggtggcgcccccgccgcctagcgcccacccgggcatggaccaagtgcacccccaaaacattccggattcccccatggccaacagcggacccctctgctgcaccatttgccacgaacgtttggaggatacgcatttcgttcagtgcccttccgtccccagccacaaattttgcttcccttgctctagagagagtatcaaggcccagggggccaccggcgaggtgtattgccccagcggagagaaatgccccctagtcgggtcgaatgtaccttgggccttcatgcagggcgaaatcgcgactatcttagctggggatgttaaagtgaaaaaggagagagacccttgaaccactgggcagccacctcctttgccctagaccagctcctctccaatcctgagggcccctcccccaacccaactcgaccctccctcccctcacccccaaggtgtagaattgtgaatataacgaaactgcaaaaagttagtcttatgtatagacattattttcgtcgtatgtttctatattttgaaacaaaggtatgtaacttcttcatttgaaggataagctggtttgtgttaagcagtatagtattggttgggtcatttgcatcatatcgttagcatttatttggtggcagaatgtttgcctaggtacagaattaatagcccttagcaacgactgctgctggtgtgtatttttgtaaatgttatgcactctctgaaaggaaaaacacacacaaaagaaaaagacttttttttttttttttttttttttccaaggcccagggttgctgcctaaaaaaaaaa

SEQ ID NO: 64829 - DNA, 6397 bp, Homo sapiens
agaccaacaaattcatcaaggagctcatcaaggacgggaagtcactcataagcgcgctcaagaatttgtcttcagcgaagcggaagtttgcagattccttaaatgaatttaaatttcagtgcataggagatgcagaaacagatgatgagatgtgtatagcaagatctttgcaggagtttgccactgtcctcaggaatcttgaagatgaacggatacggatgattgagaatgccagcgaggtgctcatcactcccttggagaagtttcgaaaggaacagatcggggctgccaaggaagccaaaaagaagtatgacaaagagacagaaaagtattgtggcatcttagaaaaacacttgaatttgtcttccaaaaagaaagaatctcagcttcaggaggcagacagccaagtggacctggtccggcagcatttctatgaagtatccctggaatatgtcttcaaggtgcaggaagtccaagagagaaagatgtttgagtttgtggagcctctgctggccttcctgcaaggactcttcactttctatcaccatggttacgaactggccaaggatttcggggacttcaagacacagttaaccattagcatacagaacacaagaaatcgctttgaaggcactagatcagaagtggaatcactgatgaaaaagatgaaggagaatccccttgagcacaagaccatcagtccctacaccatggagggatacctctacgtgcaggagaaacgtcactttggaacttcttgggtgaagcactactgtacatatcaacgggattccaaacaaatcaccatggtaccatttgaccaaaagtcaggaggaaaagggggagaagatgaatcagttatcctcaaatcctgcacacggcggaaaacagactccattgagaagaggttttgctttgatgtggaagcagtagacaggccaggggttatcaccatgcaagctttgtcggaagaggaccggaggctctggatggaagccatggatggccgggaacctgtctacaactcgaacaaagacagccagagtgaagggactgcgcagttggacagcattggcttcagcataatcaggaaatgcatccatgctgtggaaaccagagggatcaacgagcaagggctgtatcgaattgtgggggtcaactccagagtgcagaagttgctgagtgtcctgatggaccccaagactgcttctgagacagaaacagatatctgtgctgaatgggagataaagaccatcactagtgctctgaagacctacctaagaatgcttccaggaccactcatgatgtaccagtttcaaagaagtttcatcaaagcagcaaaactggagaaccaggagtctcgggtctctgaaatccacagccttgttcatcggctcccagagaaaaatcggcagatgttacagctgctcatgaaccacttggcaaatgttgctaacaaccacaagcagaatttgatgacggtggcaaaccttggtgtggtgtttggacccactctgctgaggcctcaggaagaaacagtagcagccatcatggacatcaaatttcagaacattgtcattgagatcctaatagaaaaccacgaaaagatatttaacaccgtgcccgatatgcctctcaccaatgcccagctgcacctgtctcggaagaagagcagtgactccaagcccccgtcctgcagcgagaggcccctgacgctcttccacaccgttcagtcaacagagaaacaggaacaaaggaacagcatcatcaactccagtttggaatctgtctcatcaaatccaaacagcatccttaattccagcagcagcttacagcccaacatgaactccagtgacccagacctggctgtggtcaaacccacccggcccaactcactccccccgaatccaagcccaacttcacccctctcgccatcttggcccatgttctcggcgccatccagccctatgcccacctcatccacgtccagcgactcatcccccgtcaggtctgttgcagggtttgtttggttttctgttgctgccgttgttctctcattggctcggtcctctcttcatgcagtgttcagcctcctcgtcaactttgttccctgccatccaaacctgcacttgctttttgacaggccagaagaagcggtacatgaagactccagcacaccgttccggaaggcaaaagccttgtatgcctgcaaagctgaacatgactcagaactttcgttcacagcaggcacggtcttcgataatgttcacccatctcaggagcctggctggttggaggggactctgaacggaaagactggcctcatccctgagaattacgtggagttcctctaaccgtgggccccagcagaactgctgagctttacatggtatccatgacaactgctgattccagtgtcgaggccatttctctttgccactgagaaatgcagcgtgactgactctgttgctacctgtcaacatgaatgtttctgtgagctctggtgtcactcatctccatgatcatctcagccaacatgcatcagtactgcaagaaaagaagtcaatcagcagaggagagcatttgataactaagaggaagacttgcaaagccgttttctcatgagtaccctgaatagggggcactcattttgtttcaacggtccaaacgcccaaccttcagaaagaggaagtcagatagaaatagtccctgagagcacactgtgtaggctaagcctgctggggctgggtgaagaaattggcgctgagatccaggctggatccattgcttttgtttacaataggcactctctctaccccacctctcagtacttgagacttaaagtgctacaggcagctggatctgtttgcatgcaggatgaagagggttaaaacactgtttatataagatccaatctctcaccatctctaaagcagccgttggcctgtcatcagtgagatacaatccagtcttctcatgcacgggaacacacacaccctgcgtttctccctcccaggctaggaacctctctgccaccaagggctgccatccatcgcctagtaaccacggcaacccaacctactctaaaaccaaaccaaaaaaataaaataacacatcctctttgcatgacacatttttttctcccctttttggtacactttttttgaatggttttctaacaacttgaaacacaggatcaaggaattagggtggtctacttgaggcagatgggatagtaactgggaactgttccctttctgattaatttcagcagcatcggaatatatttggagcacaccctagtaacctcttgagattaaattacatagtcttaatatttctgttcctccatgcaactgatgtttgttttttaaagggtaagatgctgcctcccaatgggtgatgccatctgactggtttccccatgtcctcccattcacccatctctgctcccacccttgcctgcctctaacccaccactggccagcccccttgccctactctgggctgctgaacactggtgctgtggtggttttcaaggttaattcctaggctaaccgtatggcctatagtttaaaagcacatctatgttcactgccactctgaaaaagggaattatttctcagtctttcaaggcttgagactaatataggccattgtgattcaggaaagaaaccccaaggttggagggtgggatgagtacccctcctgaaaaagggaatttgctggtgaaaagaggctggatcttgtggaagactgtcttggatggggaagtactacctggagatttcaaattcacttggcctgcaaacaacagagttatccgtatcttccacatgtgaatgtcattgcaagggtgactctagacaaactacaaaccgatggaccgtcaagctccccaggagccccttggatggcagcgttgcttcagagtgtttcctgtttctggaattccttgttagggaactttaaagaagaaaagaaaaacttgaattgtgttgaattactgtatcttttacttttttttttttgaaaagataaacttgtcaatagagtgatttgaaatactatatggcaaagttttatatttgatattctttaagttagttgctcacacacttaggctttgattgctgaagaagtatgtttaagagggagagaggggaggcaaagctgaagagagtcaaggtcactgtccccgcttcggcctgaaggaaagagaagacatttctatggccttgctctctgctgtcctgttggtgggcacgacacatcagtggtgttcagtctttatgtgtttttaagcatcccttgggctttggatttggagatgggaagagcatctccaggcaatgagtttttcaaagaatgcctacttagtagtaagatgaagctcaggatttaaataagtggggtcaggcattcgagtttttgtctttcttctcaggggtatttcttggtacccccaagatatcaggccagaaagagatgagtcagttgctgtgctctttacttctttttctccacatcttctgaggctttagaaatgtggacaagctagttttcaaattttgtgtgcgtctgtaagttcttaaagaaccagcttcttagaatgttcagttctcaatgtgctgctgctttcccttctcctaaacattttaaaactcttccctttcacctccaattcccgtgatcccaaaagaagaggaagactccaggaggggtatagattgtgccgtcatagctttacaggtggttttaaagttagcaggggtttgtcatggtgattcactactcagtttatcagctcaaggattatacagctcttttccgggaactcacccaggagcaagcgagacactaccattgaatcagggaatgagaattaagaatggacaggaccaagacagaactcaagaaagccactggggaaaactcgagaagaaagggagtatactagtaggttagatctgtgaacctgaggacaagaagaccttgggaaatggaggcctcaggggatgtgcattcacatactattacgcttctcaaagagagaccaacatcatgcttttaacacatttgatgaggttttttatttgtgtttttgtttgttttttgagatggagtctcactctgtggcccaggctggagtgcagtggcgcgatcttggctcactgcaacctccgcctcccgggttcaggtgattctcctgtctcagcctcccaagtagctgggactacgggcatgagccatcacacccggctggttttttgtgtttttggtaaagatggggttttgccatgtttgccgggctgatctcgaactcctgacctcaagtgatctgcccacttcggacccccaaagtgctgggattccaggtgtgagccgctgcggccgaccacatttgatgtttgaagttgtaatctgtcccatcataaacttacctggagctcatgtggaggaacagaaggccaagatccttgctttgggggtgcctcacgaagcatccctgtagacacttggccccagcttcactgcttggaagcatgtccctccctcttgagttggctctgatttgaaatcgggagaaacagagctgctgccaatgggatcttttaggtaactccctccctagcttccgtgtgtctgtgcagtgcccatgagctgctgccaatgggatctttcaggtaccccctccccagcttccctgtggctgtgcggtgcccttgacagatggcttctctgtttccctttgcccagccaggctcccctccttcctattagctacaaaactggataaacttcagaatatgagccaatgagtaggaaggaacttgaagactaaagattttactctctcccctatccatgccccctacctctgactctctctgtgtgaacaggaaactttagggtagatgaggagaatgaattggttatcagagtggaagaccatggcccaggatccctgagctttcccagtagcctccagtttcctttgtaagacccagggatcacttagccatagcctgaatcttttaggggtattaaggtcagcctctcactcttccttcaggttactaacaaaatttcgtagctaaagaatgccatggccgggtgcagtggctcacgcctataatcccagcactttgggaggccgaggcgggcggatcacgaggtcaggagattgagaccatcctggctacgacggtgaaaccccgtctctactggaaatgcaaaaaattagccgggtgtggtggcgggcgcctgtagtcccagctgctctggaggctgaggcaggagaatggcatgagcccgggaggcggagattgcggtgagccaagatcgcgcccctgcactccagcctgggtgacagagccagactccgtctcaaagg

SEQ ID NO: 64830 - DNA, 958 bp, Homo sapiens
aaatcgaattcccgtgtcgacccacgcgcccgcgccattctctaggaggactgagcagatggtgggcaggtcctgctgggcagcaagatggactttgctgccgtggatgagaatggaaacaatgctcttcatcttgctgtcatgcacggccggctcaacaacatccgggttctcctgacagagtgcacagtggacgccgaagcctttaatctcagaggccagtcaccactgcacattttgggacaatatggcaaggagaatgcagcggccatctttgatctcttcctagaatgcatgccggggtatcctctggacaagccggatgcagacggcagcacggtgctgctcctggcatacatgaaagggaacgccaacttgtgccgcgccatcgtccggtcgggggctcgcctcggggtgaataacaaccagggagtcaacatcttcaactaccaggtcgccaccaagcagctcctgttccgactgctggatatgctgtccaaggagcctccgtggtgtgacggctcctactgctatgagtgcactgccaggttcggagtcaccactcgcaaacaccactgtcgtcactgcggacgtcttctttgccataaatgctcgaccaaggagattcctattataaagtttgatctgaacaagcctgtgcgggtttgcaacatttgttttgatgtactgactctgggtggggtttcttagtgagccccccggagggtccaggccacgtccttggtcacctccccagcagctgctctgctcaccagcctgaccccacccagagcaggagctggcgggtgtcttcctgcggcaatagactggaacgattaaggaccatggtgtgatagatcccatttcaaatgattccatatgattgtcagtgtgtgtgtcagactgtgatcgatttcactagatgtctcactcatcagaccaggccattgggcctaag

SEQ ID NO: 64831 - DNA, 1087 bp, Homo sapiens
ttttttttttttcaagatgcaaaaaacttttattttttgattacatggcctcagatagtttcaatcaataccatcaacaacgaattttatgaaacacgtttgtctttcctgtctacatagatgccacagtagccctagtgtttaagtgttgcctctcaaacttgtcctctttccagcattctcctctctcaacctgccactcttgaaaactcacttttcttttgcattttgttctacatgtgaaaaatatggaactcaagtaagacccaaggtagatcccaagggcttcagaaataccctgtcaagggcacagaatggttagcaatagagtccctatttaaggtcaatcatcgttaataacatgaatcttaaattctaacattacttacttaacagtccctaaattctaatattcctaacttcacaaaacaaacttttctaaaacttcttaccagtaaaggatatagctcacattaatatactctaagataaccttaagaattcttcattgccttgtaattcctgccaagtgttttcatcacatccccaaggctaatcctagccatctcctgcataatttttctataatacttctgcacatacacagcaaatggtcacacgtggggcacaatacgggtcccatctttctgagttaatggcaccatgaccagagaccccttgcatttggcacagatgaagcggctggtgtccaacgatttggtgtagcagccaatcctcgttttgcatccagtacattcataatggaccttgtagttaatcttatagttatggcaacgggtgaccctgggcagctccgggtgtatcctgttggatttcctggcataatacttccatgcgtcaccatgagaatcatggataccatcaatcagccaggaggcagcatggcacatttcatggatcaaggtatcccggattcggtctgcagagtcgcagactttcaagccaatctggatcttggcaaagcgccgccactttgggtaccacatctcaccagtgctgcataagccagcagttttcaccatcttgttattccagcctatgcgtagtttctctggcagctttttat

SEQ ID NO: 64832 - DNA, 2372 bp, Homo sapiens
ttttttttttttcaagcacatccacccatggtggctttattcagtcacgtccccacgcccacggctccctccaccaggcagacagaggggaggccaccccactgcaaagggtcccagccagtgggcaccaacctcaggaagacgtggtccccacctggagcttccctcggctgccctggcccttgagcccgtcctgaggatttgtgctttgactctgacagggagcagcaggaagctgccagcccactgcctccatgcgggtccttggagggcagacggtggagcggcgcttcctcagctcccgcggtcaggccccatcagggatggtcacagtccagccacaggggcgactctgcccatcagtccccctggggcagcgaccagatcctggctggggcagcaccgggacaggccctctctatgggcctaaggtcaatgcaggtgggggcttgctgggcccaggccaatgaacccacccgtaggagccctcactgggcagcagggccaggagggcaccagggactggccgcagagtccactcggggcaggcgtctgtggcttggaacctgccctcgccaaggcactggggggttaaggagcagatccctcagacggccttgggccagaagctccctggagagctgggcacctcgaggagcgtctgggagcctcaccctgtcccagtggctcctggcacccctgggagcgtcagcaccaccccaaagctgggtgcctgtgtcgccactaaacagaagggaaaccgaggcaggggggccggctggcagtggagcattctggcagcgccgggcgaccaagtcccgactggcagcggctggagtttggttttcagaagcgaaggctggcgttggcacacagggaaggctgcccgatgacgtgcctcgactgtgttacatttactgaaggagagcggcctcctgggcacgccactcaggcacggtgaggctctgtggcaccaccagccgcatggcagggcagagagtggcgccgtcctgcatgccccccacagcagaccagagtcccgtcctcacgctgcacagtgggtgatgtgagtttcaaaactacgcctccagaccgagaaaccctcccagctgtcagcaagccgtggcgccgagctgccgggcacctgctggctgctctccagtctcaaggagctgggacagcgggcatggggaggagctggcctcgagcccaaaggtcgtagggagccaggcagggcccaggagcacccggcacttcccgaagccggactctgtagaggacgagcgtggagggtctttcgggtgggggcagccccagctgtgtgccccgaggccccgggaagtggggacgggccgaggagggagccaggagcacggccttcctcctgggtgtctccaaggctgggcttcgccgccgagcctggttcacgtggggccgaggaccgcgtctgcaggcggctccagcaggcagcacgggctctcggcagggcctctgccctagacgtgctccatctccgggtccgggtcgggctcctcctcctcctcctcctcgtcttcctcgtcgtcgtcctcagcgcaggccttgtccagcggcgcctccccgtcacgggccagctcctccacgtgcgccagcatgtcggccatcagcgcctcctccagccgcttccgcacctgctgcaccagctcttcctgcttcatgatgtcctcgtcggtcaccatgaaggctttgcacaggggctgcgtggtgttgagccatacgccggggttcttctccacggcggccgagagctgtcccgtgatgggcatggtgctagtgtgcagggcgctggcgatggccgacagcagcgtctcatccgtgcagccaggtcccaccccctgcaggcccttggggaggtccatggtcttgaccagctcctcagcaatgtcgaaggcgttcaggccgctcagcttcttctcccagaagagctggcgcggctggtccaccgccttctgcgggtcgctcttgaccttgttgctggggtggttggtaatcttggtcaccggctgcttgaagatggacgccgtctggcgcacgggcagcgccgtgttcaggtcgggcttgcccttgacctggttggaggagtcgtagcgcacgcgctggcggctcttgttcatcttgctcatcagcatcttgcccgtgcggaagtcgaaggtgctcaggtccatggagccgcccaggtagcgcgccagctgcggcttgctgcggaacttcttcccgctcgggctatagtaaaagacatccctgtggccggccgacagccccgaccttctgggcacttcttccctctcccagccctgcgggagcgccgggcactcccacctcttccgctccat

SEQ ID NO: 64833 - DNA, 1799 bp, Homo sapiens
gttaattttggttccttaaaacgcccccccccttttttttttttttccttccttttttttttttgcgagacagggtctcactttgtggctcaggctggagtgtactggcacgttcttagctcactgcagccttgaactcctgggctcaggcaatcctcctaccttagcctcctgagtagctaggactacaggaatgtgccatcatgcctggctaatttttaagttttttgtagagatgggatctcactatgttgcccaagctggtttcagattcctgtgctcaagggattctgctaacttggctccccaaagtgctgggattacaaatgtgagccactgtatctggcccatattcttttttaagaaaagatgcagaggtgttaaatattaatatcaaattgtccaggcatggtgtttatgaaattgtgtgccctctgacaggcaaccaaacacacacgacttcatttctttattaattcctgcctcatcatcttttctcattgatgctccttaatgtcaaaggaatctctctctctcacacacacataagaccaaaacaaatatcttgaacatgcaaaaaaatagtctacgcttttgaatagtgtgcactgttgaatagtgtgcactgttggatagtgtgcactgttgaagtgtgatgtgcctaaggcaacaggatcttgggaaagctctagatttttggcttcgaaataaaactgcatgttgaatagcaggtttttacatttattattgttgtgtatttcctcccctttttgcaatactatctacgctgagttatctattgccaactagcaccaattctccaaatcaaagtgtgtgaggaaaacacactcgtgcaatcctctttaacagaagatacaccaagtaacctgtctgtctacttctgttacccagaaataaaagaacttgaagggctgcttggctgggagggggtcccgggtggggaagaggcatcctgccctcagtcgggaatccatggtgaacagctggatgtcctgtggattccagtacagggccgactggctgagttgtagacaagagaccagacataggggataaaaaactcctcgggctgctcctcttccacatatttgaatttcaattctggaaatttcttcagtctgtctttgggcagcgcaacgacgccttgcttaatgatttccaggacccgttccactgacagctcagctccagcttgcagcaaccttgagctaaagaaggagatcaccagatcaatattttgcattatatcctgaaatgaaggatgagttcgaaattgttcaaagagatcgcgtttgtaaagcagggcgtataccaagtttgggttgtggtgaagggaatttgtcaggcaggagttgatgatctctaacatcattcgaatcacttcttcaatgacatttaggtcttgtgcataatctggtagaggaacatcattagaactcagcgaacctctcaaggactgtgtggcttgttccagaactttgttgtgttttttagacagcaaagaaaataaactgatgatcctctgggcagcatactgatggagagaacgaaactgtgccgacatatttgctaaagctgccaaacaatttgtgtcaaggtacttgtctcgtgtcctagtcatgttgtattgaatggttcttattaccaccaggatcaggagactccccaaggagatttcagttaaaactcgttctgaataccaagtaatattttttagtatcacttcatgaatggatctgttgaagccatcatcttccgtaaggatcaacaatattata

SEQ ID NO: 64834 - DNA, 1243 bp, Homo sapiens
acagaagaggtgaagatatttgttggattaaaaccaataaaaacaatcctgggaagactaagactttagatccaaaggctgtctttcagagaacaaaggaacactgcctcatggggatcaaaggaactgtgaagcgtagcacagacggggacttcattcatgctaatgttgacattgacttaattatcacagaagaacctgaaattggcaatatagaaaaacctgtagaaatttttcatataattgagcatttttgtcttggtagaagacgccttcatctatttggaagagatagtacaattcgaccaggctggctcacagttggaccaacgcttacaaatagcaactacaatgcagaaacatatgcatcctatttcagtgctcctaattcctacttgactggttgtacagaagaaattgagagacttcgaccaaaatcgcctcctcccaaatctaaatctgaccgaggaggtggagctcccagaggtggaggaagaggtggaacttctgctggccgtggacgagaaagaaatagatctaacttccgaggagaaagaggtggctttagagggggccgtggaggagcacacagaggtggctttccacctcgataattgttgaagacattgaacctattcatcctcctctaaccttctttattgcaattaaatttcaagtgggagacttaactttagaactcacttccagcttgcactttgctttaatttctctgagctgcaagaatgtcttagcgagccttgcttgcagttgtcacacacactgtccggtttttttcaggataaatgaatgattctgccttttgttatgtgcgtgaacagaatggaacaactcaagtagcttcatcttcagagactgaatttattctgatagacttcagctaattacaaaggattttgctaatttttgggaataaataatggaaaaagatccagtctgtggtatcatgctagtgctgacagggccttgatagaatagagttggaaaagatggtaagcttttgtcagggttttaacattttcttgatgaaacaataaaaagaggtaagcttttttcttctttttttttatagttttaaataaactcagatataatttgaatactgaagaaattaagagactttgaacaaaaactcttcccaaatctaaatttgataggggaggtggagattccaggggtgggtgaaagaagagatagaacttagcaggcagacttaaaaaaaaaa

SEQ ID NO: 64835 - DNA, 2830 bp, Homo sapiens
acaaccccttctcctggaagaactttgtagacaccgtccgcgacaccaccgccgcgcaccaggctctgctggtggccaagaacgtcgactcgtttccgcaaaaccaggagcgcttcggcgggggccacatcgacgtgtggtggatcgtgcacgacggcggcatgctcatgctgctgcccttcctgctgcgccagcacaaggtgtggaggaagtgccggatgcgtatcttcaccgtggcccaggtggacgacaacagcatccagatgaagaaggacctgcagatgttcttgtaccacttgcgcatcagcgccgaggtggaggtggtggagatggttgaaaacgacatatctgctttcacctacgagaggacactaatgatggagcagaggtcgcagatgctgaagcagatgcagctgtccaagaacgagcaggagcgagaggcccagctgatccacgacaggaacaccgcgtcccacaccgcggcggcagccaggacccaagcgccgcctacgccagacaaggtgcagatgacctggaccagggagaagctgatcgctgagaagtacaggagcagagacaccagcctatctggtttcaaagacctcttcagcatgaagccggaccagtccaacgtcaggcggatgcacacggctgtgaagctcaatggcgtcgtcctcaacaagtcccaggatgcgcagctggtcctgctcaacatgccaggtcctcccaaaaaccggcagggagacgagaactacatggagtttcttgaagtcctgaccgaggggctgaacagagtcctcctggtcaggggtggcggccgggaggtgatcaccatctactcctaatgcccaacagcatcacggcactctgggacaggcacggaggacggcgtgggcagcctgggcctgggcttggcccagggaaacagacggcagacacacctgtcccccagtgatgccacccaagctgcccatggggcttcctacggaagtttctaggcccgtcacctagggctctcctgttcagccttaacaggctcagcaaatcagggcgtggctggacgatttccttgcatctgagggcagacgctgctaccggagtgacctggacgtggccagatcttctcgcaggtcacaagaagccagtgagcccttgccttggtttctggaagttcttttccttggctggatttacccagtggttaggttgcatttctaccccatccagaacattcttggaagagcacccggagctgaagctgtccctgatgatgaaggtgaaacgtcagccctggccatggctccgctcagggccccggtcacctccgagtcactctgttccttgactgtctttgtgtttctgtacctcaaggcactgaagctggaggactctgtccatgcccgtgtcaccctcgtgtgggagcctctgggctcggcaggtccacatttcatgagctgaggcgtgggccagggccatctggaaagggaactcggcttttccagaacgtggtggatcatctgtcgggtgtgtggtgaacacgttcagttcatcagggcctacgctccgggaaggggcccccagctgtggctctgccatgccgggctgtgtttgcagctgtccgagtctccatccacctttagaaaaccagccacttcttttcataagcactgacagggcccagcccacagccacaggtgcgatcagtgcctcacgcaggcaaatgcactgaaacccaggggcacacgcgcgcagagtgaacagtgagttcccccgacagcccacgacagccaggactgccctccccaccccaccccaccccaggagcacggcacacagttcagcctctgagctggctcacacgtgccatccccaccccggtgctccagggaaggaggacacggacccgacgtgggaggtcctcaggcagcagtggcgcctggtgtcaggtctgtctggctgagtcccgggcgtcccctgccatggcctgtgccttgcatggaggcggcggtggcactgaagagatagctttcaagggcccaacactttgcacttcggctggctgtgagtttctgctttgtaggttgtggtcacatttgcaggctgcgggcagtggcaccgacttgggcctccctttctatgtggcatatttatttatttaaacaccccagggagttacgtggtaacaaggttgtccataaagaggttgcttctatatactagaggccccagatggccaggccttgggctacgtctggcttgcatggtctcccaagggaatcagccccatcaacaaagttcaaatcggggcagaggctgcacttgtgcccccagatgtttctgaggagccagactagggctggcattgctgtagagtgacggctgctgcccagagcgtgtcccagacatcacagcggggctcagcagttcccacagcctctgcctgccttggctaagcatgagttaagcagcaaaacgctcctccatgtctggatggggccggcaggtcctgtgtcccctgcacctggaggagagcaggctagaggcacagcggccacatggtgctggctctgaacgttggttggtggctggaaaacagccctgcttctgagggccgctcagttctgcacacgaaaccacctcctgagggctcagctctgcccccgccctgggctgcagcctctgcacgcaagcaccaggcatcctttgtgttgtcaactccgtgtaaccagtaactacagccatttacaattgactccgtttccttttgtaggtttccctgtctgtctgtgttagtagaaaaataaaatcctatgaaatctgaaaaaaaaaa

SEQ ID NO: 64836 - DNA, 1247 bp, Homo sapiens
atttcattaaagaaaacagctttctgccatttcaaattgaccacatcaggcagatggcgtatcagatctgccagtcaataaattttttacatcataataaattaacccatacagatctgaagcctgaaaatattttgtttgtgaagtctgactatgtagtcaaatataattctaaaatgaaacgtgatgaacgcacactgaaaaacacagatatcaaagttgttgactttggaagtgcaacgtatgatgatgaacatcacagtactttggtgtctacccggcactacagagctcccgaggtcattttggctttaggttggtctcagccttgtgatgtttggagcataggttgcattcttattgaatattaccttggtttcacagtctttcagactcatgatagtaaagagcacctggcaatgatggaacgaatattaggacccataccacaacacatgattcagaaaacaagaaaacgcaagtattttcaccataaccagctagattgggatgaacacagttctgctggtagatatgttaggagacgctgcaaaccgttgaaggaatttatgctttgtcatgatgaagaacatgagaaactgtttgacctggttcgaagaatgttagaatatgatccaactcaaagaattaccttggatgaagcattgcagcatcctttctttgacttattaaaaaagaaatgaaatgggaatcagtggtcttactatatacttctctagaagagattacttaagactgtgtcagtcaactaaacattctaatatttttgtaaacattaaattattttgtacagttaagtgtaaatattgtatgttttgtatcaatagcataattaacttgttaagcaagtatggtcttgataatgcattagaaaaattaaaattaatttttctttttgaaattaccatttttaaatacctttgaaatatcctttgtgtccagtgataaatgtgattgatcttgccttttgtacatggaggtcacctctgaagtgattttttttgagtaaaaggaaatcttgactactttatattcttaaaggaatattctttatatacttcaaatttagaacttaactttaaaagtttttcttctgtaattgttgaacgggtgattattattaactctagataagcaggtactagaaaccaaaactcaaaaaatggttactggtagaattctattaacatttaagggctggattctttttgattgggcgacgtcat

SEQ ID NO: 64837 - DNA, 626 bp, Homo sapiens
tcccgtgtcgacccacgcgtccgctccttctgaaggaaggagttccagcaactgatgtagtctgtccggactctcgctgtggccacgtattctgccgttcctgtattgctaccagtctaaagaacaacaagtggacctgtccttattgccgggcatatcttccttcagaaggagttccagcaactgatgtagccaaaagaatgaaatcagagtataagaactgcgctgagtgtgacaccctggtttgcctcagtgaaatgagggcacatattcggacttgtcagaagtacatagataagtatggaccactacaagaacttgaggagacagcagcaaggtgtgtatgtcccttttgtcagagggaactgtatgaagacagcttgctggatcattgtattactcatcacagatcggaacggaggcctgtgttctgtccactttgccgtttaatacccgatgagaatccaagcagcttcagtggcagtttaataagacatctgcaagttagtcacactttgttttatgatgatttcatagattttaatataattgaggaagctcttatccgaagagtcttagaccgggcacttcttgaatatgtgaatcactcgaacaccacataattt

SEQ ID NO: 64838 - DNA, 519 bp, Homo sapiens
gcttaagcgctgcccagaaggccaaggtgaagcactcggccatcgcggtggttgtcatcttcctagtctgcttcgccccgtaccacctggttctcctcgtcaaagccgctgccttttcctactacagaggagacaggaacgccatgtgcggcttggaggaaaggctgtacacagcctctgtggtgtttctgtgcctgtccacggtgaacggcgtggctgaccccattatctacgtgctggccacggaccattcccgccaagaagtgtccagaatccataaggggtggaaagagtggtccatgaagacagacgtcaccaggctcacccacagcagggacaccgaggagctgcagtcgcccgtggcccttgcagaccactacaccttctccaggcccgtgcacccaccagggtcaccatgccctgcaaagaggctgattgaggagtcctgctgagcccactgtgtggcagggggatggcaggttgggggtcctggggccagcaatgtggatcctgtgcact

SEQ ID NO: 64839 - DNA, 1566 bp, Homo sapiens
aagaattcagggaaaagcaaaaactacaacgaaaaaagacagagctcataatggatgctatccataaacaaaagagcttacaattcaagaaaaccatggatgcaaagaagaactatgagcagaaatgccgggacaaagatgaggcagaacaggccgtcagccggagtgccaacctggtgaacccgaagcaacaagaaaagctttttgtgaaactggcaacttcaaagaccgcagtagaggactcagacaaagcatacatgctgcacatcggcaccctggataaggtccgagaagagtggcagagtgagcacatcaaggcctgcgaggcatttgaggctcaagaatgtgaacgaataaacttcttccggaatgcattgtggttacatgtgaatcagctgtcacaacaatgtgtcaccagtgatgaaatgtacgaacaagtccgaaagagtttagaaatgtgcagcattcagagggacattgaatactttgtgaatcaacgcaaaactggacagattccaccagcacccatcatgtatgagaatttctactcctcccagaagaatgcagtcccagcaggaaaggctacagggcctaacttggcaaggagaggacccctcccaattcctaaaagctcaccagatgatcccaattactctttggttgatgactacagtttgctctatcagtaaaatcaatgaaaccagagctttttccggctagtgcttctgtgatatggaaagggcacccagagcagcaggacctatagccacgttatgtcagcaatgaagactttgaagtgaacccttgctataattttttagagatttaaaatttatggtagacatttaggacaacataagcaagtagagttctgcagttttttgaagtttacaaattgccccattctgaagaattattatttcccagttactcaggttatgaatgaattaggttttcaacatgggaagcatgaaatccacttctggatttggagcatccacttgaggagcagaggtggcagcagaggattctgagccaccaactgcagtagtggctcctttggctttgggcagcctggctgtggagtttccacggcgacacacagcctcagtggtgcaagatttaaaattaccttcctttttggctggaagacttagaagccgcctgatcatactttctcattttacagatgaggaaataaagcctacaagtgtgaaattaatttccttacagttttcctagctgatgagggacagaaccagaactagagcctgagcccaacccacatcactattcttctaacccttcctgaagttgtgatgctcatgctgaaatttaagatgccaaatatttttgccagcactttttcagttgggagaatcaccagggtttaaatgtcagatttatttttatgtggatccctgtgtatgctgaactacagagcatgatgtttaatctaatttaaggagccactgattgtaaaacatgccattattttatgttgcactaagaaggtggggtcgaggagttgccaataaacttgggacagactattgatgccaagcc

SEQ ID NO: 64840 - DNA, 2546 bp, Homo sapiens
atgcggaggggcgcgcttctggcgggcgccttggccgcgtacgccgcgtacctggtgctgggcgcgctgttggtggcgcggctggaggggccgcacgaagccaggctccgagccgagctggagacgctgcgggcgcagctgcttcagcgcagcccgtgtgtggctgcccccgccctggacgccttcgtggagcgagtgctggcggccggacggctggggcgggtcgtgcttgctaacgcttcggggtccgccaacgcctcggaccccgcctgggacttcgcctctgctctcttcttcgccagcacgctgatcaccaccgtgggctatgggtacacaacgccactgactgatgcgggcaaggccttctccatcgcctttgcgctcctgggcgtgccgaccaccatgctgctgctgaccgcctcagcccagcgcctgtcactgctgctgactcacgtgcccctgtcttggctgagcatgcgttggggctgggacccccggcgggcggcctgctggcacttggtggccctgttgggggtcgtagtgaccgtctgctttctggtgccggctgtgatctttgcccacctcgaggaggcctggagcttcttggatgccttctacttctgctttatctctctgtccaccatcggcctgggcgactacgtgcccggggaggcccctggccagccctaccgggccctctacaaggtgctggtcacagtctacctcttcctgggcctggtggccatggtgctggtgctgcagaccttccgccacgtgtccgacctccacggcctcacggagctcatcctgctgccccctccgtgccctgccagtttcaatgcggatgaggacgatcgggtggacatcctgggcccccagccggagtcgcaccagcaactctctgccagctcccacaccgactacgcttccatccccaggtagctggggcagcctctgccaggcttgggtgtgcctggcctgggactgaggggtccaggcgaccagagctggctgtacaggaatgtccacgagcacagcaggtgatcttgaggccttgccgtccaccgtctctcctttgtttcccagcatctggctgggatgtgaagggcagcactccctgtccccatgtcccgggctccactgggcaccaacataaccttgttctctgtcctttctctcatcctctttacactgtgtctctctggctctctggcattctcgctgcctctgtctttccctcttgctgtctctgtttctcattctctttcatgttccgtctgtgtctctcaattaaccactcgtcaactgctgattctactgggctgtgggctcagacctcatttcaggcaccagattggtcgctacaccctggacaagtgactgcccgtctctgagccttgatttcctcagctgccaaatgggaagaatagaagaatttgcccctaaacccctcctgtgtgctggccctgtgctagacagtgctggagacatagttgggggtggagaactgcccttatggagcttgcagtccagtgaggtggacagacctgtccccagacagtgatggcccaaaatggtcaggactttaatggaggaggtgaggtgttgaaagcacaggcagagtggtcagggctgaagtcggagaagcatagggactaggcccaatccagcctggaaagtcagggaggacttcctagaggaagggacatcgaactaagacctgaactatgagaaataggcaggaagaagttgtacctgactcatttttctcaggtgtctccagggagcaggacccatggagggacccctggtgtaggcctgggcgatagactcttcctcagcagcctggcaggcaggaaacagacataggaccccagcccagatctgaatggcatgggaggtgctgcccttaaccatgacaccattgtaagagctgtccacatttgtatgttgtgccctggaatcagcctggttgagctcaaatcccaacttagccacgtctggcctgtgtccttgggcagtcacactacctctctgattttgtttccttatctgtaaaatggtgatcatcataatacaacttcaaaaggatttcaggctgagtgtggtggctcacgcctatacacccagcactttggaaggctgaggaaggaggatcgcttgaggccaggagtttgagactagcctaggcaacacagtgaggccttatctcaacaacaaccacaaaatctaaaaattagctgggtgtggtggtgcatgcctgtgatcctggctacttcagaggctgaggtggaaggatcacttgaggccaggagtttgaggctgcagtgagttatgatggcactgctgcactccagcctgcgggacagagtgagaccctgtctgaaagaaagagagaaagaaagaaagaaagagagagaaagaaagaaagaaagaaagggaaagatggaaggaaggaaggaaaaagaaagagaaagagagagagagagaaagaaaaagaaagaaaagtaagaaagaaaaaagaaaaagaaagaaaagtaagaaag

SEQ ID NO: 64841 - DNA, 1785 bp, Homo sapiens
tcatgacctttgaactctatgaggaatttcttcgagctatgggccttcaggagaggaaggagacaatccgtggtgtatactctgtgattgatcaactctcccgaactcatctcaatacactggaacgcctcatctttcatctagtcaggattgctctgcaggaagacactaatcgaatgtctgctaatgctttggccattgtgtttgcgccctgcattctccgctgccctgacaccactgacccactacaaagtgtacaggacatcagtaagactaccacttgtgtggaactgattgttgtggaacaaatgaataaatacaaggctcgtctcaaagatatcagtagcttggaatttgctgagaataaggcaaagaccaggttgtcactgattcgtagatcaatgggaaaggggcgtattcgtcgaggaaactatccaggtccatcgtctcctgttgtagttcggttgccttctgtgtctgatgtctcagaggagaccttgactagtgaggcagccatggagactgacatcacagaacagcagcaagcagctatgcagcaggaggagagagtactgactgagcagattgagaacctacagaaggagaaggaggagctaacatttgagatgcttgtactggaaccccgtgcctctgatgatgaaacccttgagtctgaggcctccattgggactgctgatagctcagagaatttgaatatggagtctgaatatgctatctctgagaaatcagaaagaagcttagcccttagctccctgaagacagctggcaagtctgaaccttccagcaagttgcgaaagcaacttaaaaagcagcaagactctttagatgtcgtggactcttcggtctcctctttatgtctgtctaacacggcatcatctcatgggaccagaaaactatttcagatttattccaaatctccattctaccgagctgcctcaggtaatgaggccctgggaatggaaggaccattgggccagaccaaattcctggaagacaagcctcagttcatcagcagaggaaccttcaacccggaaaagggcaaacaaaaattaaagaatgtgaaaaactcacctcagaaaaccaaagagaccccagaggggacagtcatgtctggccgcagaaaaactgtggacccagactgcacctccaaccaacagctagcactctttggaaataatgaatttatggtctgaaccggcagatgtgtgtccctccgtggctacagagtggtaaacaaatctcacctttggggctgcgtttcatcacctcgtccacaatagtcaatcctaattgtggtcctgcctcttttctaagcatatggctaagactgtatgtgctgaattcctgggcctcctgcagaagcagaaagcctgctggggatggtgccagctgtgccttggctgttgtatttgaattgagatttttactatacaaagccacctagggcctggggatttgggtcagttgtagttgcctctcccccaccctcttttcccttcccaaaggtgggtgttgaactaggggggatattgctgtcctgagggaccctctcatttctgacatttgaagaaaacgtataaatctttcttaaccgtgaaagcaaaagcctttgggtttattttgggatagttaggagctagggtagaatataatttttttccaaaaacttacttacaaacaaaaagcctaatccctctattttaagatttctgaaaaaacactccactccatgttatattctggggaaagcaaaaacaaaaaaaa

SEQ ID NO: 64842 - DNA, 881 bp, Homo sapiens
atgatattctacaggtggtttctcaaggctggaagtacttcaaggggaacttctattacttttctctcattccaaagacctggtatagtgccgagcagttctgtgtgtccaggaattcacacctgacctcggtgacctcagagagtgagcaggagtttctgtataaaacagcggggggactcatctactggattggcctgactaaagcagggatggaaggggactggtcctgggtggatgacacgccattcaacaaggtccaaagtgcgaggttctggattccaggtgagcccaacaatgctgggaacaatgaacactgtggcaatataaaggctccctcacttcaggcctggaatgatgccccatgtgacaaaacgtttcttttcatttgtaagcgaccctatgtcccatcagaaccgtgacaggacaggctcccaagctcactctttgagctccaacgcttgttaaacatgaggaaatgcctctttcttccccagactccaggatgactttgcacgttaatttttcttgcttcaaaattgtcccacagtggcattctggagtccgtctgtcttggctggaaattctctgacgtcttggaggcagctggaatggaaaggagaattcaggttaaagtgggaggggtgggtagagaggatttagaagttccaattgccctgctaaggaggatcaagacccgtaatccggcacaacaccctggggttttccactctttcagagaaacctcagcttcatcacatcaaagttactccagagcaaccaagcaattctcctgatattgtcatccagggcttttcttggccaaaccccctagaatttccatgtctctgcttagctgtgctggcagctagcagctggca

SEQ ID NO: 64843 - DNA, 1617 bp, Homo sapiens
  misc_feature (1)...(1617): n = a,t,c or g
tttttttttaaagatttttatagaatagatgctttatgtaaaatattaaacataaaaggacaaactgacatttattccctgagtcctgtgacctgagatgtaaatgagggagccccantcctataaattaaaattgggtgtgtgggtattatcccatagaagcattgccatatcccccagatgcctagggaacagaaaaggtgggtgtgcccaacaaacacaatcctaccctcccagaaaacgcccatcctgacctttttattgtcgaaattaaaaaataaaagatacttaaatacaacggtgaacatatagggcaaaacagaatcataaaatttaatgttgagttaagcagtgagctgaatgtctaggtctccaaattggctttgaacccaaaaccacttaaaaacaagtatgttcacagttaacggcaattggcttataggtgagagaatggtcgaagttgttccagttgaacttccagggaaattctctcctcaagaacatcctttaattgttgctgcaattcgctattcaatctggccaaaacggtgttggtttccttattacgtctaattgatgcctgaatagctttcttatctttcccaacagatctgggaatagaaggttgtgatgcaagaacagcagctaagacacccgtcttttgtgtatgttcatcaacttctggccttaattcatcttctgattttaatcttcttcgaacaggtttaggtggtggagcaagtggtgttgtgcctttgctcacattggcaggagcactagcagctgtcttttcttcagttttactatctgttttggcaactcgaagagaacttgcaggatcagaagctttttcagccggcaggacttctggatgtttctcggcttcatcatcttgttcgtcgtttacatttgatgcagcaaatacttcaaactgactgaaatctgcaaaatttggttgctctggtatctgctgaggtgaggtactagtgtgagttatgaggccatcggcatccactgggcgatgcacagcaggaccaggagcctgtgagggctgtggtcttggaggcactgcaggaggatgggcaacaactccagcctgttgttgtcctgcatgaatacaaaagttcttctttttagtaactgtataatcactttgttaatagaagaaataggctgaatgaatgtgactacatgataaagatttctaagaatgtttgttaagtattagaaggcaagtactaacttgttacatggtctgtatgtaacctaaagaccaaatctcacagcctttcatcagatctcactttgcttcttacctctattacatgaagccctcctggcatactcctgcctattcccataatagcaaacaatcttgattttcttcgtgtatctctgactgctgtttaggtatcaaatgaaaacttccaaattttccctttcacttaacacttcacttttcctcaccattctaaactcacagtgactaaaacataacttcatcatcctctgccctaacttttctattttaaccaaggtaacaacaatactgccagttcttcaaaaattaaaaacctgggtaagttatgactcttcttcttcatcagccaaattgag

SEQ ID NO: 64844 - DNA, 1201 bp, Homo sapiens
gcgtccgttcaataaagatctccctcagagataaggatgtagacttataagcaggacaagactattcatcttcttagcattttactgcggcgcccatcgacttataaatggctgttgcgtatgggagaggagtgttatctggaaggtttaaaggtttagatctctggaacacattcttaatggaacatcacaaaagatcaattccaagggacacctggaacctcctgctggactttggaaacatgattgcggatgatatgtctaactacgatgaagaaggagcttggcccgttcttatagatgattttgtagaatatgcacggccagtagtcacaggtggaaaacgcagccttttctaggcagcaagttaagcaggagtaagattatgaaatgatttgtatcctgcaaggagattgcagtcagttcctgggtgcattgtcgctgattccagaagtcattcttgaccagccatgaaaccagaggcgccatcccattctgccggaggacagccagcggctgctttgtggacaccgcaggaagttcctcgggacacggctgctttgggatgtttggagatttgtcatcatagcttttgcgttaggaaatttctgcatgattttttaatatttacaaaatactaaggtagagccatagcgccgcctgtgggaccgcagagcatgctgcgtagctcgcgcgtcaggcgaaccagcgtccggcagcgtcccgccgaatgacgttgcggtggcactggcaacacggcatgtgtcctctgcagggcgctgggtttttatacacgtcaaagctgttaagaatgtgccctaagggagaggatcttgtcgtagagtctaatgttttttaaaattggtgccagcaattcacgatttatattttttgaattaccaaatatctagatttaccagctctatttttgttttcattttctctagacattcatctgaaaatcattttatggttctcaatccccatgtagctttgcatagcaacggcacacgtggcacgattccagcagagtttatctcacaccgtttatatatcactgggcctctcttacttaaatattatttgacctgcctgagaagcttcataaagtatgtttttttaaaatatattttaattacatttaaaaagacatttttccatgaaaaacatttattttatgagtgatgaattatagatttta

SEQ ID NO: 64845 - DNA, 958 bp, Homo sapiens
  misc_feature (1)...(958): n = a,t,c or g
tgctaaaatcttggattatggaaaatttaagtatgaaagaaagaaaaaacaaaaagttgaaaaagaaaaacaatctttcacaaacaatagagaaattcgtttatcttttggaatcaatttaaatgatataaaaatcaaagcaaaaaaagccaaagaatttttattagataacgacagagtaaaagtggctcttcgtcttagagggcgtgaaaatacaagacctgaacaaggtaaattaattttaaattctttttttgatgaagtaaaatcgattgcaaaattaagtaaagaaatgcaatcagttggtaattttttaactcttcatattgaacgtgataagaaaaaattacccaaatttacttcttcaaaacaaataaaggaattaattgattttgaaaaaactataaaggaagaagaaactaatgcctaaagcaaaaacaaaatcagcacttnnnnnnnnnnnnnngggggggccgttttaaaggatcaaagtttacttccgcgtgcttgcaaggtaaaagtttttttatggggcccccaaaattaattcccggggccggggtttaacaacggggggaggggaaaaacccgggggttccccacttaaatggcgcgcgtgggaaagnnngntnnnnnngnnnggnntgtgngttttggnngtttgttgttgttgtgggtgggtgtgtgggtggggggttnnnnnnnnnnttggtggggggtgtgtgggttttttgttgtgggggggggttgtgggttnnggggttggggttgtgtggtgtggggtggggcgcgtgtggtnctctgttcttgccgcgggcggcctcgccttcttctttttggggcccctttctgccccgggccgggttccccgccggggcggtgcccccggggcccccttcgtccgtctgctcgtctcgctcgcgggcccccctctcnctccctcttgtgttgcgcctcc

SEQ ID NO: 64846 - DNA, 1884 bp, Homo sapiens
cggacgcgtgggcgggcagtggctgtcaagcggctcctccgcgagtgctttggcctggttcggcgggaagttcaactgctgcaggagtctgacaggcaccccaacgtgctccgctacttctgcaccgagcggggaccccagttccactacattgccctggagctctgccgggcctccttgcaggagtacgtagaaaacccggacctggatcgcgggggtctggagcccgaggtcgtgctgcagcagctgatgtctggcctggcccacctgcactctttacacatagtgcaccgggacctgaagccaggaaatattctcatcaccgggcctgacagccagggcctgggcagagtggtgctctcagacttcggcctctgcaagaagctgcctgctggccgctgtagcttcagcctccactccggcatccccggcacggaaggctggatggcgcccgagcttctgcagctcctgccaccagacagtcctaccagcgctgtggacatcttctctgcaggctgcgtgttctactacgtgctttctggtggcagccacccctttggagacagtctttatcgccaggcaaacatcctcacaggggctccctgtctggctcacctggaggaagaggtccacgacaaggtggttgcccgggacctggttggagccatgttgagcccactgccgcagccacgcccctctgccccccaggtgctggcccaccccttcttttggagcagagccaagcaactccagttcttccaggacgtcagtgactggctggagaaggagtccgagcaggagcccctggtgagggcactggaggcgggaggctgcgcagtggtccgggacaactggcacgagcacatctccatgccgctgcagacagatctgagaaagttccggtcctataaggggacatcagtgcgagacctgctccgtgctgtgaggaacaagaagcaccactacagggagctcccagttgaggtgcgacaggcactcggccaagtccctgatggcttcgtccagtacttcacaaaccgcttcccacggctgctcctccacacgcaccgagccatgaggagctgcgcctctgagagcctcttcctgccctactacccgccagactcagaggccaggaggccatgccctggggccacagggaggtgaggtgggctggatgccacacagatggtctccgtgctggctcactgaagagctgagcctgtggctggcctcagaatcaggctgggtgcagtggctcacacctgtaatcccagcattttgggaggctgagtgagaggatcacttgagctcaggagttcgagaccagcctggccaacatggcaacaccccatttctacaaaaaatttgtaaaattagccaggcatggtggcgcacgcctgtagtcccagctgcttgggaggctgaggtgggagaatcacttgagcccaggagttcgaggctgcagtgagccaggatcatgccactgcactccagcctggtccacagagagacactgtcaccccctttcccccacaagactggcagaggctgggcagcctggggctgatgaagcagagatgttcgctggatcccaggccctggcacccctcaggaaatacaagaaaaagaatattcacatctgtttaatgtgcataaagccaaggaaaggacagttccgaattccctaaaaaaaaaaaccaaaaaaggacgagggctcggaccggacctgagatacaaaacttggaataagggggggggggggggtttagaaaaaaaaacccttacttgggctgggggccggggattttttttttgattcgggattcaaactttgactcgggggggggcttctttccctagggggggaagaaaaaccgcccc

SEQ ID NO: 64847 - DNA, 621 bp, Homo sapiens
  misc_feature (1)...(621): n = a,t,c or g
cgcttcttgtgcaaaaagacgcgtgaggacggctggtacaaggggaccctgcagcggaacggccgcacaggcctcttcccgggcagcttcgtcgagagcttctgagaactggtgctccctgcacccagctcacagagggggaggccgcctgggaagctccacggcacacagagagggagccatggcgccccaagggttccaggtcatctccaaggcacctggcgggggataccctggcccagggtgggggccagggactgtggaggtcgtgccttctcccaaaacccccaaacggagagcacacctgggatgttcttcaaggaaatgcccaccccctctgtggaaactgcaaagaaagcaccttgaggaagagaggcaggtgccggcgcaggcaggcctgtggctgtggtttgcagccatggcagcgttctcatttaccacctaagcagggttggaggttgcaggaggtctgcaggcgaggtgggtggcatgggggccaggagcgctggagatcatctttctgggctgccctgggcttcccgcggngcccaggttgctctgtcaccattctatatacctcagtcacctgccgcccggctgctcancnaagggtgtttgagg

SEQ ID NO: 64848 - DNA, 1337 bp, Homo sapiens
  misc_feature (1)...(1337): n = a,t,c or g
caccctgttatccatttctcttgtgttttggataatataagtacttacattttgttcgttgaatatgctgatggaagttttcttccagtctagatacattcaacccccaagtgtcagaggcatgttctgtatctaaatatagcacctaatctccattgtcagatttgtctcatgaggaagaatgcctgttgtcactccttctggggaataatgccaagcagctgttggagcaacgttgtccttaacaggtccattccaaagctgttttcttcatacctgagccttctgcacggtgacactgatttttccccattttcagggagctgtgatacacaagttgggcatcaccttggtgtctctccttttgtttttgacgctaacgaagacctttcctgtcacctgccttgtggatgactggtttgtccataaagcaagctttccggctcgactctgctacttatatgttgtcatgcaagcctcaaagcccaagtattactttgcatggacattagctgatgcagtgaataacgcagctggctttgggttcagcggagtggataagaatgggaatttctgttgggatctgctttcgaacctaaacatctggaaaattgagactgccacaagtttcaaaatgtacttggaaaactggaatattcagacagctacttggctaaagtgtgtgtgctatcagcgggttccatggtaccccacggtgctaaccttcatcctgtctgctttgtggcatggtgtctaccctggatactattttaccttcttaactggaattcttgtcacattagcagctagagcggtcaggaacaactacagacattacttcctttcttcaagagctctcaaggctgtgtatgatgcaggcacctgggccgtcactcagctggctgtctcttacacggtagcaccctttgtgatgttggcagttgaaccgaccatcagcttatacaagtccatgtacttttatttgcacatcataagtctcctgataatactatttctgccaatgaaaccacaagctcatacgcaaaggcggcctcagactctgaactctattaataagagaaaaacagattgatacctccaagagaagcggaacaagcaaaactgcagaacgttcgaaagatgagatgacaaggcttcaagggctcctccggtggcttataggcgatgtttacatgcatctttattttgttcttttttaaagtgcagggagtannnnnnnnnnnnnnnnnnnnnnnnnngaaaagggtgcccttttttttcccaaatttggaataaaatggggagaacctggattttttgaagtcccccctcccggt

SEQ ID NO: 64849 - DNA, 2370 bp, Homo sapiens
ggtggaattcattattgttacgtcttccagctcatgcattccaaccctccccagccccttcctgccttcatctcttacctctatacccaaggccttccccgctatccactcaacatccccttctgttttatgccagggactgtgatgattccgggtgtgactcagctgacagagaaggacctcaagtaccggctgcaggcgtccagggccaagtccattatcaccagtgactccctagctccaagggtggatgccatcagtgccgaatgcccctccctccagaccaagctgctggtgtcagacagcagtcggccaggctggttgaacttcagggaactcctccgggaggcttctacagagcacaactgcatgaggacaaagagtcgagacccgctggccatctactttaccagcggaaccaccggggcccccaagatggtcgagcactcccagagcagctacggactgggttttgtggccagcggaagacggtgggtggccttgaccgaatctgacatcttctggaacacgactgacactggctgggtgaaggcagcctggactctcttctctgcctggcctaatggatcttgcatttttgtgcatgagctgccccgagttgatgccaaagttatcctgaatactctctccaaattcccgataaccaccctctgctgtgtcccaaccatctttcggctgcttgtgcaggaggatctgaccaggtaccagtttcagagcctgaggcactgtctgaccggaggagaggccctcaaccctgacgtgagggagaagtggaaacaccagactggtgtggagctgtacgaaggctatggccagtctgaaacggttgtcatctgtgccaatccaaaaggcatgaaaatcaagtctggatccatggggaaggcgtccccaccctacgatgtgcagattgtggatgatgagggcaacgtcctgcctcctggagaagaggggaatgttgccgtccgtatcagacccactcggcccttctgtttcttcaattgctatttggacaatcctgagaagacagctgcatcagaacaaggggacttttacatcacaggggaccgagctcgcatggacaaggatggctacttttggttcatgggaagaaacgacgatgtgatcaattcttcaagctaccggatcgggcctgttgaagtggaaagtgccctggcagagcatcctgctgtcctggagtcggctgtggtcagcagcccagaccccatcaggggagaggtggtaaaggcatttatagtccttactccagcctactcctctcatgacccagaggcactaacgcgggaactccaggagcatgtgaaaagggtgactgctccatacaaataccccaggaaggtggcctttgtttcagaactgccaaagacggtttctggaaagatccaaaggagtaaattgcgaagtcaggagtgggggaaatgaggtgcaccccaggaaggccccgtagacctccgaagactccacaagaaactaatggatcactggtcagtccccatggggagcatcatctcttcgaccctaaagatgtcaaaggtgtgcagcttccaaacggcatccccaggatcactgggcaatgctggaaagagcaaaagaatatcattggccctgatcacatagatgctgcgccgcctagcaaatgcttggtggttcgacttctccctctgtctgggggcaggctcagcatctgcccactggtctcactaagagctttcagatttccctccataggacaggttaccatagacttggggcacttgtgggtactcattctctgccagtgggaatgtaaaggcttcatcctttgtatgtaaccatttggcaaaagtatgcaggaacataaaataaaatatcctttagctcagaaattctatcttcgggagtcaccacaaaagaaaaaaatcaaaatgcagaaaatgtgtggtgcactaagatgatcacacagcattaaaactaaaaaaaaaaaagaaaaaattaacaattaacatccaaacaacaaggaaatgattaacaaaattgtagtagattaactcaattacatatgatgtagccactaaaatatttgagagcagtttagtatgtcttgggaaaagtgtaagctatattaattttaaaaatcagagcaaaaatattcatactggagaatcccaactctgaaaaataaagggaaaactgtggttaattgtaatcctcctggagattgaggagggagggagagaaaataatggatggtagtttttcttcttcctttttccattacatttctgtattttccaagtttttgtacgaagcacatacaactattttaatgaaaaagttatgttaaagaaaaaa

SEQ ID NO: 64850 - DNA, 1564 bp, Homo sapiens
agtgtggtggaattcgtgaacttgaagcacttgcaactttgtaccagaaacaaaataaatatgaacaagctgaacattttaggaaaaaatcctttaaaattcatcagaaagctataaagaaaaaaggcaacttgtacggatttgcccttttacgtagacgggctttacagttagaagagcttacattaggtaaggacacacctgataatgctcggaccctcaatgaactgggtgttctctactatcttcaaaataacctggaaacagctgaccagtttctgaagcgttccttagaaatgagggagcgagttctaggaccagatcaccctgactgtgctcagtctttgaataatctggcagctctatgcaatgaaaagaaacagtatgataaagcagaagaactttatgaaagagctttagatattcggagacgtgcattagctcctgatcacccttctttggcatatacggtgaagcatcttgccatcttgtataagaaaatggggaaacttgacaaagctgtacctttgtatgaattggctgttgaaattcgacagaaatcttttggcccaaagcaccctagtgtagctactgccttggtgaacttagctgttctttatagccaaatgaaaaaacacgttgaagctttgccattatatgaaagagcattaaagatttatgaagatagcctaggtcggatgcatcctcgagttggagaaacactgaaaaatttagctgtgcttagctatgaaggaggagattttgaaaaagctgctgaattatacaaaagggcaatggaaataaaagaagcagaaacatcactcttgggtggaaaagctccttcacgccattcatcaagtggagacacgtttagcttaaaaacagctcattctcctaatgttttccttcagcaaggacaaaggtaatagcagcagttagaattctttgcaaatgtaccttaagacaaaataattaaacatttggaacatttgaatttgaaactttaaaaaaatgttgtacgaaattttactacgtgtgatttaactgctatttgtatgaagttgtattggattacattaagttggaattgtgattatgtctgttttagttgtttaaaagaattttcctattatatggtatccaaggatgtagacacattagaattataagaagacatgaggagcaaatcatgaagagcggattggtctttgttcaacaagagctggcagagtagttaagacaaggagttcaaaaattccatgaatcttggccaggcatggtggctcatgcctgtaatcccaccactttgggagggtgatgcaggaggatcacttgaggccaggagttggagaccagcctggccaacatggtgaaaccctgtctctactaaaaatacaaaaaaaaattagctggacctggtggcgcatgcctgtaatcctagctactcaggaggctgaggcatgagaatcgcttgaactcagcaagtggaggttgctatgagctgagattgtgccagttcattccaccctgggcaacagggtgagactctgtctcaaaaaaaaaa

SEQ ID NO: 64851 - DNA, 908 bp, Homo sapiens
agtcgtggtggaattcccttccgtgcctgaagtgcgacaagcgcttccgcctgaagggcatcctgaaggcccaccagcacacgcacagcaaggagaggccgttctcgtgcggggagtgtggcaagggcttcaccagacaatccaagctcacggagcacttgcgcgtgcacagcggggagagacccttccagtgcccagagtgcaacaggagcttccgcctgaaggggcagctgctcagccatcagcgcctgcacacgggagagaggcccttccagtgtccggagtgcgacaagcgctatcgcgtgaaggccgacatgaaggcccaccagctgctgcacagcggggagatgcctttctcctgtgagtgcggcaagggctttgtgaaacactcaaagctcatcgagcacatcagaacgcacacgggagagaagccttttcagtgtcccaagtgtgacaagagtttccgcctgaaggcgcagctgctcagccatcagggcctgcacacaggggagaggccttttcactgccctgagtgtgacaagaacttccgggaaaggggacacatgctgaggcaccagcgcatccacaggcccgagaggccctttgcctgtggcgattgtgggaagggcttcatttacaagtctaagcttgcggagcacatcagagtacacacaaaatcctgtcctgctccaaatgaactggacattaagaaaacgctcagccaactgtttgcaatgatagaggccgattggagttgaggcagagtgggacatccaaagcgttgagcaggattggtattgcccaggaatccacagcaacagtagccagacccgctggtagacgggttttaggagcaggtatccttctttgagcaagagtgtcatgcaagttaggaatatgaagaacca

SEQ ID NO: 64852 - DNA, 2355 bp, Homo sapiens
tttcgttgatatcttccagagatggaaagagtgcaggggaaagagccctgcccaggcggaactctcctatctgaataaagcgaagtggctggaaatgtatggggtagacatgcacgttgtcaggggaagagatggctgtgaatattctcttggactgaccccgacaggcatattaatctttgaaggagctaacaaaataggcttattcttttggcctaaaattaccaaaatggattttaaaaagagcaaattgacactcgtggtggtcgaggatgatgatcagggacgtgagcaagagcacacgtttgtgttccggttagacagtgccaggacctgcaaacacctttggaagtgtgcagttgagcaccacgcattcttccgactgcggacgccaggaaacagcaaatccaatagatccgactttatcaggctgggctctcgcttcagattcagtgggcggacagaatatcaagctacacatggctccaggttacgaagaaccagcacctttgagaggaagcctagtaaacgttatccatcccggagacattcaacgttcaaagcaagcaacccagtgatagcagcccagctctgctctaaaacaaatccagaagtccataattaccagcctcaatatcatcctaatatccatcccagccagccccggtggcatcctcactctccaaatgtcaggccatcctttcaggatgacaggtcgcattggaaagcatcggccagtggagatgacagccattttgattatgtccacgaccagaaccagaagaacttaggagggatgcaaagtatgatgtatcgagataaactcatgactgcactttgagagactgaagcatctctcttccattcaccttcatagtttcattgcattccatgaaaagtgtcttggcctcagatggatggatgtgtttggacgagtgtctttaaggagtagtcctgaaaggtgtttttggtgtccatgtaaatatttgaagataaaaccactatagcttgtcataatttactgttgactgcattctcattaaaatgaaggtaaaggctcaggaatcatattgatgttctgattttaaaattggagtcaaagtctatgtttatcattttactatgttcctgatgttctttgttatttaattaatgggagcaaataaaaccagaagagcttgggaagattgctcagcatatattcctgtcgtagaagttgagattgctagggtccagtttccctagtgtggcctggacgagtcatttccccttcattgacctcattttccccatctgaaaagagagggttggactaagtgatctccaaggtcctttccaactctaaaattctgcaatttgttaacatttcattttgtttaggttgaggacatacattcaaactaattttatcacaaggaaaactgcaatacccacttccttgacagagttactcctttcagaagctaaataaagtatataacttattagatgttatatagatacagggggactttgaatttcacatcttaaagcagttgagctactttgaatttaagcagtcgtactaatcttaaattgcatagcatttgttttgatcgaatttgctgctcaagtatgggaataatttttaatgtcttaatgattggtgctgctaacttgcgtgatttcagaagacataattgtgaatacacactgtcagaattgggggattggtttttaccctagacttcactcttaaaaagcaacgtgcaatcaagatcatttatggctcaaatgaaagcatataaggttttcttgaagttgtgccaaagcattctgtagagtaggatgagatggttgttgccctagtctgttggtagaaccagaaatcaatatgttgtcttttaggttaaagcttgtaccaaaatatttatttcccccatttcaagccctgagtcaaacatttttttctcttaataatagacctgaaatgttttattagtatttctgtgaaatcagttgattcttgtgccatttttgtatatgtaattgtaattttgcccatgttaggccctctaaaaaatgtttgacatcctttgagatattttattactaaaatctgatcttttttggctactgcaaaaatctattcagcaagaaggtatcagctgcataccttgcacagtggagctgactacctataaactctccctaaggcatttgtttacaggtgtattccattttagcagacgttctgatgctcagtgtatgtgctgcatacaaataaatgtgttctgaatcttttcatcttattgatagcattttaacaaatgtgtttccaaggaataaagattattcttgcttttaaaaaaaaaa

SEQ ID NO: 64853 - DNA, 1510 bp, Homo sapiens
cgatccgcatttcccgggtcgacgatttcgtaaaactgatcagactgtctcagatcaaggaaaagatggccagagagaagctggaagaaatagattgggtgacatttggggttatattgaagaaggttacgccacagagtgtgaatagtggaaaaaccttcagcatatggaaactgaatgatcttcgtgacctgacacaatgtgtgtccttgttcttatttggagaagttcacaaagcgctctggaagacggagcaggggactgtcgtagggatcctcaatgccaaccccatgaagcccaaggatggttcagaggaggtgtgtttatctatcgatcatcctcagaaggtcttaattatgggtgaagctcttgacctgggaacctgtaaagccaagaagaagaatggagagccgtgcacgcagactgtgaatttgcgtgactgtgagtactgtcagtaccatgtccaggctcagtacaagaagctcagcgcaaagcgtgcggatctgcagtccaccttctctggaggacgaattccaaagaagtttgcccgcagaggcaccagcctcaaagaacggctgtgccaagatggcttttactacggaggggtttcttctgcctcgtatgcagcttcaattgcagcagctgtggctcctaagaagaagattcaaaccactctgagtaatctggttgttaagggcacaaacttgatcatccaggaaacacggcaaaaactcggaataccccagaagagcctgtcttgctctgaggagttcaaggaactgatggacctgccgacgtgtggagccaggaacttaaaacaacatttagccaaagccacagcttcagggattatggggagcccaaaaccagccatcaagtccatctcggcctcagcactcttgaagcaacagaagcagcggatgttggagatgaggagaaggaaatcagaagaaatacagaagcgatttctgcagagctcaagtgaagttgagagcccagctgtgccatcttcatcaagacagccccctgctcagcctccacggacaggatccgagttccccaggctggagggagccccggccacaatgacgcccaagctggggcgaggtgtcttggaaggagatgatgttctcttttatgatgagtcaccaccaccaagaccaaaactgagtgctttagcagaagccaaaaagttagctgctatcaccaaattaagggcaaaaggccaggttcttacaaaaacaaacccaaacagcattaagaagaaacaaaaggaccctcaggacatcctggaggtgaaggaacgtgtagaaaaaaacaccatgttttcttctcaagctgaggatgaattggagcctgccaggaaaaaaaggagagaacaacttgcctatctggaatttgaggaatttcagaaaatcctaaaagcaaaatcaaaacacacagggcatcctgaaagaggccgaggctgagatgcaggagcgctactttgagccactggtgaaaaaaaaaa

SEQ ID NO: 64854 - DNA, 3004 bp, Homo sapiens
ttttttttttttaaaaaaaaaacaccttttttttttttttactgacttgtctgacgtctgtgtgcagtcagccgtcggcaggttgatgggtccagagtctgtggtgacagataatttgtaaacaccaggtgtttccatcagaactgacatgcgggtccttcagtgaagcttctagtgcctctgtcagtggaagagacagcaagaccaagttcttccagcgtctgtggccttctcctctaggtttcacctgcatgtcaggtatcatttccaattttcctttgtttcagttctggagcttctgagccaggcctttctcaaccacctctcctgctgctgaaacggggatggcgttttccctctccctgtcctggactggggtcagactgtgccccgaggagaagcagcagagaataggactacgtcatgggcatttcgtccacttatttgggtattttgggggccacagaacaatcctgactatcctagactcctcagagacctcagaggcagctgtgaatgtccctatgttgccgggagttcctgtttgaaatatttgaagcatagaggatgccacaagctgactttcttcatctaccttggtgatcttgaagcaaagaacagaactgatgctcaggccaggctcacctgtagccttacgccgcaagcatacgtgaggcgccagctctgtcgctgaaggagcgcttactcagaggagcggtcggccccctcttggtgttaaggtctcttagttaacctggctttttggtgcaggtgtgatctttgaagctcaggcaggtccctgatgccatcctaaggtgaggacaggaacctcacccaccatcttcttagcgtgtccctgatgactctgtcctctgttagatggtcgttgtgcttctgagtaaaagtacaacccgactccgttctctccccttcctgcagcagagctgggtccttccctggtggccgagtctctcttgccttagcttctttggtcaaagttggagaaaagcttcctgctattagtgctgttacagaacttgacggtttgtggatgtgagtgtgaatgtccctgtgttcttgggataacaagagcctttatgccaattatgcactgaactctgtgtagcctggtaatgtttatctgttcatttgataatgctgattttagtgtgttgcccccctccccccgttaatgtgtgttgatggtgaagtccttttgataatgctgattttggtgtgctgcctcccccttcccccccgttaatgtgtgtgttgacagtgaagtccttgggtggggccatgtgtgtgtttgtgatgttccttaagttgatgcagcttctaacctctgtgaaaacactggtcagagtggcttctccaagagctggcagctctgtgaactaaagcctgcatcatttttgttctgggattgaattctgcccatgggcatgtcttctcatagttgcttgctggtaggaaagaaatgggcgtgggtgctgccctggaagctgagcggaaagttgcctgtggttggtggaagctgatgagagcttgagctggcggtaagaaggagtctcccagggaagtgggagaggcattaaggtgatggccagggctgaggctccaccagcgtgagagggaacatgtgggaactggcccctgcccttgattcctctgcctcaaagttgggatctgaaagccatgtagggctagaagaccctgaggctgttctcccttctgttcatagtgagactcaaaaagccaagtcccagaagttctgaagggctgtgactagaagtgcccaggtccttcagggagctttaagaatgaccccacagaactcaagtttaactaggggttaggtcccagattcagacccaggagtttataaaaatgagctctacttccagttttggtttaaattacacatccaggccaggcacagtggctcacacctgtaatcccagcactttgggaggccagtgcgggcggatcatgaggtcaggagtttgagaccagcctggccaatgtggtgaaaccctgtctcttccaaaaatacaaaaattagctgggcgtggtggcacacgcctgtaatcccagctacttgggaggctgaggcaggagaatcgcttgaacctgggaggcagaggttgcagtgagccgagattgcgccaccgcactccagcctgggtgacagagtgagactccgtctcaaaaaacaaaaaggtgacacatccagctctttctccaggtcactgcgctggaggacagatgtgccgtcttgtcctgcctgtttcacatcagcataggatcaaaggatgacaatgctgacagcttctgaagccgaactcaacagtctcataggctcctcacttgtcacttatttttccctagctccctcaaccgcaccccatccctttagatcgtgcgtctgttttagtgactctgacacgatgccgtcctcaccttccaaatacccagttatttattcaagaggggggaagtgggtagaggatgggatgttttggaagcactttgcaagttaccactatctgaaaatcccctgctgttgcggggagaagctttgaatgcactgaagagaattccttctaaatgaaggcaggtgatagtgttctttctgtaagtaaagggaaagaaaaaaaacatagtttgcttaccaggtggagacaagattcaagacatagcagaagagtggaagacaaatattttccacttaaatgaggctgtttttgacgttctctgccaaggatttagagctttcgttgaactaacataaaaggagtgcgagtcttagtagagatgttccgtgtgtgccgcccgtgctctgaactgcgtttccacctgctgtggtgcttgtgcagcctggcagttcattgtcatctttaataaactaaggaaataaaattctgtctttcgtcagcctgccttgactgtcaagaaatggcatgtgtccactgtaaagcaggtatatctgaacattgagaag

SEQ ID NO: 64855 - DNA, 384 bp, Homo sapiens
tttcgtcttagctgggttttccttgttgctattttaaaaggtgtccaatgtgaggagcagctggtggagtctgggggaaccttggtacagccagggcggtccctgagactctcctgtacagcctctggattcacgtttggtgattatgctatgagctggttccgccaggctccagggaaggggctggaatgggtaggtttcattagaagcaaaccttacggtgggacagcagaatacgccgcgtctgtgaaaggcagattcagcatctcaagagatgactccaaaagcagtgccttccttcaaatgaacaacctaaaagccgaagatacagccatgtattactgtactagatctaagagatttctggcttaccactttgactcc

SEQ ID NO: 64856 - DNA, 798 bp, Homo sapiens
  misc_feature (1)...(798): n = a,t,c or g
tttcgtggaattacgcccgagtggagagtgtggaccgtgagtgtgggtatcagggagggctggatggaggcctgtgggtgggtgaactgcgtcctcctagctcagcccccaggaagctgaaagcccacgaggaaaaaatgtgggtgtcactgggcaagatggggataataggaggcccatgcaggaggcacaagagcccaaccaactgtcccatttttgccctgacctttgccctggtagtcctggcctttcccgcctacctgctgggcattgacagcgggcgactgcaggagaagctgaccagccgcaagatggacagccgctggggcgggcgcagcgagtccatcaatgtgaccctcaacgtggagcaggcagcctacacccgtgatgccctggccaaggggctctatgcccgcctcttcgacttcctcgtggaggcgagtggggctggggctggaaggcagagtggatgctctggggtcacaaacatttatggaagctgagtgcagtggctcacggctgcaatcccaatgccttgggtggctgagttgggagcattctttgaggccagaagttcaagaccagcctgggcaacatagcaagacccccatctctacagaaatttcaaattagctgggtgtagtggtgtgcatgtgcagttccggctactcagagggctgaggttgggggatcacttgaacccaggaggttggggctgcagtaagctatgaatgcgctattgtactccagcctggacgaaatcgtcgacccggccattgnnnnncggtccggcaggcg

SEQ ID NO: 64857 - DNA, 1173 bp, Homo sapiens
ctgcacgaattccgcacgagctgcttctgtgggatgtggtgacaggacagagtgtggaaagagcatctgtctccaggaacgtggtcactcacctgtgctgggtccccagagaaccatacatactacagacctctgaagataaaaccctcagattatgggacagtcgggggctgcaggtagctcatatgtttcctgcaaagcagcacattcagacctactgtgaagtcagtgtggatggacacaagtgtatctcctgcagcaatggctttggaggagaaggctgtgaagccacgttgtgggacctaagacagactcgaaacagaatatgtgagtataaggggcatttccagactgtcgcatcctgcgtctttctaccaagagcattggccttgatgcctttaattgctacctcatcacatgattgcaaggtgaagatttggaaccaagatactggagcctgccttttcaccttgtctctggatggatcaggacccttgacttctctggctgttggtgacgccatctccttattgtgtgcaagttttaacagaggaattcacttactcagaatggaccacagccaagggctggaactgcaggaagtggcagcattctgaggccaagagacactcactggacaatatcaaaccatggctcctcctcagcatggctttgtgtctttcccagttatcttgaggggagtgggatgtagggctggtattctttgcttaggttcatttacaagatgtatcagtgttgtaagtccaataatttaagtccagtgattcaaaatcaggtatagagtccagaaacatggactacacataaggttctctatttaagttaaatacaaatgcaactttttagtgagcttttaggactactcttcaaaaaaagtgtattgctcagaatgatgacctgtaaatgtaagagtggcaggcctctgtctgtgaaagtcagaacacagggctcgagcctctggaactgaccctttgcaagtctttacaaaagaaaaaaggcagtggggagagagagtgttttggttacatcaggaaataattgagatgggaaagaatagtgcagctccatagaggagacggactgtagacaatgagattaagcttcagtcactgctcttcagcaatgtgaagaatcaaagtcagggcctgtatt

SEQ ID NO: 64858 - DNA, 463 bp, Homo sapiens
ctcgctgcaggaatacgcccggcatttcgcgggcgatattttcacagctatttcaggagttcagccatgaacgcttattacattcaggatcgtcttgaggctcagagctgggcgcgtcactaccagcagctcgcccgtgaagagaaagaggcagaactggcagacgacatggaaaaaggcctgccccagcacctgtttgaatcgctatgcatcgatcatttgcaacgccacggggccagcaaaaaatccattacccgtgcgtttgatgacgatgttgagtttcaggagcgcatggcagaacacatccggtacatggttgaaaccattgctcaccaccaggttgatattgattcagaggtataaaacgaatgagtactgcactcgcaacgctggctgggaagctggctgaacgtgtcggcatggattctgtcgacccacaggaactgatcaccactcttcgccc

SEQ ID NO: 64859 - DNA, 862 bp, Homo sapiens
tttttcacacatgcagggagttgtattacaggaggggtaacactgagctcagggactccactgcttttatagcaaacagtaagcaagcttgctctctgtcctgatgggagacatcccatcatttttcaaggttgcttgctgcaacataaccctgagaaatgtcttggataaagagtggtgagagccttgcattcttggcatacttagcaaggtgtgtaggagtacaagagcctcacagaaaggagcctcccaatagatatgctctgtgaaatgatcagtgctctctcattccatgccgatgaccaacacttattaaaaaacagttgatcaagtaattccagtgaaagaagaggatctctggaagtaataaaaattgctcccttaattcattcttcttttttagtgccttctgtctagtgttttttcaaccataaaatattttttctttaggctcttcaattttcttctaaaataataaaattgtctttcatgggcctctgatgacttaacttcctttttttcttaggtagtctcccaggctctctgtggcttccacacagatgctaggatacatgccctcagtgtaagttgctaccagaagatacagatgggtcttcacgacaaccacaccagtgttctcatttttggcataaagagaatattcatctgcccggacacatctgtaatcttttcccttgaaatacagtccttctcttcgggcttgcaaagggttcttggcaaatccattcaccagtgttcggacatcactgggcgttacattgaaacctggtgatgctacacacaagctccgctcctggattttgatgagggctgcactgtccacatgcttggttcccaagag

SEQ ID NO: 64860 - DNA, 502 bp, Homo sapiens
caggaatttagttgccgttcttcccgcctgtcaggggcgggtttttttatatctcagataaatgcaaacgcatcgccaaacaggcgatcttcccgcgcattacgctcactgcaaaacagatcgcgggcaattttcgccatctcaaaacgtccggcaatatagatatcatgctctgccagcgtaccgtgatcctgcaataccgccgttaacacggtgccagtacgcccacgccagcccgcttccggttgttcaaccaccggcaccacttgcagaccaggatgcttcaacgaaagcgcctcaagctcgcagagatcatacagatgctgctcttcacgcccgccccagtaaatggtgatatcacggtttgggttacgcgccaacgctgtcagcaaaatcgagcgggcataagagaacccggtgccgcccgcaatcaaaatcatcggacgctcttcatcatcgcgcagccacgcttctccgtggggaatgtcgaccacgatttgat

SEQ ID NO: 64861 - DNA, 2873 bp, Homo sapiens
tcctgccgcgccggcagccacaggctggcatagcggctgccgacccgccctcgttcctccaccccctgcacgggactgctgggcccgccccgccccgcctgcaggtgaagcggccgcagccgccgagtaggtgcgtggggatgatctcactcgcgcgctccgcgccaggaggaggaggagcgggagcggatccaacttccgggtagtggagccgcaagccaccggcatcttgctttttcttccccctcctcctgtgtgccccgcgccgctccctctttcccttttattcccggccccacccgccaaaatgaacagctcggacgaagagaagcagctgcagctcattaccagtctgaaggagcaagcaataggcgaatatgaagaccttagagcagagaaccagaaaacaaaggagaagtgtgacaaaattaggcaagaacgagatgaagccgttaaaaaactggaagaatttcagaaaatttctcacatggtcatagaggaagttaatttcatgcagaaccatcttgaaatagagaagacttgtcgagaaagtgctgaagctttggcaacaaagctaaataaagaaaataaaacgttgaaaagaatcagcatgttgtacatggccaagctgggaccagatgtaataactgaagagataaacattgatgatgaagattcgactacagacacagacggtgccgccgagacttgtgtctcagtacagtgtcagaagcaaattaaagaacttcgagatcaaattgtatctgttcaggaggaaaagaagattttagccattgagctggaaaatctcaagagcaaactcgtagaagtaattgaagaagtaaataamgttaaacaagaaaagactgttttaaattcagaagttcttgaacagagaaaagtcttagaaaaatgcaatagagtgtccatgttagctgtagaagagtatgaggagatgcaagtaaacctggagctggagaaggaccttcgaaagaaagcagagtcatttgcacaagagatgttcattgagcaaaacaagctaaagagacaaagccaccttctgctgcagagctccatccctgatcagcagcttttgaaagctttagacgaaaatgcaaaactcacccagcaacttgaagaagagagaattcagcatcaacaaaaggtcaaagaattagaagagcaactagaaaatgaaacactccacaaagaaatacacaacctcaaacagcaactggagcttctagaggaagataaaaaggaattggaattgaaatatcagaattctgaagagaaagccagaaatttaaagcactctgttgatgaactccagaaacgagtgaaccagtctgagaattcagtacctccaccacctcctcctccaccaccacttccccctccacctcccaatcctatccgatccctcatgtccatgatccggaaacgatcccaccccagtggcagtggtgctaagaaagaaaaggcaactcaaccagaaacaactgaagaagtcacagatctaaagaggcaagcagttgaagagatgatggatagaattaaaaagggagttcatcttagacccgttaatcagacagccagaccgaagacaaagccagaatcttcgaaaggctgcgaaagtgcagtggatgaactaaaaggaatactggcctcccagtagcattggatgcaggaaaaaatacattgacggtgaaaaacaagccgaaccagttgtagttttagatcctgtttctacacatgaaccccaaaccaaagaccaggttgctgaaaaagatccaactcaacacaaggaggatgaaggcgaaattcaaccagaaaacaaagaagacagcattgaaaacgtgagagagacagacagctccaactgctgatccataaaccagaagcctgacatgtttggaagtccttttcaataagcacatgattagtgttgttatattggcaagggctgtaaacattctgctctggtcactgtattcagaatacaggttcttttctggtgtcacttttgtaagtagcaactataaacataagtaagctgtttagcaaaacacacattcctagtaggttttggttttttgatctttataaagatgaggtttttttcctagttactgtattaagtatgacttcttttagaaggttacaaaaaaattcagatgttgatacctttttaggaaatgtgcataccactcatcaaatggaatgctgaaagtttgaggtgcttgtatataatcggataaacaaaactgatcaacccaatgtgattttaaaagcccccaaagaagcttctgttttgggtctgatcctcttgatggagaaactgcagcagcatggaaattgttgggtactgtggcatacaagttattttctacagtagactgagataaactgaaaactcaggagctggcatcaaactcgtagtcccatagtcagtgttaattacacacattgttaactattggatgaaaaatacatgctattgattgtgtccaaagcctcccgaggacctccgtggggatgctctggtagcctgaatacagaactgaggtgaaagtccaaaccttgaattttacagtagtaagttggtaaaccatgtgctctgtgctatgagttaattatgttttcccaaatactaatgtggcacaagtaccatattttatcagagttcttatgtacagtatggtgaagataagtgacaagcacacatttttcttgcttcactgctgttctatattacacaggtttgttgttgttttttttaaaaaagaaattaagcagtagttagtctctaaaaatacaatgtttcaggctaccacagtgaataaatagaaatgtaatcagggattaaaaaa

SEQ ID NO: 64862 - DNA, 1809 bp, Homo sapiens
caacacgcgggcgataagtttgtttcttttaaacggcgcccccttttttttttttttgtggattttccttttaatgcaaaatgttgcaatacaaaacaatgtggagaaagtcctgttcctcaggacactgaagggaggagtgaggaagagaggacagagctggacgtctcctcctatttctccctccccaagtcactctgaggggaagaacactgctgcctgctccctgggcctgcccgcatacaaggttagagccctgggtctggggcatccttagcctgaaatttgttgacatggggcaggagagcaggagggaacattgagggttttgactcttcgggctctaaaaggattactcaggatctggagttccgtatgaaacaaaggagctgaaagaatttgattgccattggctaaaaatatagaggatttgagccacaactggcccacatttgaagaatgaggaacaagaaatttagtggggatataatataaatgtatgggagtgagaaagatgcaaaaaacaaggctagctcctcaaacctcctcctctttcttcctcatctccagcttatagacaatctggtagccatcatcccaggcatagagctggcgttctcgggggttatagcggaggctggcatgggcaccatatctgcggggaaaataagggagtgctgcccgttcaggggtcagggtgccgctggcatcaaaggagcactggatgcgggcccgactggcaggacgggtgttatagacgacatagagggtcccacagatgacaaaggcagcctcagcattctctctgggacatggtgtgtcccactgctgctctgtgtccagtgtctgtggatctaacttggccagacacaagtgcctgtcatcctcccgggtggcatagacagcccaaagaccttcctcatcagctgccaggtcgatgtaggtgtctgctgtcaagccgtagggggggatcagcccctctgctgggaatactgagctgtccaccactgttcggtttgccaggtggaatttgattagctgcaaagtgttctccatctcaccacctccaccaggtcttccaggaggcctccgagcaaaataaagaaagccaccatataccagctgccctgtgcctacccaggggaagggcacccggactcgggaagctttccgggcagccatggcaagggtgaagtcacgcagccttgggaagacaaaggctgtgtcattctgtgtcccatctaacacgtagatcttctctgtttgccccagtggatccttggtccatagaccagctgggccaccaaatcgcttcagaatcttcattgatctcacttgagagattgtgtagccacagtctgtcaccatatcgtacttctcattccttcttcccttgcctttggtcccagggcctccagtcaccttctcatcaaactctacacagggcagagctgggttctgggtctccagatagtctacctcccgctccagacgatccactctcccggagatggtgtcggcctcagttctgagtgcctcccgctccttctctgccacctccagcagtggcagcatcttgttcttgaagtcccgcagctcagcagcatgccgactactctggtcctggcactgggccagccgttcctctaaagcagctagtcggcgttccatgtactccacaaggtggtgctgctgtccttggaggggtcccgaccatgacaaaaggaacaagatgaggagaggggtgctgggccccatggcagcctggagagtggtgccagagtagaaggaacgtacagtcagcctctt

SEQ ID NO: 64863 - DNA, 587 bp, Homo sapiens
  misc_feature (1)...(587): n = a,t,c or g
ttttttttttttattgacatttcgatctaagtggtcataaaccagataggtagttttattaaaagatttaccctaagaacactccttctattcccatttctgacatcctacccacacccacattcatcgactaccatgtcttcataatgtcgtagaatgacattgtcattattgtcctggtagagcatggaaatgggagacagcttggtggggatacacacagcctgggggatctctgggtcaacggcatgcatcagggcttgcatgaaagcataattggagctgttgagagagatggtcagtgagaagggacactctccatggcagtaatttgccatgaaccccttgggggcaatgatccacttgtgccaacccaggtcccggaagttaatgaatagctggtgacggtggcagaggttcttacaagaaagcttggggacagggatggctgctctccttttccgagaagggtggcactgatcagggttgagagtcaccaccagcagggaagcatgaagggagcatcttagtctggcacaggtgtcttcaggctgaaaattcacccctgagtcncnatcttctttgac

SEQ ID NO: 64864 - DNA, 598 bp, Homo sapiens
ctacacgacggtattcatttaggcggaaccatcctccatgtgcgtatcgccagcggcgttgatatgggtcagttgcacaatacttatttcttcaaatgtggatggaaattacacggacgcgtacgggcatccagctgcggcgcgatgatattttcccatgcggtacggcacgctttggtcgaacccggcatggcgaaaatcagcgttttgttggcgacgcccgctaccgcacgagattgcaacgtggaagtgccaatctcttcaaacgacaacatccggaacacttcaccaaaaccttcaacttcacggtcgaacaacggcagcaatgcttcgggagcctgatcaccttccgtcaggccagtaccacccgtaatcaataccacttgtacatcgtcgctggcgatccacgcagatacctgagcgcgaatagcgtagcggttttctttcacaatggctttatcgacaacgtgatggcccgcttcttgcgccgaatcgcgcagatagtgaccggaggtatcgtcttcttcaccgcgacgattagaaaccgtaagaatagcaatacgggtcgggataaattcagtgcttacctgactcatct

SEQ ID NO: 64865 - DNA, 454 bp, Homo sapiens
tgcggtctgcctggtgaaataaaacaacaactggaagagcttgaaagcgactggcgcaagcaacacgctttattcagcgaacagcaaaaatgtctgtttatccctggcgactggttaggtcgcattgaagccagcctacaggatgtcggtgcacagattcgccaggcacaacaatgctaacgctggatacgcttaatgtgatgctggccgtcagcgaagagggattgatcgaagagatgatcatcgcactgctggcctcaccgcagctggcggtcttctttgaaaaattcccacgcctgaaggcggcaatcactgatgatgttccccgctggcgtgaagcgctgcgcagtcggctgaaagatgcccgagtcccgccggaactcaccgaagaggtgatgtgctatcagcaaagccagctcctctccacgccacagtttattgtgcagctaccaca

SEQ ID NO: 64866 - DNA, 2177 bp, Homo sapiens
ttttttttttttaaatacaaatgttttattacgcaaaccacatgtaggtcccaggctcaggggcttaccctacagcccccactggtccctggctccaagcctgctccttgcccttgcccaccctggaaagccaggatctcctatggagtgtgtaggtgtccacgagtgtaccggtgtgcgggcctcctgggctgcaggcactcaggcatggtggcagcattgagggaaagacaggtgttggggagcggggtccccacctgcccaggctcaggagtcacaggggtctgcacagtcctttctgctgtggaacacgtgatagatgctggtcggggggaacatagcaacagcgccgagcagagagcccacctggatggccacgccggctgccagcaatgccggccggcccccgccatgcagcagggagctggctgccaccttcacgtaggagaacacgccaagacacagcacccacgacagcaccacgaggaccacccccgccgaggtgcccaccaggggcgggcaggggctcaggactgccagcgccatcaggtagcccccacagaacacgcccagcagagagaggccgcccagccctgccaaggacctgcacagcacacccatggccaggaagcaggccaggggattggcagcactgcccagcaccacagccaggtggtaggccagacgcccgtagggtaagcaggaaaagctctgcacggcaggcagcacgccattggtcagcgcgttggtggcggccaacaggcccagcaggcaggcactgcgggctgatagaagctgataggccttagggtctggaccaggggtggtgcctgctgcctggcttggtggctcttgcagtggtgaggactcttccacctcttcctctgctcctggggctcccacctggaggcctgatcctaactcccctgtgggtacagatggtggtggcggcaacagcagcagaagaccctggaaggcagcagctgaagcgaccagaagggcagtcagtgcccagaagaaggtgctggcgggaaaacgctcaaggaagtcgagcggggggccaggggtgccgttgatgggggctggcgggcactcgaggcggcccacaccctgcactagggccagcacgcagggcagcagggcactcaggccttgacccaggaagaatgaccgtaagaagcgaggtggcaggtggctcaagaagggcaggaaagtgacattcgaggcacagcatgccagtgccagcacaaaggccagtgctaagaaggccacagaatgcaactgtcctgccactggggccacatggtgccacagagaggccagcagggctgtgcccaccatgcccagcacctgcaccacccggatggggacctgctcgtcctttcctggggccagcctcctccagagggtcaccaccagcagacccaggttccccagagccacaagcacagagacgtaagaggggaggctccaaccctctggaagctctttgaccaccacaggtagctccacccagatcccattgaccgcagcccaggagcccatgccgaagagagccaccagcaggtgggtcagcaccggacgggcgggcgtgggtgctgccattcagcccaaggctgggcccttccaggtcagggcaaaggtcacagccagttcttttcccacctagggccagacacgctttggctctcctgggaagtgaagactttttctagccagcgggaccgccggcaggcagggaagcaggaagccggcccgagtcgctgcggccccaggggaggaggccgaaggagcgagtggagccctcctctccagggagaggcggggctggagtcaacgccaccaccaccccaagccggacgccgggaaagggcgcctaccaggaggagccacgcacaccccagggcttcacggtgcccgcgaccgcaagagccaagtcagatcccaggggagtggccgggacggctctgctcggaggggcgccgccctctcggtaccgtcaggtgggcgactcgggagccgtccggtccctgcgcctcccggtcccgcgcccagtgcgctcccgctccagtgccggcttcccgccacgccgggacaccgccgtccggcccagggacgccacctcagtccggagcgcgcaggacccggcagcagccacgacccgactcacccgtggc

SEQ ID NO: 64867 - DNA, 1228 bp, Homo sapiens
ctgcaggattcggcacgagaatacagcgagctcctggacaaggcttcggaaactgatgatccatatgagcgcatggttctcgttgccgcatttgcagtttcaggatactgctccacctatttcagagcaggaagtaagccattcaacccagtccttggggagacttatgaatgcattagagaagacaagggattccgctttttctcagaacaggttagccatcatccacccatttctgcctgtcactgtgaatcaaagaattttgtgttttggcaagatatcagatggaaaaacaagttctgggggaagtcgatggaaatcctgcctgttggaacactgaatgtcatgcttccaaagtatggagattactatgtgtggaataaagtcaccacttgcatacacaacatcctcagtgggagaagatggatagaacattatggagaagtaaccatcagaaataccaaaagcagtgtttgcatttgcaaactcacatttgtcaaggtgaattattggaattctaacatgaatgaagtccagggggtggtgatagatcaggaggggaaggcggtgtaccggctgtttggaaagtggcatgaaggactctactgtggtgtggccccctctgcaaagtgcatttggagaccaggttccatgccaacaaactatgagctgtactatggcttcacaaggtttgctattgagctcaatgagttagatccagtactaaaagatctccttccaccaacagacgcccggttccggccagatcaaagatttttggaagaaggaaatttagaagctgcagcatcagagaagcaaagagtagaggaactccagagatctcggagacgatatatggaagaaaacaatcttgaacatataccaaaattttttaaaaaagttattgatgccaatcaaagagaagcctgggtttctaacgacacctactgggagcttcgaaaggaccctgggtttagcaaagtagacagccctgttctttggtagactgggaatgtagagctagccaacatatcacattctgaatgaataaataactatgcacaattatgtttcttatagctatgtgtggtttctgggtcgactgaaaacctaccatttgcttttctattcatctttataatggactttcagaagtgcattagacaaggcccctaaccactttgggatcctttctgttttgctgcaaccatattccttaaaaaaaaaa

SEQ ID NO: 64868 - DNA, 1833 bp, Homo sapiens
gtaatgatgctacctgtcatttctgagactggtttgtgtctttcgtgtttttttctgatctgtctggctagaggtttaccaattgatttgattttcctcaaacttctggttacaatgattctctctctctctcttttcctgattatattaatttctgttctgatctttgtttcctttcttctgcttactggattttatttgctctttttctggtttcttactgtaaaggcagaagtcattgatttgcattgatttgagacttcttttctaatgtaggcagtaagtggtgtaaattcccttttagtatgactttagtggcatctcacattgatatgttttcaatttcattcagtttatttttatttattttttaaattatttatttttttttttattattttgagttgtgtagcccttctattacgcaactcaaaatagaagcgtatctgttgtacaacatgggtagtaattgactataactggagatttattatattctaatacagatcatttataaatgcaatttctttattaaaaagcttccacctttttgtttgtttgtgtacaatttgcaaaactattctgaaagcggaatatatgtgcacaagtctgcaaagagtgcaaatttaggatatggtaaatgctttacaagttactttcaaaaaactgtctgccacaactgagcctttacattgtcatcttttttgatcaaaatattttgatgccagccttccttccactgccctaaactataaagcattttttaatgagttgaaattaaggaaggactacccctactagaaaaaaagagaagaaagttctattagtttgaggtttcagaatccccccaaaccaggaccagtatcgtggtaaaggctaggctgggaccccggacagagtatgagaatgtgcaggtggcatccctgaggattcagagcttcagtggaccgtgagtgctccagctgcataactcactgaactgtcttgccagtttctacactggctcgactgggcataattcaaaaacgaaaaactcatattcattccattcttctggagctctgtgatagcatttaataacaccccaatgggatgtcttccacatatagtattatggtatttcttcaagtaattgctaaaagatacagggtctaattgttctataatactcatacccattttatctagatgttcaatggatctataaatctccccctgggattcatcatagtaactgtaacggaacctttgaccccaatggcagaaatcagaagaaaccacaaagagattactaggatccgctagatatttactgaagagttttccgaattcctgttcttttgactcactcagagctccaaccagtacaggaataatggtaaactcatccttatggctttccatggctttagctgtataaggcaaatgcatttcaatactgtgttcatcttcatctgtctgcagagacatgcgttcaaacattcctgtcttccacagttctccgtaaatcttttggtcaatacgaaggtcatacagaggtgtcctatatatatccacactggaaagtgcacatcgagagaggggcacatgatgagaaggcccaaggatgaaaattctccgggtaatagacggatccacttgtttataagcatgggcagcacaagacccacagtacgtatatcctgcatggggggcaataatggctctagcaggtctttttgtagactgtacttgtgaaagccaaccttctagctgtgcattcagctgcggtcctgaggctgtgtaccagctcccggcgtgactggcttctcggcagaccactcggttggacat

SEQ ID NO: 64869 - DNA, 970 bp, Homo sapiens
ttgcggaattcggcacgaggccgactacaacagattggagccatggctttggaacagaaccagtcaacagattattattatgaggaaaatgaaatgaatggcacttatgactacagtcaatatgaactgatctgtatcaaagaagatgtcagagaatttgcaaaagttttcctccctgtattcctcacaatagttttcgtcattggacttgcaggcaattccatggtagtggcaatttatgccaaacattaaaatatctcgacccctaaaagttctgctcacagtcgttatagttttcattgtcactcaactgccttataacattgtcaagttctgccgagccatagacatcatctactccctgatcaccagctgcaacatgagcaaacgcatggacatcgccatccaagtcacagaaagcatcgcactctttcacagctgcctcaacccaatcctttatgtttttatgggagcatctttcaaaaactacgttatgaaagtggccaagaaatatgggtcctggagaagacagagacaaagtgtggaggagtttccttttgattctgagggtcctacagagccaaccagtacttttagcatttaaagctcatccataataactccgggacgactgactacacaaggagagaatggtgattggcatttacctgtcatacagaagcaagagcaatcaaggcatagtccacgtggctgagtccgctgacagctggcaaaaacaagttccagagaccctcgactttggccatttcctgtcaaggtgatgaacatgccagagtgaccataatttaccaggactcacagtagtttatttctttttttaaatattggtatttatgatctttgaaatttaaaaacacttatggagttatttattttactgtattctccagtgagcaaaaccaagttcttattaattcattataaatcaacagtttaaccattaaaaaaa

SEQ ID NO: 64870 - DNA, 1329 bp, Homo sapiens
tgcggacttccgacgaggaggagggctgggtcgccagtgtgacaggagactgcaaatcccttttgtgaaaggagaactggtactttgcgtgaggttaaacttcacaaaccgctgctcagaaatctgctattttccttctcttttaggactttatggacagcagcctgctaaccaagtcatcattcgagagcgctatcgagacaacgacagcgacctggcactgggcatgctggcaggagcagccacgggcatggccttagggtctctattttgggtcttctaggggcctcaaggtcttgatgtgcatagcttctgataaccctgtgtgcaataatatgatttgcagggcatttctgtttgtgacaaaagtttttaataatagttttaatcattcctttgaaagtagtgatgtcataattgtactaatccacataagtaccacagagaagggtttgaactgtgctattttgttcaaatgttgactctccgggggcactggctcattccaagactgttcttgtgcaactctcagaataccttatttgagcatacctgttttgaaaggcattttctttttagagttaggtgtagtgcttaagggttaatttattttcatgttatgccagtaatatagtgttgtatgcctattgagtgattgtggcaagaaaagctacagcttctttgcgtttaactttttcaaaccacagaccagaactggttgcatgttactttaggagttgtgggttggtaagctcccaggtacttcccgaggctatggtgtgagagcccccgtcctgccctctggggctccacaggcccctggcaaggccgatggctcaggatgatggggcacagcccgcctttgaacaatcatgcttcagaaatctgcctgaccctagctgctgctgctggctcactttattcttgtatggctttggtaggcatacttggagaacatatcccacattagggaattgatttaagcctgagagtttgagggctttaatcctttaaaacttggagaagctggctgggccgcgggtgctcacgcctgtaatcccagcactttgagagaccgaggccgggccggatcacgaaggtcaggaagatcggagaccatcctggctaacacggtgaaaccccatcttctactaaaaatacaaaaaattaacctgggcgtggtggcaaggcgcctgtggtcccagctactcgggaggctgaggcaggagaatagtgtgaacccaggaggcggagcttgcagtgagccaagatagtgccactgcacttcagcctgggtgacagatgtgagactctgtctcaaaaaaaaaa

SEQ ID NO: 64871 - DNA, 1916 bp, Homo sapiens
ttttttttttttgagcaggagctgggcctttgagggcccctgctccaaccccaagctgcatttatgaaataacccatcacaggtggattttaaaaatacccaaaaaaaatatttaatatacattataaaacctagggggggtttggagggggcctgagcgatatgcaaacagggaggaccttcaggaaagctcgggccagggtcggggatgaggaagggaaggggcacagtacttcatatgaaactcataaatacccacaggtggctgctggacaggcccagctggctctgggggcctgggtgttaagaagggacagcaggtgaagggttaaccttcagtccccagaaactgggtctgggagctgctactctaggcaggtagattgaggtggggaagaacctaagggagcagtgccccaccaagggtttgtcagattcaagcctcaggcaagagaaaaatcaaaagccttctgctactctctccctctgggcctctggtctgcccagaggctgggactccttcctctaccttgctctcaatctggagggtgctggggggtgccccatcttcctggggcccctggctggcttgtgggctaatgaggtgctaatggggtctagtagctgctgtgctcccttcttcatgcccagtctgaaacaggtgctcccctaacccagcgcccctcgatgaggctccactccacactgcagagcctctcccctaccctgcggccagcccccgccccagggaggtagtataaacctgggctctggggacaagcagccctggatgagaactccagctctgcccacctctcctgtgggtccctcaacttcctggagcctgggcacttcatctgaaacccagagacctacgctcgctgtgcggagtctgaggaccacacaagccatgcaaggagtctgggcaccaggcctgggacacaaaggggcaaggaagtgtgggcccctctgtcctcagtccaaccccaaccggacactcccagggcctctgctcactgactcccttggtctccatcctgccctcacctgcccatcatgctcccccaagggtgggtgggggtacagtggccacacatgctggaggctgaaggtgtcccctatccccacctctctgaggtcacgcgaggctgggcagagcagggtgatggtgggtcagcgccccggacaggctgccccaccgttgagccctcctctcctctcttctcccacaattaaagcgcagaacagtggcagggagtgtgtgtgctggggtaggtggggaggcctcctgggtcctgggcctgaggcctggcaggtagatgaatcctcaatcctggacccccccaggggtgccaggcaggtgtggagaggagatgctcaccctgcatccttaaggaggcgcagagggcaccctagtctttgacgagcttgtagacatggtgctgggccccgtgctcactggtggagacttcgaagacaaaagcaatgacaagcagggtctcctgggagtcccggctcgtgaccacctgcaggatggtgaagttctccagcacgctgttcatcatgtacttctcgggcaggtgcttcagcttgtggatgaagttgatcatgtaaggagtctgggcaccaggcctgggacacaaaggggcaaggaagtgtgggcccctctgtcctcagtccaaccccgaccggacactcccagggcctctgctcactgactcccttggtctccatcctgccctcacctgcccatcatgctcccccaagggtgggtgggggtacagtggccacacatgctggaggctgaaggtgtcccctatccccacctctctgaggtcacgcgaggctgggcagagcagggtgatggtgggtcagcgccccggacaggctgcctcgtgccgaattcctgcagagcg

SEQ ID NO: 64872 - DNA, 414 bp, Homo sapiens
cccgcctgcaggaattcggcacgagccaaaactgaacttctaaaataactaggaaggactcgagaaactacatgatatgataattaaaaggagaaaaatgttgcggcaacagaaaaagaagagatgaatggcagtaccttttatattggtgtggaataggttttcctgggtctgatttctgacaagctgaagagtgtctacagcctggtttgcctgtctgccctcatggatgctattaaagctttgttttgttgaacagtcagatacccaactctgttgccttgtggaagatgagtcaatgcaatgcttcttaaagtggtctcttctccctgacccacaaatcttttggtactaccattttgggaagtcaaaaaaggctagtaattgaccagaaaacaattttgtggaaatttg

SEQ ID NO: 64873 - DNA, 5980 bp, Homo sapiens
atcctgctttcagagaacttaaggaaagatgtagaagctgtaactggcagtcctgctagtcagacatccatttgtattggaattttacttagaagtgcagaactggctcttttgctccatccagtggatcaagcaaatactcttaagtctcctgtttctgaaagtgtgagcccagtggtacctgattatttgcctacagaaaatggggattttttgtcttcaaaaagaaaacaaattagtagggatataaatagaattagaagtgtaactgttaatcatatgtcagacaacagatctatgagtgttgaccttagccatatccctttaaaggatcctttgctttttaaatcagctagtgatacaaatctgcaaaaaggcatttcttttatggactatttatcagataaacatttagggaaaataagtgaagatgaaagtagtggacttgtttacaaaagtggctcaggagaaattggatcagaaacaagtgacaaaaaggattcattttatacagattcaagtagtgtcttaaactacagagaagattcgaatatactttcatttgatagtgatggtaatcaaaacatactttcaagtactttaactagtaaaggaaatgaaaccatagagtccatctttaaagctgaagatttgcttccagaagcagcttcactctctgaaaacctggatatcagtaaagaagagacccccccagttagaacacttaaatcacagtcatctttaagtggaaagcctaaggaacgttgcccacccaacctggctcctctctgtgtttcttataagaatatgaaaagaagctcttcacaaatgtcattggataccatttcacttgacagcatgatattggaagaacagttattagaaagtgatggaagtgatagccatatgtttttggaaaaaggaaataaaaagaactcaactacaaattacaggggcacagcagaaagtgtgaatgctggtgcaaacctacagaattatggtgaaacttctccagatgccatcagtacaaattcagagggtgctcaggaaaatcatgatgacctgatgtccgttgtggtatttaaaattactggtgttaatggggaaattgacatccgaggggaagatacagaaatctgtcttcaagtgaaccaggtgacaccagaccaattaggcaatatcagccttcggcattacctttgtaatcgtccagttggttccgatcagaaagctgtaattcattccaaatcctctcctgagatttctctgagatttgaaagtgggcctggtgctgtaatacactctttacttgcagaaaaaaatggatttctgcagtgccacatagaaaacttcagcactgagtttcttacatcttctcttatgaatattcaacattttttggaagatgaaactgttgcaacagtaatgccaatgaagatacaagtttctaacacgaaaataaatttaaaagatgatagtccccggagtagtacagtatcccttgaaccagctcctgtaactgtacatattgatcatcttgtggtagagagaagtgacgatggctcttttcatatcagagattctcacatgcttaacactggaaatgatttgaaagaaaatgtcaaaagcgattcagtgctgctgaccagtggaaagtatgatctgaagaaacaacgcagtgtcacgcaagccactcagacaagcccaggggttccttggccttctcagtcagctaactttcctgagttctcctttgacttcactagggaacagctcatggaagagaatgaatctcttaaacaggaactggctaaagctaaaatggctcttgcagaggctcacttggaaaaagatgctcttcttcatcatataaagaagatgacagttgaatagcaggagtggcagtcaaaactgaaattatagctctgggagtaggaaggttatatttataatgtggatgttaccagttaggggaagacttttattttcatgaaaagacaataaaacaaaatggaatgtgatgaagtggtgactatttcaaagccagtttagaaagtattagtacgggcattacaatcttttggttgttttgtgttttggggcttaaccctcttttaagctgttgtgatcctagggaagtcaacacatagtgtaaaataattaccatgccctaatgaaaagaagatgtcatttcctaattttgatatctcattttcggcattttttaaaatgtaaaaggaaaacctcttgtgttcacacagattgctgaattgatttctccatatttgttaataatttactattatttacaaagattcaaatgcttttatgactaatgtaaaatgaaaagaggcttacattttaaatgttattaaaattatgtacttaaatctataattatttaattattgtaaaaagtccaagcagatcaataaactatataattaatgggtttggaaaatcatcaccctactgaacttacaaaatatcttgaaaatgtgaaaaatatcattttaaataatgggtacattgtataagtggaagctataattttcaacaaaaagatggtacaaatgtaaaagtaaaaagcacaaactatacaaaagcaaaatctatggccaagtgatttaaaagcattacttgtacattcctttaaacatttgttgttagaagcaaaagagtaatttatcctgctaaatttggcaccatttgtaattataaaaattttgattaatactatttatattaatttctttaccttcattttttctccttaaggagttgattgtttttggaaatgtttttttccttgcacataagacagtttcataccattcttatagaatcatattaggtgggtgtttgcacatactaaatttataaagctagttttgattaaagctctatgtgagatatatatacatacacaagtcttctataataagagtcgttggtgaattttgaattctattttgttaggaattaaggttgaaatcaacatgaaagaatctcaatcatgcattataaaataaaagtacatgggtgttaagaaacaagagacttttaaagatttaaaatatatttctgatagaatttaactaagtggtgtgtattttaaaattcacattcttaaacataaatctatccaagatagaaaatgaaatagctggactactctttctttaagatacttgaaaattttaaaccacattgcaacactttatggtgctttgcgtgtttggcatgacatacacagtggtcctggtatataagtgcttgggggaaaatacatattttgtttacattaaattttgaagtgatttaggctttattgaaaacaatactggccttccctccccttctctaacatccattttcatttacgttatttaaaatatacaggcactgttttgggtacagaggatatagccaagagcaaattgatagtagtttacctcagagtattaaaaaaatcataataagtcatgttaatctaaaactatataatagccttagattaaatgtgcagatgtctaattaaagatttaaaatgtatagcgtatgtccttagaacatttgatttttaggtatacattcggcaaaaacagtctgttatggaaaagaaggattgatgggacattaacttcttccgagctaacattgtttctgaagattgacctattctatataaatttaaatttttctatgtttttctttttttttttgcgatgaggtttcgctcttgttgcccaggctggagtacaagggggggatcttagctcaccgcaacctccgcctcgggggttcaaatgattctcctgtctcagcctcctgagtaactggggttacaagcgcccaccattacgcccagctaatttttggtatttttggtagacacagggtttcaccatgttggccaggctggtcttcaactcctgaccccaggtgatccgcccacctcagcctcccaaggtgctgggattgcaggcgtgagccaccgtacccggcctctatcgtatattataattgcttattgttatagaagctgaatgttttacttactacttttaaatttatttggtcttcccaaggaaatcatacaaacggtagagattatgataatctgagcattctgtgtgcttagtttgatttttttatttataagcagtactatttttatagatgtttaaaattcataaaacactgtattctgagaggtaggtattattcaaatgttagaaattttttttaaaaaaatgccctgaggcttagaaaggacaaatgactgaaatcacaattagtaatctggtctttagacttaaagcctagttatatgcttttattatagcttagtcattaattcacacattttcccttatcttttttatcttttaaaggtgaccataaaactttaaattgtgtgtgtacgtctatgtatgaggtatatgttaccctgtttgtgttattcaaactacctaaaagataggatgatttttgtttaagtgaatcccaaactagcagtctgagaaatacaggaaagcctgataattgacttaccagagttggctttttttttttaagttaccataatttagatataaagttgtcatgtcctggaatttaaaaaagaaatctctagctgagagatgttaatggtcaggagttgaaaatgacaattgtgctttgctttttatttttattttttgtttacttttgagttttttggagtttttttcctatatttttaattgagaagtaaaaattatatatttatggtgtacaacacgatgtgatacatgtataccttgtggaatggctaaatcaagctgtctaacatgttacctcacaaactttttttgtagcgagaacacttaaaattttgtaacaattttcaagtatacagcatattgttattaactgtaatcacgtgatatacagtagatctcttgaacttatatttactaactgcaatttcgtgtccttttacaaacatctccccatttccccatcccccagcctctgataaccagaattttactctccatcccatgaagttgactttttttgcactccgtaagtgagatcatctagaattttggcatgtctttctgtgcctggcttatttcacttaacacagtggtcccctgtgtagctgggaccacaggcgtgtgccactacacccaggtttatccatgttgtcagaaatgacaggatttcctttttttaaaagttgaatggtattctcttatgtatattttccacatttgctttttccattcatccattgatggacagttaaattgattccatatcttggctattgagtaatgctgcagtgaacatgggattgcagatatctcttccacatactgatttcgtttcctttgaacatataccaaatagtgggattggtggataatatggtagttctattttttaatgttttgaggaccctccatactgttttccataatggctataataatttacattgccaccaacagtgtacaaagcttttctttccttttctctgcatcctctccaacacttcccttttgtcttcttgataatagtcattctaacgggtatgattacagtagctttgtagtgggttttctgtgctgtgctttttaatttcatgtatgtaaaaaacattgggtattttgaatgtttttcttttctcaccttatcctagaacttgaggctgggcgcggtggctcatccctgtagtctcagcactttgggaggccaaattgggcagatcacttgaggtcaggagttcgagaccagcctggccaacatggtgaaaccccatttctactaaaaatacaaaaattagccaggcgtggtggtgcacgcctgtagtcccagccaatcagtaggctgaggcacgagaatcgcttgaacccaggaggccaaggctgcagtgagccacgattgcaccactgcactctaacctgagcaacacagactccatctc

SEQ ID NO: 64874 - DNA, 533 bp, Homo sapiens
ttggattaaacaaccatttattatggggcaaactgcaagcaagcactttgaacacatggattttttggaagaaaggtgacaagaaaatcagagaaaacatcattgcatttttagggggaaaactacaaatttctaatttagctgcagaaaaaataattagagaacacaaataaaatgtactagtgaatacatgcttctctagacccaaacaaaaactatttgcaacgtaattaaaacaggttaagtgctgtgaaaaatagaaacatggtgacatagaagagcctgacgggggaacctaaccgagtcctgagagtgtaagccagcttccccaaggaagtgacacttcaaccgagatctgaaggacagcagtctataaatgaagtagagaaaggcagtgctgagggcagagggcacctgcatgggcagaggctgggagcaagatgagtacagcgtgccccaagtaatcaggaagtgccagtggctggagtgcagagacagcagcgcagttttagctagagatgagagtaagggag

SEQ ID NO: 64875 - DNA, 1882 bp, Homo sapiens
  misc_feature (1)...(1882): n = a,t,c or g
ggacttcggcacgaggtcacactgcgggtgctcctcaaagacgcgctgctggagcctggcgccggggtgctgtccatctactacctggggaagaagttcctgggcgacctgcagccagacggaaggatcatgtggcaggagaccgggcagaccttcaactcacccagcgcctgggccacccactgcaagaagctggtgaaccctgccaagaagtcgggctgtggctgggcctctgtcaagtacaaaggccagaaactggacaagtacaaggccacctggctccggctgcaccagctgcacacgcctgccacggctgctgatgagagcccagccagtgaaggggaggaggaggagttgctgatggaagaggaggaggaggacgttctggcgggggtctcagcagaggacaagagtcggagaccactggggaagagcccttcagagcctgcccacccggaggccacaaccccagggaagcgggtggacagcaagatccgggttccggtccgctactgcatgctgggcagccgcgacttggccaggaacccccacaccctggtggaagtaacatcctttgcagccatcaacaagttccagccgttcaacgtggctgtttctagcaacgtgctgttcctgctggacttccacagtcacctgacacggagtgaggtcgtgggttacctggggggccgctgggacgtcaacagccagatgctgacggtgctcagagccttcccttgtcggagccggctcggggacgcaaagactgcagctgccatcgaagaggagatctaccagagcctgttcctgcggggcctgtccctggtgggctggtaccacagccacccacacagcccggcgctgccatctctgcaggacatcgacgcacagatggactaccagctgcggctgcagggctccagcaatggcttccagccctgcctcgccctgctctgctccccttactattctggcaacccaggccccgagtccaagatctcgcctttctgggtgatgcctcctcccgagcaaaggcccagtgactatggcatccccatggatgtggagatggcctacgtccaggacagcttcctgaccaatgacatccttcacgagatgatgctgctggtggagttctacaagggttcccctgacctcgtgaggctccaggaaccctggagccaggagcacacctacctcgacaagcttaagatctccttggccagcaggacgcccaaggaccagagcctgtgtcacgtcctggaacaggtgtgcggcgtcctcaagcaggggagctgagccttccagggcagggtgggctccagttgtcttgagggtccggatgggctcaagttctggagggggtcaatgaagttctgcttgacctcgatgtccagggagtccttcacctctgccaggcgcttcatggactcgccggcatccagcaatgcgtcacctgtggagaagtggtgggggaagccatcataccgggcctgggaccactagactgagacactcctcagcctttgtttttgaaatagcgtttcacaggctggaacgcagtggcgctgtaccagctcactgcaggcctcaaactgggctcaagccatgctggcacctcagcctcccaagtagccgggaccacaggcgttcacccccacacctggatcctttccaacttctttgagatgaagtctcgctgttgcccaggctgcagtgcagtggcatgatctcagctcactgcaacctctgcctcccaggttcaagcaattctcctgtctcagcctcctgagtaagggggattacaggggcctgccaccacatccagctaatttttgtatttttaatagagacgggtttcaccatatagaccnacaaaaaa

SEQ ID NO: 64876 - DNA, 2567 bp, Homo sapiens
atcgttacgatatcattacgccaagcttggcacgaggcaaagtgacaaatggcctacagctgtgagagcaaatggacatctcctcctgaactctgagaagatgtcaaaatccacaggcaacttcctcactttgacccaagctattgacaaattttcagcagatggaatgcgtttggctctggctgatgctggtgacactgtagaagatgccaactttgtggaagccatggcagatgcaggtattctccgtctgtacacctgggtagagtgggtgaaagaaatggttgccaactgggacagcctaagaagtggtcctgccagcactttcaatgatagagtttttgccagtgaattgaatgcaggaattataaaaacagatcaaaactatgaaaagatgatgtttaaagaagctttgaaaacagggttttttgagtttcaggccgcaaaagataagtaccgtgaattggctgtggaagggatgcacagagaacttgtgttccggtttattgaagttcagacacttctcctcgctccattctgtccacatttgtgtgagcacatctggacactcctgggaaagcctgactcaattatgaatgcttcatggcctgtggcaggtcctgttaatgaagttttaatacactcctcacagtatcttatggaagtaacacatgaccttagactacgactcaagaactatatgatgccagctaaagggaagaagactgacaaacaacccctgcagaagccctcacattgcaccatctatgtggcaaagaactatccaccttggcaacataccaccctgtctgttctacgtaaacactttgaggccaataacggaaaactgcctgacaacaaagtcattgctagtgaactaggcagtatgccagaactgaagaaatacatgaagaaagtcatgccatttgttgccatgattaaggaaaatctggagaagatggggcctcgtattctggatttgcaattagaatttgatgaaaaggctgtgcttatggagaatatagtctatctgactaattcgcttgagctagaacacatagaagtcaagtttgcctccgaagcagaagataaaatcagggaagactgctgtcctgggaaaccacttaatgtttttagaatagaacctggtgtgtccgtttctctggtgaatccccagccatccaatggccacttctcaaccaaaattgaaatcaagcaaggagataactgtgattccataatcaggcgtttaatgaaaatgaatcgaggaattaaagacctttccaaagtgaaactgatgagatttgatgatccactgttggggcctcgacgagttcctgtcctgggaaaggagtacaccgagaagacccccatttctgagcatgctgttttcaatgtggacctcatgagcaagaaaattcatctgactgagaatgggataagggtggatattggcgatacaataatctatctggttcattaaactcatgcacattggagatttatcctggtttcttaggaatactactactctgattgtgtctactgattggctatcagaaccttaggctggacctaaatagattgatttcatttctaaccatccaattctgcatgtattcataattctatcaagtcatctttgattcctggacctaataaattttttttccctttctttgggtgtccaagagaaatggtttttgccaaactctttttaaaaaacaaattgttgctatttcctagaagtttctggtttttaagatgaacataaaagtgtcagtatgcttcttttatgaggtgtactttatactttgatgaaggctaaggtgtacctaacagctttttatagtatattcatttatggagttagctgtattttttttaaaaaagaaaagtagtaaattagcagcttttttttttaaatgaagagaacttcttgatgatttaaaagaactaatgagaatattttgacttgacttcaattactaagtattttgtataaagaacaaataggtcctgcattttataagactttttaaagctttaattattcaactaagaaccaataatggcttcttcaaggctaatatcaatagtttataagcagtatatttcacctacactaaatatgggcattttaaaagaagattccccccttcccccccagaaatctgcatttactaaatttgtcttaagtccaattgtgtttaaaggtcatgctggtcgggtgtggtggctcacacctataatcccagcactttgggaggccaaggtgggcagtcacctgaggtcaggagtttgagaccagcctgaccaacatggtgaaaccccgtctctactaaaaatacaaaaattagcttggcatggtggcgggtacctgtaatcccagctgcttgggagtgtgaggcaggagaatcgcttgaacctgggagaccgaggttgcagtgagctgaaaccgtgccattgcactccagcttaggcaacaagagtgaaactctgtctcaatcaatccatcaatcaatcaataaaatagaggtcatgctgactattaaaaaaaaaaaaaa

SEQ ID NO: 64877 - DNA, 4305 bp, Homo sapiens
cgagcaagtggaatgtgtacaagagggagttaccatggaaacagcatattctcctggtaaccagaatggagttttggacttttttttccagaagccatctggatttctcaccttattggatgaagaaagtcaaatgatttggtcagtggaatcaaattttccaaaaaaactacaaagtctcctagaatcctcaaacacaaatgcggtgtactcccccatgaaggatgggaatgggaatgttgccctcaaagaccacggtacagccttcaccatcatgcactacgcaggaagggtaatgtatgatgttgttggggcgattgaaaaaaataaagactccctttcacagaatcttctatttgtaatgaaaactagtgaaaatgtcgtgatcaatcatttgttccagtcgaaattgtcacaaacaggatccctcgtatctgcctatccttcctttaaattccgaggacataagtctgccctgctcagtaagaaaatgacagcttcttcaattattggagaaaacaagaattatctagaacttagtaagttattaaaaaagaaaggaacttctacatttcttcaaagattggaacgaggagatccagtcaccatagcatcacaactcaggaaatcactaatggatattattggaaaacttcagaagtgcactccacacttcattcattgcatcaggcccaataactcaaagctgccagatacttttgataatttttacgtgtctgctcagctacaatatattggggtcctggagatggtgaagatcttccgatatggataccctgttcgcctttccttctcggatttcctgtcaaggtataagccactggctgatacattcctgcgtgagaagaaggaacagtcagctgccgagcgatgtcgacttgttctccagcagtgtaaattacaaggctggcagatgggagtccgaaaagtgtttctaaaatactggcatgctgaccaactcaatgatttgtgcctacagttgcagagaaaaattataacctgccaaaaagttatcagaggatttttagcacgccagcacctgcttcagagaataagcatcagacaacaagaggtgacttctatcaatagctttctgcagaacacagaggacatggggctgaaaacctacgatgccctggtcattcagaatgcttcagacattgcccgggaaaatgaccggctccgtagtgaaatgaacgctccctaccataaagagaagttagaggtcaggaacatgcaagaggaaggaagcaaaagaaccgatgacaagagtggacccaggcatttccaccccagctccatgtcagtctgcgcggccgtggatggcctgggccagtgcctcgttggcccgtccatctggtctccttcgctgcactcggtgttcagcatggatgacagcagcagcctcccgtctccacggaaacagcccccgcccaagccaaagagggaccccaacacccggctgagtgcttcctatgaggctgtgagcgcctgcctctccgcggccagggaagcggccaacgaagctctggcccggcccagaccgcacagcgacgactacagcaccatgaagaagattcctcctcgaaagcccaagcgcagccccaacaccaagctcagcggctcctacgaggagatatcggggtcccggcccggggacgcgaggcccgcgggcgccccgggggcagcagcgcgcgttctgacccccgggactccgcagtgcgcgctgcccccggcggcgcctccgggtgacgaggacgacagcgagcctgtgtacatcgagatgctggggcacgcggccaggcccgatagcccggaccccggggagtccgtgtacgaggagatgaagtgttgcctgcccgacgacggcggcccgggcgcgggctccttcctgctccacggcgcatcgccgcccctgctccaccgcgcgccggaggacgaggcggcggggcccccaggggacgcgtgcgacatcccgccgcccttccccaacctgctgccgcaccggccgcccctgctggtgttccccccgacccccgtcacctgctcccccgcctccgacgagtcgcccctgacacccctggaggtgaagaagctgccagtcctggagaccaacctcaagtaccccgtgcagccggaggggtcgagcccgctgtccccgcagtactccaagagccagaagggcgacggcgacaggcccgcgtcccccggcctggcgctgttcaacgggtccggccgagcctccccgccgtccacgccgcccccgcccccgcccccgcccgggccgccccccgcgccctacaggccctgcgcgcacttggccttcccgccggagcccgccccggtgaacgcggggaaagcggggccgagcgcagaggcgcccaaggtccacccaaagccaaactctgcccccgtggccgggccctgcagctccttccccaagatcccatattcccccgtgaaggccaccagggcggacgccaggaaggccggctccagtgcctcgccccccgcgccctacagccctcccagctccaggcctctcagcagccccctggacgagctcgccagcctcttcaactcggggaggagtgtgcttcggaaatccgcggcgggaagaaaaatcagggaagccgaaggttttgaaactaacatgaacataagtagccgagatgaccctagtacgtcagaaattacttccgagactcaagacagaaatgcaaataaccatggaattcagttatctaattcactatctagtgctataactgctgaaaatggaaattccatctcaaatggtttacctgaagaagatggatactcacggttgtctataagtggcacagggacttcgacatttcaaagacacagggacagtcacaccactcaggtaatccatcagctgaggctctcagagaatgaaagtgtggccctgcaggaactcttggactggaggagaaagctctgtgaggaaggacaagactggcagcagatcctgcaccacgctgagcccagggtgcctcccccaccaccttgcaagaagcccagccttctgaagaagccggaaggggcctcctgcaacaggctgccgtctgagctctgggacaccaccatttgatgtggcctgaactgcagacttacaaaatagaactgcctactgattccgggctgcaacaacagaaggctgccttctgacatgcgctggggcttctctccacgcatttagacaaaaaaagcacaggacacagacactaaatatatgagatcccgtgtgtgtgtgtgtgtgtttgtgtgtgtgtgtgtgggttctttcttatccatctcggggggatacactctgattttcaagctcctcatttacggctctgtgctacccctaggtagcaagagagaggctgggaaaagtgtggacgtggccagagcgagagagtagcggaggaaaggagcaatccatgcacactctgtacagttgtttttctacggttcaacagtctgtttattgtacttccaatggttttattataatacagtatacgggacatatattttatttctttgtagctacttgtgttttattggtattataaacctgataattatttacatgtttattactgtaattttataaatttatgcaattggtggtgcttcctttcttcaaaatacagattttaaaaaatcatttctagattatytctcytcctccacagtcctttttttttcacctaacgcacctaaatcttgaaactacattgttgttttagcttcgccagtgtcaccccttgcaaaactatgaattgagccccatgttttaggtgttactcatggatgaggaggctgttctttcctatgccctgtatttctggataagtggattgtgcmacccyttagttaaatttcacctcccgacttcmagcatagatcacaggamatcacatggcacacggttaaacacgtatggcttcaaatccatagccggtggtgtaaaatgatcatattcattcaaaggcctacacagtacaaatgagcacgctgccatgtactggtttgagcagtaggggctgcatcgcacagcgcctcgtcccccgggacttacactgcatgattccctcgctgtatatcctcaaccctcccataatgcaaggccttgttcattgatgtgctttcgtcggctgtcggaaagttctgagcagtggctccagaccaccttgtcttgctacttggaactttttattcataccagcctttgaaaagttactgtgccaataaagaggtacaactgtg

SEQ ID NO: 64878 - DNA, 2436 bp, Homo sapiens
cgaacctcagtcaaggtgaagttctcggagctgtccgaggagctgctctgggaatacgtccacagtgtggagcccatggacaaagctggcggctacgggatccaggccctgggcggcatgctggtggagtccgtacacggggactttctgaacgtggtgggattcccgctgaaccacttctgcaagcagctggtgaagctctactacccgccccgtccggaggacctgcggcggagtgtcaagcacgactccatcccggccgcggacaccttcgaagacctcagtgacgtggaggggggtggctcggagcccactcagagggacgcgggcagccgcgatgagaaggccgaggcgggagaggcgggacaggccacggcagaggctgagtgtcacaggactcgggagaccctgcctccgttcccgacacgcctcctggagctgattgagggctttatgctatccaagggcctgctcaccgcttgcaaactgaaggtgttcgatttgttaaaagatgaagcaccccagaaggctgcggatattgccagcaaagtggacgcctctgcgtgtggaatggagaggcttctggacatctgtgctgccatggggctcctggagaagacagagcaaggttacagtaacacagagacagcgaacgtctacctggcatcggatggcgaatactctctgcacggcttcatcatgcacaataatgacctcacatggaacctctttacatacctggagtttgccatccgagagggaacaaaccagcaccacagggcgttggggaagaaggcggaagatctgttccaggatgcgtactaccagagcccggagacgcggctgaggttcatgcgggccatgcacggcatgacgaagctgactgcgtgccaggtggccacggccttcaatctgtcccgcttctcctccgcctgcgacgtgggaggctgcaccggtgcactggcccgagagctggcccgtgagtaccctcgtatgcaggtgactgtgtttgacctcccagacattatcgagctggccgcccacttccaaccccccggaccgcaggcagtgcagatccacttcgcagcaggtgactttttcagggaccccctccccagcgctgagctgtacgtcctgtgccggatcctgcatgactggccagacgacaaagtccacaagttactcagcagggtcgccgagagcgttctgagctcctgttgcctgctgtgtcccctgtgtcctgctgaaggatccccgcctggctggccaggactccagctctctgctgtctccctcaggggccggcctgctgctggtggagacgctcctcctagcaggcagacggctgctgtgacggtgccgtctaccaggcagggtctcagtccttctccgcactccagcctgcatcttcccatcttctgcacgatttccagtgtgtttcctccatgggacgccatcgctgccgctcacccctggatgcccacaggctatggagtggcagttctctgggcggcttccatctctcctgccttggtgcagagactgtcacgagcgggacctccccagcccctgctgcggggctgaaatgcgtctgtaaacaccccccaccccgagcccaggcaggccagactcacacccaccccgtgaggccctcctgggcacatgctcactgcggttgtagggagctcagcgcatccacgtttcccccgtgctccgctcccagctgctgttcccggcctgtgtcccgaccctcagacctcagttcaccctctggtgcccacacagccccctttcctccctggcccctccaccagggaatggctgggccaacctggggctgggctggggtggagccctttaactcacagccttgaccttaggaggcactgaggttcaggaggcatctgcaaagcgagaaccggagcaggcctaggtgctgttttcacggcgcgtgcacccagcttacctgttcctgggctgggcgtcagtctcctatatttcagctgttttcctttttctgagacagactctggagtttagctcttcttacccagactggagtacaataatgcaatctcggctcactgcaacctccgcctcctgggcagtctatttcaaggtgcaaactccgcctcctgggcggcctatttcaaggtggaagccccaccttctaggcctatttcaaggtgcaagccccgcctcccgggcggcctattacaaggtgcaagctccgcctcccaggcggcctgtttcaaggtgcaaccccacctcccgggcggcctatttcaaggggcaagccctgcctcctgggcggcctatatcaaggtgcgagctctgcctcccaggcagcctatttcaaggtgcaaccccgcctcctgggcggcctatttcaaggggcaagccccgcctcctgggtggcctatttcaaggggcaag

SEQ ID NO: 64879 - DNA, 1129 bp, Homo sapiens
ttttcaagcacgattcctttatttcgagccagaaagcagccagtaaacaagtgctgccacccacaacaccctgggctacctgcggtcccgcgcctggccctgcagcctcggaagggagctgtgggggtcacccagggcccacttcgtgcccccaccctgcccccaccctgccctgctcactcccagccgctgctccccttcctaaagagcagtccctgcttgagagctctgaggagcaacttgtttctaatccacaggatcctgcactaagagccccccccacagctatcgtggggcaccccaacgtattccacccctctgccccaggcacccaaggggcatgggcacggccagaaggcctgtcaggagggccagcagcacccccgaggcttgtccccaaggttgggcggtttggggctggcgggcacgttctccaggacctcacgcagggagaatgtacaaaaggaaatctcatcataggaggtcctggccccgctctcgtacaggcaggcaaaaaccaggcccccctcaggggccggcccgatggacgccaggtcggagtagccgctggggccctcgtagatcacccagggctctgtccagctgcgcgggtccagcggggactggctcaggcggatacccatgtgtagccgagccctgcgccccactgggtgggagtacagcagccacgtggggctctggggcggggcagcaaagggcatggggagtgccagggtccaggaccccacatccccactgaccccaggcctggggccaggctgcctggggccatccccccgaggctgcagacggctgaagggcccaccaggcacctggcctccacgggggtctacagcagcctcctctgggggttcgtggactccaggaccgaggagtggaggctggaggggactcccggggcccactgaccaactgtcatcccgtggcctgttgggggcgggggctgggaagcccacgatgctgccctggcagccccaggcagtctcgggcagggaagccacgcgctctgcgggcaggaaggaggtgccctcgtcagtgctgagcgcctgcacacggctgcccagtgggctccgggcattgcagtagaggaagcgggaattgcacctct

SEQ ID NO: 64880 - DNA, 2414 bp, Homo sapiens
agcgtacgcccacgcgtccgcaagggaacaactctgagaatgatgaggaaggagtggatgaagatgtggaggaagatgaatatttagaagaagatgcagaagaagatgaagaggtggatgaagatggagaggaggaggaggaagaggaggaggaggaagatgaggaggaggatgaggaagaacaagaatatgaacaggatgagagagaccagaaagaggagggaaatgattatgacactcgaagtgaggccagtgactctggttctgaatctgtttccttcacagatgggtctgtcagatctggttcaggcacagatggatcagatgagaaaaagaaggaaaggaagagagctagaggcatatctccaattgtttttgatagaagtggaagctctgcatcagagtcatatgcaggttcagaaaagaagcatgagaaattatcatcttccgttcgtgctgtccgaaaagatcaaaccagtaaactcaaatatgtgcttcaagatgcaagatttttcctcataaagagtaacaaccatgagaatgtgtctcttgccaaagcgaagggtgtatggtccacgctccctgtaaatgagaagaaattaaatcttgcatttagatctgcaaggagtgttatcttaatattttctgtcagagagagtggaaaatttcaagggtttgcaagactttcttcagaatcacatcacggaggatctcctatacactgggtgcttccagcaggaatgagtgctaaaatgctgggaggtgtctttaaaattgactggatttgcaggcgtgaattacccttcactaagtcggctcatctcaccaatccttggaatgaacataaaccagtaaagatcggacgtgatggacaggaaattgaacttgaatgtggaacccagctttgtcttctgtttccccccgatgaaagtattgacttgtatcaggtcattcataaaatgcgtcacaagagaagaatgcattctcagccccgatcacgaggacgtccatcccgtcgagaaccagtccgggatgtgggaaggcgtcgaccagaagattatgatattcataacagcagaaagaaaccaaggattgactatccccctgagtttcaccagagaccagggtatttaaaggatccacgataccaggaagtggacagacgattttcaggagttcgccgagatgtgtttttaaatgggtcctacaatgattatgtgagggaatttcataacatgggaccaccaccaccttggcaaggaatgcccccttacccaggaatggaacaacctccacaccatccttactatcagcaccatgctccacctcctcaagctcatcccccttactcaggacatcatccagtaccacatgaagcaagatacagagataaacgagtacatgattatgatatgagggtggatgatttccttcgtcgcacacaagctgttgtcagtggccggagaagtagaccccgtgaaagagaccgggaacgagagcgagaccgccctagagataacagacgagacagagagcgagatagaggacgtgatagagaaagagaaagagagcgattatgtgatcgagacagagaccgaggggagagaggtcgatatagaagataatgggcttttggaagcactgattgtttaaagatacaaaaaatcttgtattttttttttgggggggtttacaagtagtaaatttattttcagctgtctgcctatgaagttcattgtgtagaaggatttattatgaccccctttgttccaagcatgcagtatcataagaactggaaaaactcaaatccgccaaaaatccacagctgacagttgaattgacacttttattggggcagaatggaacagtccaagaatgtagatactgattctttctccataaatgttcttatagtgtgttcatcctagagttatttttttgtttgtttttttcctttttggatcttgattgataactgccatgatattttgctttgatgtgtttctacatgtagttgcacacggttcagtaaaaataatgctgctatcgagtatgcaaatattgaagtatgatggtttgactgtatggcagtgttgtagcagcctcttgtttttttccccattgcctctttttttaaaaaacttataaagtcactttttatttttcctcagtcttcaatgacgagagcaatattaagaagacattgctatctaatttttaatctttttaaatgaaaaattcctatgttcagtagcgtggttgatgctattgtttagccttcccctccaaattgtatacattggcttggaatgttcacaacttgcgtgcgtggcagcggaagacgattcccatattctacattgctactgttttgtataaaataaattggtaaagattgacggttaaaaaaaaaa

SEQ ID NO: 64881 - DNA, 421 bp, Homo sapiens
ggccgatgactgtacccccctgaaaaccatcaccaaattttataaccaccccttgcactttgttttcaatgacaccaagttggacgctatgctggaagaatttaagaaaggtaaatctcacctggctatcgtgcagcgggtaaacaatgagggagaaggggatccattttatgaagttctgggaatcgtcaccttagaagatgtgattgaagaaatcatcaaatctgagattcttgatgaaacagatttatacactgacaacagaacgaaaaagaaagtggctcaccgggaacgaaagcaagatttttctgcctttaagcagacagacagtgagatgaaggttaaaatatcaccacagctcctcctgggccatgcaccgtttcctaggcaacagaagtagaagcatttagcccatcccaga

SEQ ID NO: 64882 - DNA, 1139 bp, Homo sapiens
actcttacgtcaagctaaggacgcggcacgcagcgctttattgatgatgtcgtttctgctgtcctgttgtccagctatggccagtcagcagcgatgcccggctttgcaggagccatgtcactagccggggcccaaggcagcctgtggtctgtggaaggaggcaataagctggtttgttccggtttgctgaagctcaccaaggccaatgtgatccatgccacagtgacctctgtgaccctgcacagcacagaggggaaagccctgtaccaggtggcgtatgagaatgaggtaggcaacagctctgacttctatgacatcgtggtcatcgccacccccctgcacctggacaacagcagcagcaacttaacctttgcaggcttccacccgcccattgatgacgtgcagggctctttccagcccaccgtcgtctccttggtccacggctacctcaactcgtcctacttcggtttcccagaccctaagcttttcccctttgccaacatccttaccacagatttccccagcttcttctgcactctggacaacatctgccctgtcaacatctctgccagcttccggcgaaagcagccccaggaggcagctgtttggcgagtccagtcccccaagcccctctttcggacccagctaaagaccctgttccgttcctattactcagtgcagacagctgagtggcaggcccatcccctctatggctcccgccccacgctcccgaggtttgcactccatgaccagctcttctacctcaatgccctggagtgggcggccagctccgtggaggtgatggccgtggctgccaagaatgtggccttgctggcttacaaccgctggtaccaggacctagacaagattgatcaaaaagatttgatgcacaaggtcaagactgaactgtgagggctctagggagagcctgggaactttcatcccccactgaagatggatcatcccacagcagcccaggactgaataagccatgctcgcccaccaggcttctttctgacccctcatgtatcaagcatctccaggtgacctactgtctgcctatattaagggtccacacggcggctgctgcttttttttaagggggaaagtaagaaaagagaaggaaatccaagccagta

SEQ ID NO: 64883 - DNA, 1786 bp, Homo sapiens
ttttttttttttgaaaatgaacaaaataaagctttatttgaactccctcccctacagatcattcagatgcccgggaccatgtccaggttcctctcagcaacatggaaagctaagccatttcacaaacgcacaactgtagctacactacagccccccatgcccagggcacagctttgttgctaagcctgtaacaaaagaccaccactcagtatttgtgtaccctgcagccaacaccacctcctgggcttcacaggttcactcacccaagaggccagcacaaccacgaccgagtgggtactcagtggcccagacaccccccgaacactggcactgccacaaggccctgaagggtagactgtggggcaaagaggacaaactctccctcccctaagggacccggctcactgggcctccttcccctgccaaccgccagcccctgcatgcctagcagggaggtaagcacccactggcgtcgtgatttccattatcttgctaatgttgacagcacctaagtcacattaaaacaaagagagactggatccagacctccaagtctcatcattggacctcagtggttctcactgccccaaccacagagtgaaggtcaggcagcgtttgccaggatttggctctgaccaagttagtgctctaacaagtcacctgagtttctaatagcttccctgaagaacccaactatttggagtatgttgcctctcctatcaagaggcatctgggggcacaaaaatctttctggatcacagcttgaagaaacagaacataactggagtagcttcagaactaaggcggccacattcaccccaccgcttaggagttagctccattatacacaaccaagcacaggagaaacactcaccaggaaaagatgccggaggcttggaagttctcaagggaactgtttagacagaggtacaaacatctccaattcagacttccaaatacactaacaataattaaaaatgtggcctctgatcctcatgtttcctcaccagtagaggcaaaaaaggagattttcataactacatgttaaaaagaacatgttcaagtaaatccacacactacatgtgagtgttgcatgctgttcttccacaatataaaagtataaaaataagatttctgacctttgtatctagacagatctggagaaaacacggttgctactagctaactagctctgtgttatctgagcaggcgcgctatcccagggcctcaccttcctgtgctggctcaagagggcagaggaatggagatggcaatgccttttcattccaggaaaccaaactcagatggcagaaccagccctagccatgtcgcatagcctctccatgggtgacactcctgggacctccaatggatgggagaaagggctctcagcccagcttcacgtgagggcggtgtgggtcatgtgtggggtgggggctgcttctgggacgtaggaagacgccaacctcaggggtaccttctgggaaggacaagccagggcttgggtgcccgcccatcccaagagccccacaaggtgccagctcacttagcagcagcctgcttgtccttgcacttctggtagacactcaggatctctgcgatgatgctggggtcctccaaggtggtagtgtctcccagctcctgggcctcactagtgatgatcttcctcaggagccgccgcatgaccttcccagacctggtttttggaagacgtttcaccaccaggatctcatcaggcacagcatatttggcgatcttggtggccaccatggacttgagctgcacc

SEQ ID NO: 64884 - DNA, 641 bp, Homo sapiens
attacgccaagcttggcacgaggctactgccctcactggacttggggggtctggacctttggcccctgccccctgggggacccagacctctgggccctcacttctggcccttacagagatccaggcatccaacacccccatccctgcccaagcgtctgaggtgttagtggtggggggagaagcccaccatcccagactctggtaaatgtctttgctggttccttgcagctggcagtgggggggaccccagcccaggcccaggcctaggcctggggtggggatagggtcagatgaagaattcctctttcctcttgtgtccgtcgctgccattgaggaaggcttctcttgcttctccctgttcatccaagccactggcttcgtgggtcagataggaacccttctgccgtaccgagcaccagaccatgcccactagcacacatatgatcagaaacaccagcagcgccaggatgccgcccacaatggcatagggaaccgacgtctgagcctctaccaccgcaccagggtcgtagaccacaagtacgtagagcgccctcgcatggccgtgcttattggacgcctcgcaagtgtaggtgccgttatccgcggataccagacccgggagcgtgagccgctctcccacg

SEQ ID NO: 64885 - DNA, 485 bp, Homo sapiens
gaagcatcatcacgccaagcttggcacgaggcgactgtgagcagagccccacatcctcgcgcacgtcttccctgggctctggcggccccgactgcgccatcacagtcaagagccctgggagggagccggggcgtgaccacctcaacggggtggccatgaatgtgcgcactgggagcgcccaggccgatggctccgactctgagaaaccgtgaggcaagcccgtcaccccacacaggctgcggcatcaccctcagaccttggagcccaaggggccactgcccttgaagtggagtgggcccagagtgtggcggtccccatggtggcagccccccgactgatcatccagacacaaaggtcttggttctcccaggagctcagggcctgtcagacctggtgacaagtgccaaaggccacaggcatgagggaggcgtggaccactgggccagcaccgctgagtcctaagactgcagtcaaagccagaactg

SEQ ID NO: 64886 - DNA, 1281 bp, Homo sapiens
tggaaagacctttagccgtggttatcatcttattctccatcacagaattcatactggtgaaaaaccttacgaatgtaaggaatgctggaaagcctttagtcgctactcacaacttatttcacatcagagtattcatattggtgttaagccctatgactgtaaggaatgcgggaaggccttcagactactttcacaactcacacagcatcagagtattcatattggtgagaaaccttataaatgtaaggaatgtggcaaggcctttagattgcgccaaaaacttactctacatcagagcattcatactggcgaaaaaccctttgagtgtaaggaatgtaggaaggcctttagacttaattcatcccttattcaacatctgagaattcattctggtgagaaaccctatgaatgtaaggaatgtaagaaggcctttaggcaacattcacaccttactcatcatctgaaaattcataatgtaaaaatctaagaaagtcttttcaacttctgtgttatagaacattctatgaatgtagtaattaatctattttgctccatacatgcaactgcgttggcattagaggttttataccattaaaagagtgtgacaatgtattgtagtccatcatcactcaaacctgaaacttcagcatatttgttctaaaaactaatcctgttataagaatgagaaagacatttaccgtcatccctatcccatcactttgtgtcatactggacaagacgcttaactgctctgtgctataattttttaatttatgacatggtcatataagagtgcagcagtttgacacactttcaatcaagaggtggaaccctacatccctctgttgtatacaggaatctacatccctctgtgaactcttggccccagtagaatatggtagacgtaactgctgtgctggtttcttgactcagactttactggtagggttacttcacctcatggaaatgacagaactgtcttggttacaaagtctggctactttgctgaagagaccacatgaagaggccctgaaaactacgtagagagggagaggcacctgctgaaccctgtcttcttgacatccaccaagataccagacatttgagtgaaattttggatccaccagaccagccaccagctaaatgccagtgagcgacttggtaacctgaactgatgccatgtagaatggaagaattgaccagctgagcccctggcccaaatttctgacccacaaaaacatgagatataataaaatggttgttgttttaagccactaaaaa

SEQ ID NO: 64887 - DNA, 1638 bp, Homo sapiens
cgctgggagggtacccgcttctcggaggtgcaggccctgccctcccggggctcgctggccctgcagcccttccttgtgggtggccgccgctacctggcactgggcagtgatttctccttcacccagatctaccagtgggatgagggacgacagaagtttgtacggttccaggagctggctgtgcaggctcctcgggccttctgctacatgcctgctggggacgcccagctactcctggcccccagcttcaagggacagacgctggtgtatagacacattgtggtggatctcagtgcctagggggtgccgaggcctctggtctcctcagggtggccactggaggatgggtgggggcctctgtgagcaccacgtatgcctgtgtgaagacaagcgaccaacctgcattcatgcccttgtatccgcacacgcccagtgtgtacaggcgcaccccgtggactggcccaggaggacgtgcatcatcactgcaatcagcatgaacaccaggcacccctgggacacctaacgcccagttcccgtgaccccaactgcaggccccccctactctgcagcctttcccatgctctgccccctgtctcatgcacgagtggtgcggggtgctgggagcgaggggggccgcatcctcctgtccttgtgcttctccttctgcccctctggtctttcctgttggtgctccaggcattgtttacctgctcttgctccccgctgtagcccacagccatatctgtcatgcttccccggggccactcacccctgccccaccccgtctgcatgctcacatggacgcggacggacacactcattacacactcacacgccccgactgcacccggtgtccatctataaacatgtcagggcacgtgtgcatacaagcagattcagcactgcctaccaggctctcctgttaccttgcctctctgcttggagggggccccctctgctcacccccagcgtgccccccccggaactgataaggatgagaatggtggtgccagcttctgagggcctgcttggcctcctgggggcaaagcccctctgcccgaagcaataacaacagcagcagaagcaatcccggggagctgccaggggtgtctgtctctgttctccttggcgtttccttcatggccgtgaatcccagctcacccatggacagaagacctcccctcatctgaaagcctttctgccttccttcctgtagctgtcgctttctcaggcttggactgtcccctggttcaccctgtctttgggatgtggcccttgagctgggcgggctccttgggtggattagagagctggccgagctgcaagcacctgagttacctgcgagggtgcccagagtggagcttggcctgagggcgtgttgcagccctggccccaccagtccacagaggcccccaggagcactgcctttcagtggaccgggtgggggctggtgggaggggccccactagctgagcttctgctgccctctgctgtctgctgagatgccaggctagtggagagggcacaccatgtgcccaaatggtgtgatgctccttgtagcaggataccagggtactggggggcaatgctatgattaacttgcttcaaataaaaagttcccgccccataaaaaaaaaa

SEQ ID NO: 64888 - DNA, 3042 bp, Homo sapiens
catcaaatgaattgtcacaatactcgaataatgcaagacacagaaaaggatgataacaataatgacgaatatgacaattacgatgaactggtggccaagtcattgttaaacctcggcaaaatcgctgaggatgcagcctaccgggccaggactgagtcagaaatgaacagcaatacctccaatagtctggaagacgatagtgacaaaaacgaaaacctgggtcggaaaagtgagttgagtttagacttagacagtgatgttgttagagaaacagtggactcccttaaactattagcccaaggacacggtgttgtgctctcagaaaacatgaatgacagaaattatgcagacagcatgtcgcagcaagacagtagaaatatgaattacgtcatgttggggaagcccatgaacaacggactcatggaaaagatggtggaggagagcgatgaggaggtgtgtctgagcagtctggagtgtttgaggaatcagtgcttcgacctggccaggaagctcagtgagaccaacccgcaggagaggaatccgcagcagaacatgaacatccgtcagcatgtccggccagaagaggacttcccaggaaggacgccggacagaaactactcggacatgctgaacctcatgcggctggaggagcagttgagcccccggtcgagagtgtttgccagctgtgcgaaggaggatgggtgtcatgagcgggacgacgataccacctctgtgaactcggacaggtctgaagaggtgttcgacatgaccaaggggaacctgaccctgctggagaaagccatcgctttggaaacggaaagagcaaaggccatgagggagaagatggccatggaagctgggaggagggacaatatgaggtcatatgaggaccagtctccgagacaactttccggggaggacagaaagcctaaatccagtgacagccatgtcaaaaagccatactatgatccctcaagaacagaaaagaaagagagcaagtgtccaacccccgggtgtgatggaaccggccacgtaactgggctgtacccacatcaccgcagcctgtccggatgcccgcacaaagatagggtccctccagaaatccttgccatgcatgaaagtgtcctcaagtgccccactccgggctgcacggggcgcgggcatgtcaacagcaacaggaactcccaccgaagcctctccggatgcccgatcgctgcagcagagaaactggccaaggcacaggaaaagcaccagagctgcgacgtgtccaagtccagccaggcctcggaccgcgtgctcaggccaatgtgctttgtgaagcagctggagattcctcagtatggctacagaaacaatgtccccacaactacgccgcgttccaacctggccaaggagctcgagaaatattccaagacctcgtttgaatacaacagttacgacaaccatacttatggcaagcgagccatagctcccaaggtgcaaaccagggatatatcccccaaaggatatgatgatgcgaagcggtactgcaaggaccccagccccagcagcagcagcaccagcagctacgcgcccagcagcagcagcaacctgagctgcggcgggggcagcagcgccagcagcacgtgcagcaagagcagcttcgactacacgcacgacatggaggcggcccacatggcggccaccgccatcctcaacctgtccacgcgctgccgcgagatgccgcagaacctgagcaccaagccgcaggacctgtgcgccacgcggaaccctgacatggaggtggatgagaacgggaccctggacctcagcatgaacaagcagaggccgcgggacagctgctgccccatcctgacccctctggagcccatgtccccccagcaacaggcagtgatgaacaaccggtgtttccagctgggcgagggcgactgctgggacttgcccgtagactacaccaaaatgaaaccccggaggatagacgaggacgagtccaaagacattactccagaagacttggacccattccaggaggctctagaagaaagacggtatcccggggaggtgaccatcccaagtcccaaacccaagtaccctcagtgcaaggagagcaaaaaggacttaataactctgtctggctgccccctggcggacaaaagcattcgaagtatgctggccaccagctcccaagaactcaagtgccccacgcctggctgtgatggttctggacatatcaccggcaattatgcttctcatcggagcctttcaggttgcccaagagcaaagaaaagtggtatcaggatagcacagagcaaagaagataaagaagatcaagaacccatcaggtgtccggtccccgggtgcgacggccagggccacatcactgggaagtacgcgtcccatcgcagcgcctccgggtgccccttggcggccaagaggcagaaagacgggtacctgaatggctcccagttctcctggaagtcggtcaagacggaaggcatgtcctgccccacgccagggtgcgacggctcaggccacgtcagcggcagcttcctcacacaccgcagcttgtcaggatgcccgagagccacgtcagcgatgaagaaggcaaagctttctggagagcagatgctgaccatcaaacagcgggccagcaacggtatagaaaatgatgaagaaatcaaacagttagatgaagaaatcaaggagctaaatgaatccaattcccagatggaagccgatatgattaaactcagaactcagattaccacgatggagagcaacctgaagaccatcgaagaggagaacaaagtgattgagcagcagaacgagtctctcctccacgagctggcgaacctgagccagtctctgatccacagcctggctaacatccagctgccgcacatggatccaatcaatgaacaaaattttgatgcttacgtgactactttgacggaaatgtatacaaatcaagatcgttatcagagtccagaaaataaagccctactggaaaatataaagcaggctgtgagaggaattcaggtc

SEQ ID NO: 64889 - DNA, 2048 bp, Homo sapiens
ctacgatcattccgccaagcttggcacgaggccgtaggcgctcccgggcgctggcggcggcggaggagagggagcagcgtcacgggcgcccggcccgttaaaacgctgctggctggagccacctccctccctgcagcccgcaacgggaatggagtaaagggagacccgtcgacctggccacggggatcagcgatggaattaaagcaatctttgtccacccatctggaagccgagaagcctctgaggcgctatggggcggtggaggagacggcttggaaaacggagagactggggagaaatcagctggacatcatctccatggcggagacaaccatgatgccagaggagattgagctggagatggcaaaaattcagcgtctccgggaagtcttggtccgccgggagtctgagctcaggttcatgatggatgacatccagctctgcaaggacatcatggacttgaagcaggagctgcagaacttggtcgccatcccagaaaaagaaaaaaccaaactgcagaagcagagagaggatgagctaatccagaagatccacaaactggtgcagaagagagacttcctggtggacgatgcggaggtcgagcggttaagggagcaagaagaagacaaggaaatggctgatttcctgagaatcaagttaaaacctctagacaaagtaaccaaatctccagccagctcccgggcagagaagaaagcagagcccccacctagcaagcccacggtggccaagacggggctggcactgatcaaggattgttgcggggccacccagtgcaacatcatgtagcccccacgtggggtgccctgggccatggggacccccccccaccctcttgtctttatagcccccatttcaccggggcccaagagctctccaaggcagaaggggttgaaggcaagcccgtgactgtcaccagaggccatgggcacggcaggcgggcctggccaccctgtacagagtgtagcagtagggagtctctcaccgtcgcatggtcctccccagagcatgccgaacccaggagtctgtctcactgtttatccaaacaccaggaaaggtcctccctcaaaaaagcatatctccacttctctctagctgtatctaacccaccgtgtgaatgaactgggagaggggcatgctccccagctgtgtgtagtcgtgacttctcaacaatctagcaccatgtcggacacgttccccatccaccctcctagctctgctctcagagctaggcacatgggcacaggtcccctcccgtctgtcctctcccagcaactgtgccctggagggctccacatggcccccgtgtctctcgggcaccacccatatagcagtcccagagggcccatctgtaaagatcgagcttgtgtgtggtgtcgtggtcacatctcccgcttccccccatcctgtgtctgggcacagttcacatcaggacagcgtccattgtgctctcagtctgcctcaggtgtgtgcctggagggggcctggactggcatggatccagtgtgcagaagagccagcagggaaccggaagctctgatgtcaaggccagagcagttgagaatgggacccagagtagatgctgacctgggcactccaccattccggggccaccacagagatgccagcaggatgccactttgccagcccgacacacggacctttgtaaagaacagcaacaggcaggagaggcagcgtgtgaccagattgtgtcccgtcattgggtggcatatgttaactagctgccaaacaacttcaacccgtgtaattcatgtacatttgcaacagccagcccggtacagcctgtgtgacttctctgtatgtgtgtgtgtgtcgtgaccagcctaagtagttagcataactcaagatgctgatgtgcagtcacccatcagagaaaataaaaatggaaaccacgttcacagcattttaaaagtttttactttttttcttgattatggaagtaatccatgtacatagtaaatcattttaaaagtacaaaaagtatgaagaagtttgtcttaaaaaaaaaa

SEQ ID NO: 64890 - DNA, 1465 bp, Homo sapiens
ggatagagcgcattgaagacaccagacctgctggatgtgcagagcagctagttcacaataacctcccaaccaccagtgtcatcatgtgctttgtggatgaagtgtggtccactctcctgagatctgttcacagtgtcatcaatcgctctcctccacacctcatcaaggagattctgctggtagatgacttcagcaccaaagactatctaaaagataatttggataaatacatgtcccagtttccaaaagttcggattcttcgcctcaaagagagacatggcttaataagggccaggctggcaggagcacagaatgcaacaggtgatgtgttgacatttttagattctcatgtggaatgtaacgttggttggttggaacctcttctggaaagagtttatttaagtagaaagaaagtggcctgtccagtaatcgaagtcatcaatgataaggatatgagttacatgacagtggataactttcaaagaggcatctttgtgtggcccatgaactttggttggagaacaattcctccagatgtcattgcaaaaaacagaattaaagaaactgatacaataaggtgccctgtcatggctggtggattgttttctattgacaaaagttacttttttgaacttggaacatacgaccctggccttgatgtttggggtggggaaaatatggagctctcattcaaggtgtggatgtgtggtggtgaaattgagatcattccctgctcccgagtgggccatatattcagaaatgacaatccatattccttccccaaagaccggatgaagacagtggagcggaacttggtgcgggttgccgaggtctggctggatgagtataaggagctgttctatggccatggagaccacctcatcgaccaagggctagatgttggcaacctcacccagcaaagggagctgcgaaagaaactgaagtgcaaaagtttcaaatggtacttggagaatgtctttcctgacttaagggctcccattgtgagagctagtggtgtgcttattaatgtggctttgggtaaatgcatttccattgaaaacactacagtcattctggaagactgcgatgggagcaaagagcttcaacaatttaattacacctggttaagacttattaaatgtggagaatggtgtatagcccccatccctgataaaggagccgtaaggctgcacccttgtgataacagaaacaaagggctaaaatggctgcataaatcaacatcagtctttcatccagaactggtgaatcacattgtttttgaaaacaatcagcaattattatgcttggaaggaaatttttctcaaaagatcctgaaagtagctgcctgtgacccagtgaagccatatcaaaagtggaaatttgaaaaatattatgaagcctgaagtgtaactgatgtttttatatagtaaacccattaaatactgtgaaaataaccctgaaaaaa

SEQ ID NO: 64891 - DNA, 405 bp, Homo sapiens
atcatgggtgtttttaaggggagtcagcaaaaaataaaataaggggagttggtggttgtgggtccacctcttacccgttgatgtgctctgtgctcacgacacaaagctcctggctggttctcttcagagacaggacaggaacgagagccaggctctggtccggccgtgtgcgagttcttcagcgttgccctccacatctggagtaacatattggtaggtgtgttttgatgaaggaaacatgactccaccctctcccattggccttcccagggaagtagcagaaatctaagaaggtcagggggaggagctaacttcagctagaagtctcattatcagccaggaggattgatgaccaaatagaaaaaagtaatttttaaaaggctttatttccctgcccatctcttc

SEQ ID NO: 64892 - DNA, 6845 bp, Homo sapiens
acgaataaagcacacaactttattcacgaagttgtgagtatgacagtgatgcagagtatatgacaaaggagtgcagtgagtgctgctggcaacaggagcggggagcaggtagggatcacaggcacagcagcgcggagccggcagggccacctcctcctctacacacaagcatgtggcacttagcgcgccaacacacacctgctcagtttcacagggaacacgacacagcttttcaaaaggaattcttctaaacatttgctttcatatttccaaaaggggagggagggcaggaagaaccacacgccttccaacatttgaaaaaattccataaacccaacttaaaatcaaagaactcagagagcttcaatgcggagtcatcagcaactcgcaggaaccacacacatgattggacaagtctgtacataaaaccccaaaagaacatcagttttgtggacaatggtttcctctgctgtaaagaaacgtatgcatatatgatcagtaagcagctcacatctttctgaatgtcaaggtctacaggattgtctctgtccacctttggtcaatgggttcaggaagtgactcatgggaactgcactcttaggagaaacacttttgggaataattttattgaataacaaccaccactcaattacactaagcttcagaaattgttggatttgtttaattttgctgtgtacctatacattgtttagaaagtttcttttggcttaaactgaccatttccccccttctttttgagttttccatgattaaacttgcccaaataaaaacataacaatccatatgcaaagcatatctgccaccacctcccactgcttcctgggccgcaaacagaaaaataaacagtgattaaaaaaaatgccaaagtgaaggtttctctttcttctatcacaacatagttgggtagttcccttaaagtacatcattgctataagttggtatcactgcaaatctcaagtcccaaataatctctttttctggatagaaagttattcaaaagggagcacaaaagagcaagctttggggcatactgacaaacacttcattggttagaagagaataattttaaaaatcaaataaaattgaggctggcataggaagtacagattaaatacaggttaaatagctaccagaaacacagaagaggtggttaataaaaactgagattgcttcagaggacacaggagggttgatgagacagtctattttccttccaccatcttccatgagagtcaggaaaagggttctgtgagcacccaacctggagcggtcacctgtctcttccatacacaggaggatgctaagacccagttagctttaaatggtttttagaaagacttacctagtcaaaagtggttaatttgaacttttcaaacttgcaaaagcatatacatttgatatcatcatctgagaagcaattcttagaaaaaaatgtttgcttcaatgtctaaagaaatccagtgaaagttttagaaacattgccagctagacgtctccgagttagagttgattgatatactggattgggatggagaggatgagaactgaaaaagaactgctccagcctctgcctcagaagaggaaactcagcttggagatgacagaattgggtagcggagtagatgctagagcccatgacagatagaaaactacccccatttaaaaaaaaacaacaactcattaactctatctctttgaggttttggagaacaggaagtttatgtgaagttattgaacacgtcatattaagaacatttcataactaaccccaaaccaaaatgtagatgcatagctagctgtgcaagtttcccaatgctcttcctatctcctaataagtcacacagaaagactatgtgatagcctggattttcttgaagaaattttaaaagaactgattttcctatcatcattgaggccccttttacttcatgccatcagtatgcacttaagagtcccaaggaagtcaaatgttcccaaatgtagccctttacatcggcaccagggaagcctgccatatatacaatccccttcctagggtgaacaagctccaccagtttgagtgtgttaataactggaattttcatgtatagtacagggtagggtaaaagcagaccaatagccatcttgtgtgctgtgaccaggatggacattttgaggacaagcatgctgagcccagtttaactaaatgcgcaggcattctagcccacacattcaatctggcagttagcaggaaccaggttgccccacaacccatccctccagctggagccttttgctgggaaatggagtagggggcccactctgcattatggtttccaatgacccctccccagagcagagcactactctgcttgcagataggaggctactggtgctttctggcaatgcatttctgcaaggtgcagtttaaatgaactcatatggtacttgatatggaaagaagctttttttcttctcaagttggatgcagaactgagtttaaaagatacaaggaaagcagggtttcattagtgggagctgatttagggttcagttctttatcactgcaatcttaggcaggccccttaactcctagtctctataaaataaggaagggggttgtcccagttttcagtctaatgtccccattctatgacagacccatgtcttctttatgtagaccaaggaagaggaattttagcaaaactacctgattatgcccatgtttcccaaataccttgatttttcttatattgacatttcatctgcacatgtctgggtgataattcattaatcaatgtaaaacgtagggaccctttattagctccataatgaaaaaaatctctccaccagccaagtgctgggacccaggtggccaccattgttattgacaggtaaggaagcactggaaatgcaccatcctctccatccccacactttccagagtaaagcaaggatgaggacacccaggcattgtgccaaggctgccattgcaggagggcacagagagaggatgggatagaaaaagcatggaataagcaagaggccactgagacaccaaaggctaaactgcaaactgcagtgtggcttccaaccaagcaagagctggtctcatctgctcatggccaccctgtcagagccatttgctaaacatgttagtagatccaacacacacacacacacacacacacacacacacacacacacacacacacgagagtagtcctcattcagtgcatagcaatggaaggctaggacaatttagattccttaggtaagagcacaggaggatgctatagaacagtgactgttcattccaccccccaaatgacagcagtgagccacgtgtcagaggctgcaacacagactcagaaactattctacttgcttttttaccactggtgtcagagagacagcttgtaatcctaatatttggtgccagcaggaagaacttcagagcttttgttcttagtggcatatgaaggtaaattcaaatgttttcttcttcggctttaaaacagagcttaaattcttaagcacagccccaaagcatgataataaagtggcttaccctcctgggtgtggagttacacaaactctccctcatctaactcacgtcgggaatcatgatgtggtttcatatgcacgcacgtgttggggaaaccctaggctcatattcgaatctagtgttgcagagcctgagggactctcgtgagatgctctgacctccacatcccacctcatccttcctctgtggttcccagtctgatccttccatgagctacatcagcgccaacacctttccatgaaggaagtgatgttggggtcgcagtttagcctcactcttgatctttgagtcacacacactcggtgacaatgtctttagaagctgcaacacagcaggacaaacattcaagcagaaattaaaaagcacatgcatgctcacaaaattactctgggtgagtgaaaccaacatgtgcacacacacccatgaattcgacagagctgggcaagaagaaagctgaaaaggccaaattaaatacgttcgaaggagtctactttggagttgcagagatttaaaagagaaaaacatgtctttccttagcctattattgaaagaaaccttaaaaaccaacaacagcatgggcttgatctgattcataggatgccagagagacagcagaggataacgactggaagaactagagtcagtaggacatgggacttgtttttgttttttgctttttggttttttttggccatgaatgatatggcccctacacaaaatcacctaatggcatgccactgggccaatctgggggcaatttgtgtttttcctttctttgcaaaggtggagctccagacagctcctgtcctaggcggggagcaggaaccagacctgctatgggaagcagaaagagttaagggaaggtttcctttcattcctgttccttctcttttgcttttgaacagtttttaaatatactaatagctaagtcatttgccagccaggtcccggtgaacagtagagaacaaggagcttgctaagaattaattttgctgtttttcaccccattcaaacagagctgccctgttccctgatggagttccattcctgccagggcacggctgagtaacacgaagccattcaagaaaggcgggtgtgaaatcactgccaccccatggacagacccctcactcttccttcttagccgcagcgctacataataaatatatttatactttgaaattatgataaccgatttttcccatgcggcatcctaagggcacttgccagctcttatccggacagtcagcactgttgttggataagagataaaggaaaagaaaaagaagaaaacaacgcagctcctgttgtatacataaggtaatgtgaaaaggtcacatgtggacactactctgtgtttcggaacatagaaatttctacgccatgcttcttggcaagtgttactgttggctggcccgacatttgactcatggtgttttaaccagactttctctttttggtgttgctgagcgacggtagtttgcaaattctccaatcaagtttgggcctcaatatgacatcctatggggcaccgccactggtcagtcctttctctaattggccattcacgagtgggacttagaagagttttgcttttttcttcatgtcgttgcgtctccaaagaggtaacctgtcaaactcctgtatggacattccaaagatttcccgaaacacttcaggggctaagtggcgctccagcctggttctgtccacctctctgaggattttgtttcgccctctgttggtcaccatgagcatttcatatggaaatatctttggttccaacatgttgggcatagacactcctcggtccattctcattgcaggcatgtggccatctgggagtgtctggtaatctcgcactcccccgctgacatccccatagctgttatactgagcgaagtcggtagaaacaggccggtgaagcccatttcttccatagccagggagagatgcagttttagatgatggaatatgtgaagctgagttgatgggagaatcgtagcgactggctaacagagatgacctttcccggctctctttctccatctcttctttcaagatcaactgtcccaggcctgagttaagcttcattaattgctcttcttgaagctgccgacgtctcagaagttcctcatcatcttcctctctgccactagatctgcgtttcatgtcaggtcctacgacagcaaatgaggggggaccaggccagtggtccgtctcaatctttggtgtctcgctggggtctggtgcctgggctgctgggaacttggaaaacttgatgatatcttctgaggacttgctctgggctgccaaggcagcatgctgtttgtagatgggtggctttcggtaaatgttgattccttgatctggaacatggaaatgtttaggggcctgagcgtaagttggagttagagggcggctgtctggccggtaagggagaggggagttccggccgctggacggctcattgccaggtctgtggaaatgctggggagagcgggacgtggttggagtgtagctgtggcggctgtacacaggggagttgatggagccctggctcgtggaccgatggatcatccgatcccgaacatcctggtacccttctgctgatggagtaggagacaaagtcctcggagactctccaaggctctgtctctcctgtttgtcatcatagcccgaagtgtagaaaggctcataggtaataagatctggacgttcaatgtcataaattgccttgaccttcggaatggctgctaaatccttgtaatccaggatctcattgtctacttttgcatagatagtatgacctggtgagccaggaatactggagcctggcctagaataaatactttccgaggatgtcctggtaggccgcagcttttcctcggtcttcgtagattgcttacagtcgggatgccaaacggtggagccttgaagatacatttcctctccttctgtgaacatctggttgcatctgctgcatcgtgcacagctggggtggtaatgtttgtcacctgcctcaggccagggttccttttcttctaattctgttccttggctgtgctgagcagagaactcctccaggcttcaagttcagaacacggccaagaggctttgtagatgccagacctcagcccgacagactgaggctcccacctgcctgggttacatatcaggcttctctccgaagctcggctaaggcaacgtgcatccctctagagacgcactccggaaaccagccccgtgtgcggcgggcaggcacgctcctcgtgcc

SEQ ID NO: 64893 - DNA, 1477 bp, Homo sapiens
ttttttttttttctattcatcttattttactttctaaggaattgatagaaatataaatgtacatatacctaaaaagtgagctatcctacatatgacagaccagaatttactaactccataggttttctggatatttcaagcacacattaaaacaattacagagaggacatacatttatgatttatgcaaattaaggcacatcaattacaatctatttttttaagttagtcagtttaaaaatcttcacttacaaaaattcaaaatatgtccaagctcaactttttagtaggaatgttagtttgttgggtttggccattttcttttttcaccttaaaggtcaaacatgaaacaatgaggaatgtaggtctttgtaaaacacataaatacctgtgatgttttgaatcatttggcccttaaaaatattgcttaacaagttaaacccagcttaattgtaggtaaatgcaagtatacccaaggctggactattttagtctgcttttggctgcagattgtacttctgtggctggaaaaaatgttcttcaatagcactgaccagttcattcagttccttcttcagctgctcaggatcactgttcccaggtggggcacacagctctgcatagtacttgattttgggctctgtcccactggtgcgcatggtggccacgcctccattagcaaaggtgaaggtgatcatttggctgcttttactagtgggaagaacagcttttttatcaggttggctatcatcatagccagttgtaaggtccctaatggcagaaatttcaaatttgccacaagcttttggataattattttttccatcgtagtttctgaggttttcaaataatttcttaatggtttcttgatcatggcagataaaataggaagctttagtaatatggtagccatactccacataaatggcctttagttgctgagacaaagacaaattcttggttgctaggaagctagccaactctgcacttatgacagcggcactgactccatctttgtccagaacaaaagggcagcacatgtatccaatagcttcttcaaatgcaaataaaacagttttcccctggtctattagctgtttggctctgtttcccatccacttaaagccagttaatgtttcctcaaaatgaaaaccttcctttaaggcaatggcccgcaagattttggaggagacggtgctggacaacatgtacgtgtctttgagagcactgcgatcctggttcttctctttccaagatgtaaaaagccaccagcccaggagggcccccaactcattgcctgaaaacaccctccattcaccactgtcttgcttttctgccacagcaagtctatcagcatccgggtcgttagctaaaacaattctggccttggttttgtcagccaaagcaaaagacaaagtcaagacacctttcccctcttcgggattcgggtatttcactgttggaaactcaggatccgg

SEQ ID NO: 64894 - DNA, 2150 bp, Homo sapiens
tttctggtaactcaaaatgtttacttataattgaggttaatttcttaactctttatgcaatataatgtaccaaatttagaagccaagtgatttctagtatgcattaagtttatatctagaaaattctttctggaattcagtatttattttaaaaagtgcataacaggagtaagagaggcttaccaaaatatttcaaaactcaagtacattttcctcatctccaatattttagaacggaataaaacataaactgaatcaaattttgaaactgtctttgacaagataaaaacaccaaatatctacttaaaattcattttgaaaatacaatctcagataactcaaaccaaaagtgctgaccattggttttctccagaatactcagttctaaatgaacaaaaatttatatgcacttttctagattttgagaaacatttttgtttcattagaaaagttatttctaacaatatattaatagagaaatagcacaattcttattcagcgcctaaatttttacgagcgaaaatatgaaattttatttttatgcatagtttatgtattgatccatggggcttacaaatagcaacacactcttgggctgatactatcgtggattttgcttaaattatgagggcaggaaaattttaaaatcccacaggtcacaactgaatcacattaactggctgatttagtaaatgaagggcaattctaaaatgcaaaataaaaatggaattaaggcagctttaaaagaaaataaaactcatccacccaaaatagtgctacataattcattacttaaaaagctctctgtggagtatagacataaagccaaaaataaaaacaaacattgcagttgtgatgcagcatcaggtgcttttacttcagtgaatgaaaaataatggtcacaactcaaatgaatgggaatttaatatgaatatatgcaccttaccagagatgtttgctaccaatgatatcttagcaattccatattccttacaaagtcagtataattgttgtaaaaaaatcaactgtggttctgaatacccattcacagttgacctcaacaatgtatctgatgtaggagactgagtatccgtgacaggcagaagcatgtgatggtcctcagtcccaagtggaagagctaatggtaaagtcatatcagaaggcttcacatccatagtttctgataaaggacttttttgtatggaatcctgttcactcaaagtatgatcctctgcactggagtctagagttttatctgcaccagaatggacttttgttttgtgcttctttaaatttttaatatctgtgtaagaatttccacataattcgcagataaatggtctttctcctgtatgggaccgaaagtgtttgttgagctctcctgaggaaataaaacttttcccacaaataccacatatgtatggtttttcacctgtatgttttcgagaatgagtgataagagaactagagacagcaaatgccttcccacaggtatcacatacataaggcttttctccagtatgcctacggacatgataggtcagtgtgctggcttgagcaaatctctgtccacacctatcacagacatatggcttctctccactatgcttccttgcatgaatcttgagattgctagaagttgcaaactgtaagttgcatacatcacatttatagggtttttcttcaccatgatgcatgcgactatggaagactagctgacatttctgagcaaatcctttatcacacaattcacatttgtatggcttctcacctgtatgagttcttacatgcgttttcagctggttacattgggtaaatgcctttccacataagtggcagacgtaaggtttgactcctttatgtattctcatgtgccttctcaaactgctggcttctgaaaacactttcccacatgtgttacacattggcttggccttggaatacctctgatccagctcttccccggagttctccgcctcataaggactcttgacgctggctatattagacatagagtgttctttcagagcacagtttggctgtgattttccacgtttccgtttcactgtaacagtgtgcacaatatcttgtgctggaaaagtattttccacaactgatgtcaactcgagttctgaattatcatttataag

SEQ ID NO: 64895 - DNA, 1760 bp, Homo sapiens
gttgttcaattaagaaacatttattcttttctaaatgaaagtgaaattgcagttgtaagtatgaacttaagaaacattggttttacaagataactagctatatgaccatgaccttaaggtgtgatatggtttggctctgtgtctccacccaaatatcttgtatctcccattattccatgttgtgggaggggcctggtgggaaataatttaatcacgggggcaggtctttcccatgctgttctcgtgatagtaagcctcatgagatctgatggttttaaaaatgggagtttccctgcacaagctctctctccttgtctgctgccatccatgtaagatgtgacttgctcctctttgccttccaccatgattgtgaggcctccttagtcatgtggaactgtaagtccattaaacctctttcttttgtaaattgcccaatctcaggtatgtctttatcagcagcatgaaaatggactaatacaaggtgctagacaaggtgattaaaggctctataaattctaaattgtgcaattctaagacattcttggcattttacatgtctagatgactgccatcttttttttaatatttttccctcacatgttccagtctattctcattacagaagaatacgtttaacatacagttacagaaacagaggttttaaataaatatttaaaagtaacttcaaaatatatttgcactgaaatatggaggcaaaattgtttctgagtcaggaaacatttattcttccccataaatttaaatggaggtgaaactgtgaatatgaagcaaagaacatttatctcacaaggtaactctgaattcttttaattctgaaaccagagacatgtacaacacttacagcattcacacaacactattttcaaaataggtttttgacccctaaaaatgaaaattcttagtgacaagctttagatatgaaacttagcccagtgggtattcactttgtcacaaaaagcaactacagacaaatagtttttccctctccccgacacaaaaactgaaattacagacttttaaagcagaaaaaattttctccaaaatgcaaatgattaaggtccaaggaacaaatgaacagaagatctcaattattcaattgagcgagtgatttagtttgcatattaactccttttcttactacttcctgatatctgattctggcaatatttatcttgtatctactgggcaagacactgggaacacaaagaaattttagacaaggtccagtggtatgctggtaaaggtttaacaactagctcttaagggaaaggtaggtcttcacttatagcatttctatggtgtaaatactccaattgccgcagatttcaagctagcaacaatttgacaactgtctcacaaaattcctcaaactaacgattgtcactcataagacattacaagccagctccaacacaccaccgtacagtctccaccttcaagtagttcataatctcttcatgggtaccttgtatcagatcttgggcaactgccggctggggtgaccagggaattcttctggtagcaaaacgtggagtctgcacgttggacatgtcccctgttgcatcaaccatggtctaatgcactgagcatggaatttgtgagcgcaaggcaaaactgaaagattttctggagacagattctcatgacagatcacacaaggctcttcttcttcctcttcctcatctggattactggctccttcccatgtggcaggaccctgtgaagtgagtggcctccag

SEQ ID NO: 64896 - DNA, 395 bp, Homo sapiens
cgcggtatctccgcagccctgagaagctcatcaagaggataaaactgccttagctcgttgagtactttcactttttcgtgggatgagctaaggctttcagcttttttagatacataagccgcgtttcaagaaatcgaacttgcctttcaagatcctcaatgcgtcggtcttttgacagctccaatgctgatgccgctttttctggatcaactgatattgcaatgtttcttttggtgccaatcttgagcgcgcgtaaaccagcttctccgcgctcttcatagaccttcagccacctggctacagaaccactaccagcaagcataaagtgagcagcagcctgattaagggacatgtgctgctcgatcacagctttcacgaccttaatacgcaactct

SEQ ID NO: 64897 - DNA, 540 bp, Homo sapiens
aaggcgggagtgcggcaatgagcggcgaagcggcgttttacggcctgcaaccggtagatagcgatctgcacgcgtttgctgcacatcagtcgttgttgaaggcctacgaaaagctgcagcgcgccaaagcagcattctgggcaaaataaaatcaaatagcctacgcaatgtaggcttaatgattagtctgagttatattacggggcgtttttttaatgccccgctttacatatatttgcattaataaaataattgtaattataaggttaaatatcggtaatttgtatttaataaatacgatcgatattgttactttattcgcctgatgctcccttttaattaactgttttagcggaggatgcggaaaaaattcaactcatttgttaatttttaaaatttatttttatttggataatcaaatatttactccgtatttgcataaaaaccatgcgagttacgggcctataagccaggcgagatatgatctatatcaatttctcatctataatgctttgttagtatctcgtcgccgacttaata

SEQ ID NO: 64898 - DNA, 718 bp, Homo sapiens
gatggtgaataaaaacatcgccgatagcttcctgcccgcattaagcaaacaaatggcggaaagcggcgtgacattacacgcagatgcagctgcactggcgcagttgcaggcaggccctgcgaaggtggttgctgttaaagccgaagagtatgacgatgagtttctgtcattagatttgaacgtcaaaatcgtcagcgatcttgacgatgccatcgcccatattcgtgaacacggcacacaacactccgatgcgatcctgacccgcgatatgcgcaacgcccagcgttttgttaacgaagtggattcgtccgctgtttacgttaacgcctctacgcgttttaccgacggcggccagtttggtctgggtgcggaagtggcggtaagcacacaaaaactccacgcgcgtggcccaatggggctggaagcactgaccacttacaagtggatcggcattggtgattacaccattcgtgcgtaaataaaaccgggtgatgcaaaagtagccatttgattcacaaggccattgacgcatcgcccggttagttttaaccttgtccaccgtgattcacgttcgtgaacatgtcctttcagggccgatatagctcagttggtagagcagcgcattcgtaatgcgaaggtggtaggttagactattatgatgggcaccatctaagatcatatctgttccgtaagatctccgggtcgcgacatagaattg

SEQ ID NO: 64899 - DNA, 461 bp, Homo sapiens
ctacgaattcaatgtccgtacccgtacatcgtatagaatggacttgccctgaccttacctaagttacattgattgcggctaaatgtaaagatattgctggtttattgtttgtttttgcgagatgcgccgcaccattccgaagcaaaattcttaaaatgcactcttttagtgctaccgctggattactgtggtgcaactaggttgtactgatgctgtttcagggtttgccttgtataacaaagcaatagatgtgccaaagttggataggagaatattgttatccggataatgcactgatgccgcatccggtgagcgtgccgaaatatgggatgtattccggcacgataagaagggattatttacgtcgctgacgcagactcatcaacacagcagcaaaaccaaacaatgccgtcagcacccacagcggccagttgccggtacgtgcgtatggtgtgatttcg

SEQ ID NO: 64900 - DNA, 429 bp, Homo sapiens
tatgaccacgattacggattcgatgtccgtacccgtacatcgtcccgactgtaaccaccctgagattaccctgctgaagacgcttctggtcaaccagactaatccggtcgatctctcatcgctgcatcagcaaaatgccgtaccgccgcgcgtcgcaaaacaactctgccgtttactacgcctggccatcatttttgccagccgtcgccgtgacgatctcgtgccagagatgacattacaggctaaccatgaactgttgaccttgacgcttccgcaaggttggctaacccaacatccgctgggtaaagagattattgctcaggaaagccagtggcagagctatgtccactggccgctggaagtgcattaatgagtaagtgccggatgcgatgctgacgcatcttttccggccttgattatttccctcgg

SEQ ID NO: 64901 - DNA, 537 bp, Homo sapiens
tgacagacatagtcagaacagttatcgcggcttattgaaaatcatgccgacggcaaccaatgcgcgcaatttcactcagtgcgactcaatgctgattggcgctaattgtggggcgcataccttcccgtatgttgagtgtcgtaacaatagtgcgcaactggaacacgaggcaacgacatcacgtattggtgaagatcaactgttttactgcctgcaacgcgggatcagcgaagaagacgccatctcgatgattgttaacggtttctgcaaagacgtgttctcggagctgccgttggaatttgccgttgaagcacaaaaactcctcgccatcagtcttgaacacagcgtcggataaggaataaacatgttaagtattaaagatttacacgtcagcgtggaagataaagctatcctgcgcggattaagcctcgacgttcatcccggcgaagttcacgccattatggggccaaacggttcgggcaaaagtaccttatcggcaacgcttgccgggcgagaagattatgaagtgactgtccg

SEQ ID NO: 64902 - DNA, 471 bp, Homo sapiens
tgctgcgtcgtccggaaatgacttatgaaaaattaaccacgctgacgccgtttgcccctgcgttgacagacgaacaggcggcggaacaggttgagattcaggttaaatacgaaggttatatcgcgcgccagcaagatgagatcgaaaagcagctgcgtaacgagaacaccctgctacccgcgacactggattaccgccaggtatccggtctttctaacgaagtgatcgccaaacttaacgatcacaaaccagcctctatcggccaagcttcgcgtatttctggcgtcacgcctgcggccatctccattctgctggtgtggctgaaaaaacagggtatgctgcgtcgtagcgcataacgcattaaaaatgcctggtaagcacccgcttaccaggcaacgcatcaagaacaggtaatcactgtgctccacgacctctcagttgtgtatcaaacacgcaggtatctctctcgcc

SEQ ID NO: 64903 - DNA, 444 bp, Homo sapiens
ttactaattccatgtcgcgtcccggagatcagccccactgtaagggcggtcgcgggatcaatgcgcgtcggctccgggacggcgctggtgggcgatggtcctacggtcgctgcgcgaatcaacgaatatgccgcgcttggcatcgacagttttgtgctttcgggctatccgcatctggaagaagcgtatcgggttggcgagttgctgttcccgcttctggatgtcgccatcccggaaattccccagccgcagccgctgaatccgcaaggcgaagcggtggcgaatgattttatcccccgtaaagtcgcgcaaagctaaggaagaaataatggcaacgccagtgaagaagtggttattgcgcgttgccccctggtttttaccggtgggcatcgtggcggtgtggcaactgggctcctcggttggctggctgtcgacgcgtatttt

SEQ ID NO: 64904 - DNA, 469 bp, Homo sapiens
cgctggtggttggctggaatattcaggataccacccgtctgtggctggagggctggattgccagtcaacaaggatggcgcattgatgtcctcgcccactcgctcaatcaactacgccctgaactattcgaaggccgtacattgctggtgtggtgcggtgaaaatcgaacctccgcccaacagcagcaactcaccagttggcaagaacaaggccatgatattttcccactcggcatttaatgattcgttaacaaatgcgctttactgtacaatcctttcgttaacataaggagtgcattatgcgcatagctaaaattggggtcatcgccctgttcctgtttatggcgttaggcggaattggtggcaacatgctcgcaggttatacctttatttggcgtgcaaggtaagtgagtgcggcaacctctatgatcatcccgttcgcgatgatgtgagcgcctaacataaatgcg

SEQ ID NO: 64905 - DNA, 563 bp, Homo sapiens
ctgtggatccatcccttcggcaaatccgacgacggcagctaccagaacgagggcaataaagccgttaactttaaagccgatcatcaggataagaagcagcgcgacgcctgccgcaataatgattaatggcatagtctttatctcttattagtgccagaaaagcagcgctttcgcgctgcacgtaggggggctgttaaacagccactaacatgccgccatcaacaaacaacaggtggccgtttacgaaatcagaggcttttgaagaaaggaacaccgcagcaccaatcagttcctgcggatctccccagcgtgcggcgggggtccgtttgcacaaccaggcggtgaaggcttcgtcctcaaccagtgctttagtcatttctgttttgaaatagcccggcgcaataccgttgacctgaatattgtggcgcgccagctcgacgcacatgccgcgggtgagcatttttaccgcccctttcgatgcggcataaggggtgatggtgtcacgtcccagttcgctttgcatcgagcaaatattaataactttccctgccttgcgttcaacc

SEQ ID NO: 64906 - DNA, 533 bp, Homo sapiens
gattacgaattccatgtccgtacccgtacatctccgggactgggacattcctgaggttacccaaactgatctcatcgcaaccgacattgcttaacgccgtcagggcctgcggtgtcagttctaataattccggacgtagtgaattcatgactgaagattctccgcaagccatgatgccagctcgcccggcgtcatggcggctatttgtgcgccgacattaaccagcgcctgggccgtatcgcggtcatagcaaggtgttgcggtgctatcgagcgctgccagtcccagcactttgatgccgctctggacacactttttcacctgatgcgtcagtaatgatgatgaacccccttcgtaaaaatcgctcacgaggataatgacgcttttcgctggttgttcaataagttgccgaccatactccacggcactggcgatattggtcccgccgcccaactgtactttcattaataactctaccggatcggcaacgtctgccgtgagatcaacgacgcttgtgtcaaacgccaccagat

SEQ ID NO: 64907 - DNA, 389 bp, Homo sapiens
gcattcagcgcgacgattccaggccgctacccgttcttgtcgttgagattgttcaattttctgcgtcattttgattgccttattcttcgcggatgccggaaagttctgcacgggagagcaccagacgggcgcgatcgataaccggaccgtccaccatcttgccgttcagggaaaccacgccgaggccttcgcgagcggcggcttcagcggcttctacgacgcggcgggcgtgatccacttctttctgggtcggggcgtataggatgtgcagcagatcaatctgacgcgggttgatcaacgatttgccgtcaaagcccagctgtttgatgtgggcggctttttgcacaaatccgggttcgttgttagcggcggaattgacccgattgaaa

SEQ ID NO: 64908 - DNA, 590 bp, Homo sapiens
gaactgattaagagatccataggtgaagaagaaaaacggggccagcaacaataaccagccagcgccttgtagcaatacgttccgacgttcagttatcacgacgcaccgccatcgaaaccgtaaaaataccccactcatcaatccgttgtgtgcatttatcaaatccggcatcacgcacgagtgaatccatctccccttgcgaacgcacgcgcattacccacggtttaccatctttatgactgggtaacaccccggcaatcatctccagttgagggtgccacggctgcccggtgtagatgagaatgccgcccggttcgatggcattggcaagacctgcgagtgagttttttacctgctcattttcgggaaaaagctcatacaggccagagacaatcgccagcgtaggccgcggagttaacgcgctgagttcctccgggttaaacgcatcgccctgttcaaaacgcacccgcccagacattccccgttgagcaatcatctcttgcccctgtgcaacatttaactcgctgtaatcacgtaacaaaatatcgcttacggcaggctcgtttgccagcgcatccagtacatagcgc

SEQ ID NO: 64909 - DNA, 567 bp, Homo sapiens
aagtaggacacgattacgaattctaggtccgtacccggacatcggctattatgcatttactacgccggtgcacgactcaatttactcctggcggaagatgagatgctgcgagtgggcggaaaagtgctggcgattaccggctttactccgaatgccctgcaacagcgtgcttctcattgcctgtataccattgccgaagaacaagcgacaaacagtgcttcaatctctgcttgtcacgctcagggaatgttaacggatttgctgttcattgcgctgattcagcaggatctggaactggcaccagaacgtattcgtcatagtgaagcgctggtgaaaaaactggtctgagtaaagaatgcgcgtataatgcccgcccggtttgtgttgttttgagagtttccttatggcgttgttaatcactaaaaaatgcatcaattgtgatatgtgtgaacccgaatgcccgaatgaggcgatttcaatgggagatcatatctacgagattaacagcgataagtgtaccgaatgcgtagggcactacgagacaccaacctgccagaaggtgtgccc

SEQ ID NO: 64910 - DNA, 336 bp, Homo sapiens
cttgtaaaacagttatgaccatgactacgaatttcatgtcgcgacccggagatcgtctggactataacaaacatactgatatccgcggtactactgtcgttggcgaacgtattctggacagccagagcggcgaagtaactttaggtactccggtagtaattacgttcaacaataccaacagctatcaggaactgaatttcaaagctcgtatggaatccccaagcaaagatgccaccccgggcaacgtttacgctcaggctgactacaagattgcttacgagtaatcgcatttggccgggttcgcccggccacatcattaacggattaatgataagt

SEQ ID NO: 64911 - DNA, 375 bp, Homo sapiens
ccctggcgatgaccgactgctcaacgccggaagacggcctggcatgccaaaagctgggagccgaaattattggcactacgctttctggctataccacgcctgaaacgccagaagagccggatctggcgctggtgaaaacgttgagcgacgccggatgtcgggtaattccagaagggcgttacaacacgcctgctcaggcggcggatgcgatgcgccacggcgcgtgggcggtgacggtcggttctgcaatcacgcgtcttgagcacatttgtcagtggtacaacacagcgatgaaaaaggcggtgctatgaccacactggcgattgatatcggcggtactaaacttgccgccgcgctgattggcgctgacgggca

SEQ ID NO: 64912 - DNA, 846 bp, Homo sapiens
tttagttcggacgttattgactatattaattggttgttcaaggcctctgagatttttctcaagatggtgatgcagatttaaccctgttgtcgtcggcgcgataccttttcctgagcgaatgaataaagggtcattaaattgcgcacgtaagcgttgtaacgactggctcacggctgatggggtgatatatagtgattcagcagctttgctaatgcttaaatgctggtaaatacactcaaatatgacaagaagatttaagtcgaactttttcaagtcgtagagattggccatacactactccggttatatttttcttccatgatatattcacttaatcaatgttttttgcgtatatatttttattgattatgattttttgcttaactcaggattaagtttttctaaaatagcacagccacttatggcagagcgagcaattcatgcttttttaggatggttgaaaagcagggatatagttcaaccatccatgaattaccttttatttattccccataatgatattaagcgttttctgatcgggcaaccccacggcctgttgtagcgtattttccttactcatgtaatagatagccggcgtgacatttgcccccagatcgtccatcagtttatcattgtcacttaacactttcatttgctctgtacttacgtttgcaggcacgtttagcttaagcttgccaccagaggcttcatattgttgccaggtttttgcgggatctttggaggcaagaattgccgctgctgtcgccgggctttctggcttgatagccccagccagcaatgttgttaattgcactttgtcagagtctgcccgcaagacggaccgga

SEQ ID NO: 64913 - DNA, 353 bp, Homo sapiens
ggattcggtagtgcgtgccaaaaaggtttttggtgaaaaccatatcaccattatctcgcaagaatttcataatcaacgcgccatctggctggcaaaacagtacggcatcgacgctatcggttttaacgcgccagacctcaatatgaagcacggtttttatactcaactgcgggagaaactcgctcgtgtcagcgccgtgattgacgccaaaatcctccatcgccagccgaaatatctcgggccttcggtcatgattgggccgtttagtgagcatggctgtccggcgcagaaataatgcgtatctgcgcacgtcgaagatgaaaaaggcgtgctacattgccgacagaatccct

SEQ ID NO: 64914 - DNA, 637 bp, Homo sapiens
aaagacattggcgcgctggaggaagtgtggggcagtagcgtgatgaatccgtggctgccgaaagagcaacaaagtagcattctgaaagtgacggtgcttgagcatcatccgcattacgcgatgaccgcgctggcgctgggcgatcagcatttgtgggtcaataagctggacgaaccgctgcaagctgcgctacgtatccgcattcaggcttccgatgtttctctggttttacaaccgccgcagcaaaccagcattcgtaacgtattgcgggcaaaagttgttaatagttatgacgacaacggccaggtggaagtggaactggaagtcggcggtaaaacgctgtgggcgcgtatcagcccgtgggccagggatgaactggcgatcaaacctggcctgtggctgtacgcgcaaattaaaagtgtgtcgataaccgcctgattaaatcaggtggctataaatgaactgggcaatgctgtcggtggtgttatcaccaatcacaatgttggcgcgcgcttttaccgcgtcatcggcgttgcccatcgccacgcctgtaccagcggcttccagcatactgatatcattaaagttatcgccgaatgccacgacgttttccatcgaccaaccttgcgcctcaacc

SEQ ID NO: 64915 - DNA, 305 bp, Homo sapiens
tgcctacggttctggcctggggacttgtaggcctgataagacgcgtcaagcgtcgcatcaggcgctgaatgtcggatgtggcgtgcggcctacaaatcaaaccaaattcaattggttacgattatcccgtcaaagtaattttttcgctaacgtccagaccccggtattcgtggtggaaagcgccacgacacccgcgttaatcgcattacgcgcatcttcttcatcgcacaccagcccaccggcaatcagcggttggcggattttctctgtcacccagcccagcactttgggcatacagcctggca

SEQ ID NO: 64916 - DNA, 157 bp, Homo sapiens
atcgcccttgcggcgttcctctttgccacagtgccgaacgatacgcatcaaaatgtagctatttcgcggcgaaaaaggagcgcgcaatgaagttctggcgacccggtattaccggcaaactgtttctggcgattttcgccacctgcattgtcttgct

SEQ ID NO: 64917 - DNA, 404 bp, Homo sapiens
catttgggctgttcctaagtgcgtcaggcggtcaagtgtatcatcactcatactctgcccgacacatcgccaccgtatcttctatcagacggcgcgctacggtgccgggcggcgggagtaacggcaaatcgtcatagcgataccagttcgcctcgagcaattctttcgggtcgatcacgatgtcgccgctgtcatattccgccataaacgcggtcattaaagactgaggaaacggccacggctgagaagtcacgtaacgcaagtttttaactttaattccgctctcttccatcacttcccgcgcgactgcctgctcgagggtttcgcccacttcgacgaatccggcaagtactgtatggacaccgttacgatggcgggtatgctgtgcgaggaggatcgaatca

SEQ ID NO: 64918 - DNA, 730 bp, Homo sapiens
tgtttgaccgtgaacgcggtgcttttaccggtgccagtgcccatggtatcggtcgttttgaactggcggataaaagctccctgttcctcgacgaagtgggcgatatgccactggagttacagccgaagttgctgcgtgtattgcaggaacaggagtttgaacgtctcggcagcaacaaaatcattcagacggacgtgcgtctaatcgccgcgactaaccgtgatctgaaaaaaatggtcgccgaccgtgagttccggaacgatctctattaccgcctgaacggattcccgattcacctgccgccactacgcgagcgagcggaagatattccgctgctggcgaaagcctttaccttcaaaattgcccgtcgtctggggcgcaatatcgacagcattcctgccgagacgctgcgcaccttgagcaacatggagtggccgggtaacgtacgcgaactggaaaacgtcattgagcgcgcggtattgctaacacgcggtaacgtgctgcagctgtcattgccagatattgttttaccggaacctgaaacgccgcctgccgcaacggttgtcgccctggagggcgaagatgaatatcagttgattgtgcgcgtgctgaaagaaaccaacggcgtggttgccgggcctaaaggcgctgcgcaacgtctggggctgaaacgcacgaccctgctgtcacggatgaagcggctgggaattgataaatcggcattgattag

SEQ ID NO: 64919 - DNA, 243 bp, Homo sapiens
atgtccgtacccgtagaacgtaacgaatggcaggacaatggagtgatgctataaagctgccacgatgcgcacaccgatggcttcatcggtcagcaaaatattgccgacccctaagactaaaatacgcattacagaaccttcactgaaaccacttcgttgccgtcagcatccactacgtgtaccgcacaggccatgcacgggtcaaaggagtgaatggtacgcaccacttccagcggtttattc

SEQ ID NO: 64920 - DNA, 352 bp, Homo sapiens
accggcgcaataaacctgcaggatttctatcaggccgggattatttaatccttcaatcccagacgtttcgccagccgatgcaggttggcgacgtcggtttccagcatccgcgcgcaggcagcccagttgtgatgattttgtgccagtgcctgacgaatagtttcacgctggaacgcttctgtcgcttcacgcaggttttgcttaacaacgggcaccgccgccacttctggcgtcggcaacgtcacctcaggaaaagcaaaatgttgcgcctcaagaatcacttcatcgccgctgcgggtggctctcgccagaactaccgcccgatgaatagcatgttccagttcgcgcacgt

SEQ ID NO: 64921 - DNA, 214 bp, Homo sapiens
ggttactcgtcagcgatgcttgccggtggccagttttccaggcgcatgcccagagacagtccacgggaagccagcacgtctttaatctcagtaagagattttttaccaaggttaggcgttttaaggagctcaacctcggtacgctgtaccagatcaccgatatagtggatagcttctgctttaaggcagttagcagagcggacagtcaattcca

SEQ ID NO: 64922 - DNA, 171 bp, Homo sapiens
caggcgatcgcgtagtaataagtgggctgcagaaagtgcgtcctggtgtccaggtaaaagcacaagaagttaccgctgataataaccagcaagccgcaagcggtgctcagcctgaacagtccaagtcttaacttaaacaggagccgttaagacatgcctaatttctttatc

SEQ ID NO: 64923 - DNA, 360 bp, Homo sapiens
  misc_feature (1)...(360): n = a,t,c or g
aacaattagtgcaggcctgccaacctacagaagaatcattaatgccgattgtgagccgccttgatgcagaaaatcgttgtccactggaagcattaattattcgtcgattattaattcaggcggcgaattttaccgagaagcaaactgttgaaccggagccgcaaccgcagccaatgcccgttgacgatggtgggccaggctgtctgggcatcattaaaattattttctatatttttatctttgctggtttgatagggaaaatactccatctgttcgggtgacagtcgacgttaatgtgcgggaagcccggcaagtaatctttccgcatttttgtaatgttgcccggcggccagtnttatc

SEQ ID NO: 64924 - DNA, 504 bp, Homo sapiens
  misc_feature (1)...(504): n = a,t,c or g
aaaccgttcgcacatggcttacaggaagtcgccaagcggggtcgcgctggaatgtaaagacggtcgtattttcagtggcagctacgctgaaaacgccgcattcaacccgactctgccaccgttgcagggagcgttaattctgttgaatctcaagggttatgattacccggatatccagcgcgcggttctggcagaaaaagccgatgcgccgttgattcagtgggatgccacctccgcaacgctgaaagctctcggctgtcacagtatcgaccgagtgcttctcgcttaagcctggtgccggatgcggcgtgaacgccttgtccggcttgccagccctctcctggtgtcgaaattcccggcaaacagtttgccgtttcttgcgcaaaaccagcgggtaaagtagcctgatggaaattttccttagatcgagtctcctgcatgttaaagcgcgtgttcctcagcctgttagtcctgatcggcttgctgccgttcnctgtgctnggc

SEQ ID NO: 64925 - DNA, 372 bp, Homo sapiens
  misc_feature (1)...(372): n = a,t,c or g
agaaattaacgcgcgatgatgaggcggaaaagtgagaaataaatggggtcgctaaatgtcccctaaggttgcgggcaaacgcaaaactgcctgatgcgctacgcttatcaggcctacaccgctcctgcaatatattgaattcttgcggtttcgtaggccggataaggcggtcacgccgcatccggcatgaacaacgcgcactttgttagcaatctcggggcaactaaatgttgccccctttcgtttttaccctaccgctggcgtcgggtcatcgcctttgtagtcgcgttttacttccgtcacctcatcgcccttctcgttgtgcagatgcacttcaagctggttaaaggcaatggtgatgtcgntttcacg

SEQ ID NO: 64926 - DNA, 545 bp, Homo sapiens
  misc_feature (1)...(545): n = a,t,c or g
gtgcgccactgatcgcccacttccttcagttcatgggctggtttgttccgcagctccaccagcgcctggcaatatttattactcattaagcccccacgtaattccctgagagataccactcttcacctgatgcagcccgcttactgcttttccgtaaacaccgttcacgacgcgccagaaaattgtttcgttctggctgggagtggctttcacggaatgccgccatccacaccgttgcagcacgacggtataagcccctggactccagttcttccgcctggcgggtcaggcacaaaatcacccgcgggtcgttagtgccgacatagaaattgcgcacaggtctggtttcacgaactggttgtggttccggatcctgcgctctctcagtcaggcgcgggaaatgtctgtgtgtatctccttcacaacggtgagccacacgcccactctgacgtaacttgcttgctgactgcagaacgcgctgccgtgagtaacctgcaaaagcatccgcaatgtctccccaagtacagccccgatgggnttcaatg

SEQ ID NO: 64927 - DNA, 353 bp, Homo sapiens
ttggccaacgcatttacgcctgcgcggttcgggtttcgttaatgccgtcggacggatcgtcgcagtcttcacgccctatggcgttgcggcattattaacacattatgggtcgatcacggggtttatggtacttggtgttatgttattgctctgtgcgctggttctctccatttttggcatcgaaacgcggaaggtgtcgttggaagagatttctgaggtgaattaaatctttcgttgatggcatcaattgccagatgtgccactgacgtgttttatttggcctacaatgccagtacagaattgttggccagcgtaaaattacccctgtggctcttcccagtctggcagcgtat

SEQ ID NO: 64928 - DNA, 588 bp, Homo sapiens
gaaatcaccggtaggggccagcggcttgatgcagattatgcctggtacagcgacccatacggtgaagatgttctctattcccggttatagcagtcctgggcaattgctggatccggaaacgaatatcaacattggcaccagttacctgcaatatgtttatcagcagtttggcaataatcgtattttctcctcagcagcttataacgccggaccagggcgggtgcgaacctggcttggcaacagcgccgggcgtatcgacgcagtggcatttgtcgagagtattccattctccgagacgcgcggttatgtgaagaacgtgctggcttatgacgcttactaccgctatttcatgggggataaaccgacgttgatgagcgccacggaatggggacgtcgttactgatccgcacgtttatgatatgctatcgtactctttagcgagtacaaccgggggaggcattttgcttcccccgctaacaatggcgacatattatggcccaacaatcaccctattcagcagcgatggcagaacagcgtcaccaggagtggttacgttttgtcgacctgcttaagaatgcctaccaaaac

SEQ ID NO: 64929 - DNA, 365 bp, Homo sapiens
cgaaaatgccggcatcgccgcccgctttacgttgggaccggaagcggtggtggacaaagtacgccatgcttttattagcgagaagccgaagatgcgctatccggtgacgctggtgacctgggcggtaatggtgcttaagcgcctgctgccggggcgcgtgatggacaaaatattgcaggggtgagttgaagcgcgcgcttaagcccccatgtcaaagaaaatatcgacaacatgagagcgactccatgtccgtagaaaatattgtcaacattaacgaatctaacctgcaacaggttcttgaacagtcgatgaccactccggtgctgttctattttttgtctgaacggaaccagcacttgttgccg

SEQ ID NO: 64930 - DNA, 578 bp, Homo sapiens
  misc_feature (1)...(578): n = a,t,c or g
tggggttcagcaaccacatgtacctgatagctatgacgggcattcagggcatcaagtaccacctgattgacatcggcaaacgtcagttggatacccgcgtctgccagcagtttaccgataaagccacgaccgatattacctgcgccaaaatgtaatgctttcatagtattaaccttcatcaatgtttttacccgagagggctggggtgaggcttttccctcacccaaaccctctccgtgaggagaggggcagcgccggatgcggcgtaagcgccttatccggcctacaagaacgtgcaaattcaacaaattgtgatgcatcctgtaggcctgataagcgtagcgcatcaggcaattaaccccaccttctccatgtggagagggtgggattggattacttacgacctgccagcagttccagcacttcatccacgctggtggtgtgtgccagacgctcgatgacggactcatcatccagtgcattggtcaggctggtgataacctgaatgtgctcgttgttacgggcagcaataccaatcaccagacgggcaatgtcatcttcttcttcnccgtagccca

SEQ ID NO: 64931 - DNA, 370 bp, Homo sapiens
atatgccccttgcccatcaagtgattgaggagcatatcacggtcaatccatcatcaccggcattccgtcatggcaagtcgttaggctctgggaaaaataaagactggtcacgggtaaaatttggtgctggtcgttatcgtctcttctttcgttatagtgaaaaagagaaagtcatcattctgggatggatgaacgatgaaaacactctgcgcacctacggtaaaaaaacagatgcctataccgtattcagcaaaatgttaaaaagaggacatcctcctgccgactgggaaaccctcacccgagaaacagaagaaacccattgatggtgttcacaatgcccgccgaacgcattcgtgttgaccagcgggca

SEQ ID NO: 64932 - DNA, 384 bp, Homo sapiens
tatcactgtgatgaactctgccggaggcaaagcatttgacctgttcggcgaactgaccggtatcgcagtactgctgactatgctgccgtatttctactcttgcgttgacctgattcgttttgaaggcgttaacatccgcaactttgtcagcctgatctgctctgtactgggttgcgtgttctgcttcatcgcgctgatgggcgcaagctccttcgagctggcaggtaccttcatcgtcagcctgattatcctgatgttctacgctcgcaaaatgcacgagcgccagagccactcaatggataaccacaccgcgtctaacgcacattaattaaaagtattttccgaggctcctcctttcattttgccccatgtgttgggaggggg

SEQ ID NO: 64933 - DNA, 511 bp, Homo sapiens
actgttgcccattatgcagttgccagtggcagatattaacgcccagaccgccattatgcatgacggcaaagcctcagaaggcgatattcagggacacgttgatggttggatcaaagcccaccagcagcagttcgatggctgggtgaatgaggcgctggcagcgcagaagtaatttttattcgggcggataaggcgtttttgccgcatccgccgttctgtgcacaatgcctgatgcgacgctggcgcgtcttatcatgcctacaaaccacatcgcacatttcaacaatctatctttcatcccatattcatcaacatccgctattattgatttccagcttaatcatcacctgatgaacaaaaataatgactaaacctaatcatgagcttagcccggcgctgatcgtgctgatgtctatcgccaccggtctggcggtagccagtaactattacgcccagccattgctcgacaccatcgcgcgtaacttttccctttccgccagttcggcaggtg

SEQ ID NO: 64934 - DNA, 412 bp, Homo sapiens
cagcagtaccgataatccgccagtgattgttgaagtgtctggtattggtcagtacaccgtggtggttgagaaagatcgcctggagcgtttaccaccagagcaggtggtggcggaagtgtccagccgtttcaaggccaacccgaaaacggtctttctgatcggtggcgcaaaagatgtgccttacgatgaaataattaaagcactgaacttgttacatagtgcgggtgtgaaatcggttggtttaatgacgcagcctatctaaacatctgcgtttcccttgcttgaaagagagcgggtaacaggcgaacagtttttggaaaccgagagtgtcaaaggcaaccgaacaaaacgacaagctcaagcgggcgataattatttcagcagtgctgcatgtcatcttatttgcggcgct

SEQ ID NO: 64935 - DNA, 773 bp, Homo sapiens
catcactgttcgtcgctgtacatcgttcagaatgcgaaaaccctgctgatacccaccttaatcgtcttgcttcacatgatggacgtgatccgccatcatcaaccaataagtcgtcgggaagccagagctaaagcgattgacctgctggaagagatgcaaatcccggatgccgtggaagttatgtcgcgctatccgtttgagctttcaggtggtatgcgccagcgggtaatgattgcgctggcattctcctgcgagccgcaattgattattgccgacgaaccgactacggcgctggacgtcacggtgcagttgcaggtactgcgtttgcttaaacataaagcccgcgccagtggaactgcggttctgttcatcagccatgatatgaccgtggtgtcgcaactgtgcgatagcgtatacgtgatgtatgccggcagcgtaattgaaagcggcgtgacggcagacgttatccatcatccccggcatccgtataccattggtttgctgcaatgcgcaccagaacatggagtcccacgccagctattacccgccattccagggacggtaccaaacctcacccatttgcctgacggttgcgcttttcgcgatcgttgctatgcggcaggtgcacagtgtgaaaacgtcccggcgctgacagcgtgtggtgacaacaaccagcgctgtgcctgttggtatccgcagcaggaggttataagtgtgtgacacgttattaacgttacgagacgtccctatccctttcccggcccgtaaaaact

SEQ ID NO: 64936 - DNA, 423 bp, Homo sapiens
cccatcattacgaattcaatgtccgtacccgtagatcgcacagagtgggaaagccttgttttatcccttcctgagaatgttcgatctgcatatcttttaaaaagataaccatcagcgacagccacaaaattccgttgacaaggttgaagagattaaacagtccgttgcccccgttcagccaggcatgtttgctgatttcaataccaacggtaaagatcagcatttgcagcattcccatcgcggcagaaaccgtacctttactcatatcgctggcaaacagggttaatcgcaccagtcccgcattcgccagaccaataccgaaagcataaatacttaacccggcagtcatccataaatacgcgtgcgatgagataaccgttgccgcagcagcgaccaatagaccaatcataatcggccagccgc

SEQ ID NO: 64937 - DNA, 648 bp, Homo sapiens
acggcaaagggaagagaaagttgcccgcatgggcgggtaactaccttacagcccccgccatccatgccgataactcccgtagctctttttcctgttccgggaagtcaaccaacagcgcttcgcactcctgttgcagcatatctgcgcggtacaggcagccttgcagtcgtccggcgagggcttccagcggcgcggggttgaggctgtcggtaaacacctgggcgcgggtgatatggcctttttcaacgtcgaaatgcagttccacgccgccccaggtaaagcgttcatccagcagatgcgagaatgccggagcctgaccgaagttccattcccagctactctggcgggcaaaggtttcggcgaagtttggcaagtctggcgttttgttcggggagatgatttccgcttccacgcgctcgccataatgggcgaaaaaggcctcggttatggcctcgcaaacctgctcatgggtgatccccggcaacagctcggtgaggttggtcacgcgggaacgtaccgacgtaatgcctttcgccgccagtttctttttatccggattgagatagttttccaggccaaggagattaacttggataaccacagggttttggcagtcaccacgatgtacaggtacggacatagaattcg

SEQ ID NO: 64938 - DNA, 417 bp, Homo sapiens
  misc_feature (1)...(417): n = a,t,c or g
tggcagaccaggaaaactgtctcaactttcaggggctgcgctgcgatgtttgttatcgcgaatgcccgaaaattgatgaggccatcaccctggagctggagcgcaacacgcgtaccggtaagcacgcccgctttctgccgacggttcacagcgacgcctgtaccggttgcggtaagtgcgaaaaagtatgcgtgctggaacaaccggcaatcaaggtgttaccgctgtcactggcgaaaggggagttaggtcaccattaccgcttcggctggctggaggggaacaatggcaaatcgtaaacgtgacgccgggcgcgaggcgctggagaaaaaaggctggtggcgcagtcaccgttggctggtgttacgtcgcctttgtcagttcttcgtgctgnggatgtttttgagcggtccatgg

SEQ ID NO: 64939 - DNA, 380 bp, Homo sapiens
atggtaccgcattattaccatgtacgaagaccagcagcctgataactggcgcgtacaggcgatactgtatgcatgagtgtcatctacagcaaatgaacaatgccggatgcggcgcgagcgccttgtccggcctacaattttcacatatttcatttagttaatcgaaaccagcgtcgcatcagtcgtatacgcttacacacacactccccccgtcgcccgcagcaataaatcattctggatctgctctgacaaccgtacgccgccgcgcgtatctaacatcacctgacaccacgcctgcgccattggcggagaagcatatttcaacatttgcgcaccgcagcccagcaggaatagctgatgagtaatctctcgctccactt

SEQ ID NO: 64940 - DNA, 595 bp, Homo sapiens
ccgcttcgacgatttcgtacgttgccgatgctaaagatgcggactacttgatcaaacgtcatttccgtctatcgccgcgtattttacaggggcaggcactgcgcgatctggcaaattcagccatcgatctctctgacggtttgatttccgatctcgggcatatcgtgaaagccagcgactgcggcgcacgtattgacctggcattgctgccgttttctgatgcgctttctcgccatgttgaaccggaacaggcgctgcgctgggcgctctctggcggtgaagattacgagttgtgtttcactgtgccggaactgaaccgtggcgcgctggatgtggctctcggacacctgggcgtaccgtttacctgtatcgggcaaatgaccgccgatatcgaagggctttgttttattcgtgacggcgaacctgttacattagactggaaaggatatgaccattttgccacgccataaagatgtcgcgaaaagtcgcctgaagatgagtaatccgtggcatctacttgctgtcggattcggaagtggattaagcccgatcgttcctgggacgatgggctcgcacgatatcgtcgacccgggaa

SEQ ID NO: 64941 - DNA, 646 bp, Homo sapiens
caaaaaaatcatccatccggctggtcagcaactgtagttgttaatgtgacagagccattgcccatgatagtgtccattaaaaggatggacactatttccccggaacctcaactcgccgcacaggcgttctacatagatcgcttccgtttcattgttgactagaactggacatcagataaatcgcgctttacccttgatggagcctgtacataggtggtgtgtaattgcctgcttgggatatgttcatttcaccatcaaatgaaggttaaattatggacgacaaacaattgcaggctcaggctgcgttcagcaaagcatcgcaaccggcgatagatgcttcattaaatttaagattcagcttcctcttcagccacccgtacgccaatcttcaacacttcattatcttctttctcggccaccgtccagatcatcccggcaaactctacctggtcaccgacaaccggtgccgcgcctaacaactgctggacaatttcacccagcgtttgctgcttatcacgatattctcgcccgtcttccaggccatatatcagcgcaacatcagcatatttggcgctggcttcgagaatgaagtcaccaaagaagcgttgatccagcgcgaccggcggcgactggctgaacagtttac

SEQ ID NO: 64942 - DNA, 586 bp, Homo sapiens
aacgacaggttctctgacttaacgccagaaacgctggttacgcgcaataaagcgcagctaaaagcgttctgggagaaacacagcgacatcattcttaagccgctggacggtatgggcggcgcgtcgattttccgcgtgaaagaaggcgatccaaacctcggcgtgattgccgaaaccctgactgagcatggcactcgctactgcatggcgcaaaattacctgccagccattaaagatggcgacaaacgcgtgctggtggtggatggcgagccggtaccgtactgcctggcgcgtattccgcaggggggcgaaacccgtggcaatctggctgccggtggtcgcggtgaacctcgtccgctgacggaaagtgactggaaaatcgcccgtcagatcgggccgacgctgaaagaaaaagggctgatttttgttggtctggatatcatcggcgaccgtctgactgaaattaacgtcaccagcccaacctgtattcgtgagattgaagcagagtttccggtgtcgatcaccggaatgttaatggatgccatcgaagcacgtttacagcagcagtaacccaccttagcgagaa

SEQ ID NO: 64943 - DNA, 808 bp, Homo sapiens
catgttatcggagacctgccaacgtatggttatcgtcgggtatgggcgttgcttcgcagccagccagaacttgatggtatgcctgcgatcaatgccaaacgtgtttaccggatcatgcgccagaatgcgctgttgcttgagcgaaaacctgctgtaccgccatcgaaacgggcacatacaggcagagtggccgtgaaagaaagcaatcagcgatggtgctctgacgggttcgagttctgctgtgataacggagagagactgcgtgtcacgttcgcgctggactgctgtgatcgtgaggcactgcactgggcggtcactaccggcggcttcaacagtgaaacagtacaggacgtcatgctgggagcggtggaacgccgcttcggcaacgatcttccgtcgtctccagtggagtggctgacggataatggttcatgctaccgggctaatgaaacacgccagttcgcccggatgttgggacttgaaccgaagaacacggcggtgcggagtccggagagtaacggaatagcagagagcttcgtgaaaacgataaagcgtgactacatcagtatcatgcccaaaccagacgggttaacggcagcaaagaaccttgcagaggcgttcgagcattataacgaatggcatccgcatagtgcgctgggttatcgctcgccacgggaatatctgcggcagcgggcttgtaatgggttaagtgataacagatgtctggaaatataggggcaaatccaataaacaattggaatttacttccattgatctgtttactcagtggttgtcacgttttcgagga

SEQ ID NO: 64944 - DNA, 384 bp, Homo sapiens
gagatggaaaaactaacagctgacattgttgcctggcggcggccctcacaaactccagatgatgagctacctgttcggtgagtgaggttttacgaggctcatattgcgctgctgcaactttccagaacgacataatgacttccttttcaaaatgactgcaaattatgagtgcggtttagaaaatactcataatttagcaggcgttatgtaagaaagtgtaactctgtataagttttatttaagtttgggctcgtaaggtaaacgtgacagattgaccgaagccaaacggtgggcaataagccgctcgcgaaaccagctgcgcaaatgttcaggctgttcacgttcaaccgcttcagcgatcaccggcatattgtagcgttcttt

SEQ ID NO: 64945 - DNA, 1542 bp, Homo sapiens
tttcgtgtggactggggccggataatggcgggcgctgcagaagatgcgcgagctcttttccgggctggggtctgcgcggccctggaggcctggccggccttgcagatcgctgtggagaatggcttcgggggtgtgcacagccaggagaaggccaagtggctggggggtgcagtggaggattacttcatgcgcaatgctgacttggagctagatgaggtggaagacttccttggagagctgttgaccaacgagtttgatacagttgtggaagacgggagtctgccccaggtgagccagcaactgcagaccatgttccaccacttccagaggggtgatggggctgctctgagggagatggcctcctgcatcactcagagaaaatgcaaggtcacagccactgcacttaagacagctagagagactgatgaggatgaagatgatgtggacagtgtggaagagatggaggtcacagctacgaatgatggggctgctacagatggggtctgcccccagcctgaaccctctgatccagacgctcagactattaaggaagaggatatagtggaagatggctggaccattgtccggagaaaaaaatgagtggggatgattggaaatggctttgggcccttatttgctgttctaagagttgtctgtaggggtttttttttttgaggattgaagacctgtgggacttggttaccccatctccaccctctcccctgttcctctgtctggctccctccagggcaaggaaaacctagggtccttggtcttgggggtggggggaccttttccagcatattcccctgggcctttagttaacatccgagtgacgaagccgggttccccagtacagtgtcttttgggtgcggtcattgtgaggaaggggatgagtgagtgtgggtgtggctggaggaggagctagatgccggtggacagtgggcaggtggatttggggaggagaggatcagcagcagcagcagtactcagtgatagggggctggctgggtcaggaatggtgagatgaacatgcaagtggaagagagaatagttgaaaatgtgaatgaaagtagctctggagcctctcccttaccccaccccacacacacgcaacagctctgtacccctgcccagaacttggaacctcccaggaatgctgccttccttcagcccagcctccagtcctgggttccctcaggaattcgaagaccttggctaggtggtgagcttggaagagctgggctttgttttctgtctcctctaacctctttccttactccttatcccatcccatttgagttcaggggtgaggcttaagatcttaataaataataccttactgcttaatctgtggcttgacctgtgagtagtagccttagaatcagccttctgggagctcagcttcagagtttacaagggagcagtttctgggcccaccctagcagcctgggtactttggacaaccaaacagatgaacgaacggagcacagcagtgctatgaaagttactgtaagcctgaaaataaactggtatttttct

SEQ ID NO: 64946 - DNA, 1072 bp, Homo sapiens
  misc_feature (1)...(1072): n = a,t,c or g
ggtggaattcctgcgtactacggcttcttccagtcacctcggcccggatcgggaagtgtcaagcgggcgctcccccatctccgccgctattaccactgaacccggaccccctacccaggtccagggccagccgccatgacgaacgtgtactccttggatgggattctggtgtttggtttgctctttgtttgcacctgtgcctacttcaagaaagtacctcgtctcaaaacctggctgctatcagagaagaagggtgtttggggtgtgttttacaaagccgctgtgattggaaccaggctgcatgctgctgtggcaattgcttgtgttgtaatggccttttacgtcctgtttataaaatgaattccaaagcacccaagtcatcaactgccaaccaaggggacggggatgaagaacctgttggagacctgaacccagtgtaggagagttcagctgaaatcatcggtccccaggatgacaccacagcatctgcccctgctatatgtggggaaaactcatggtcacgaacattatttatgcttcaggggactacagaaagccagcttcctttgatctatgtgtaaatcagtccttggcagagtgcatataatgtccggataaattacacccctcggtgataagattacatacctccttcataaaaacctgtcatcctgttttgttcttcagctcctcatcaggatcttttcaaactgaggctcattagggaaggaactaggctgtgttcagacttcttttgaagagagagaattttcaagacttcttttcactctttgatttggatctggcaaattggggaggggatgctgggtgggaaacagttatgaaaatgccaaagaaaattctttggctttagaaaattttatcctttcatggtaacccatccggggaaccttaaaagagagggcatagtgcttcattggcaaaaagaggaacagatgaagtagctgtgtttatgtggctgggtatctttgagagtttttgcccaaggaaantctggggcctacataaatttggggatttttccgtgtggtggggacccggaaggcgtggc

SEQ ID NO: 64947 - DNA, 5493 bp, Homo sapiens
atttttatattatttatttattctttgttagtttttggagtgtgggttttgttttgttttttgaattttttattttgttctactcggttttattcttattgctcaggcttgagtgcactggcctcttctcagctcaacctccgcctcttgggttcgggtaatgatggttccacgtcagcggccctccgcctcttgggtttgcgtgacggttccacgtcaccgaccctccgcctcttgggttcgggtgatgatggttccacgtcagcggccctccgcctcttgggtttgcgtgacggttccacatcaccgaccctccgcctcttgggttcgggtgatgatggttccacgtcagcggccctccgcctcttgggtttgcgtgacggttccacgtcaccgaccctccgcctcttgggttcgggaggtggttccatctcagccgccctctgcctcttgggtttgcgtggtttttctgcctcagcctcctgagtagctaagggaggtgtcttgagattatcatcggctgagggtggaaggggagtgagcagacacacttgggaggtgtcttgagattatcatccgctgagggtggagctgagggtggaaggggagtgagcagacacactcgggaggtgtcttgagattatcatccgctgagggtggagctgagggtggaaggggagtgagcagacactccgcaggtgtcttgagattatcatctgctgagggtagagctgagggtggaaggggagtgagcagacactcggaaggtgtcttgagattatcatccgctgagggtggaagcggcccccgcagacgctcagcaggtgtcttgatattatcatctgctgagggtggagctgagggtggaaggggagtgagctgacgctcggaaggtgtcttgagattatcatccgctgagggtggaagcggcccccgcagacgctccccgcagacgctcggcaggtgtcttgatattatcatctgctgagggtggagctgagtgtggaaggggagtgagctgacgctcggaaggtgtcttgagattatcatccgctgagggtggaagcggcccccgcagacgctcggcaggtgtcttgatattatcatctgctgagggtggagctgagggtggaaggggagtgagctgacgctcggaaggtgtcttgagattatcatccgctgagggtggaagcggcccccgcagacgctcggcaggtgtcttgatattatcatctgctgagggtggagctgagggtggaaggggagtgagctgatgctcggaaggtgtcttgagattatcatccgctgagggtggaagcggcccccgcagacgctcggcaggtgtcttgatattatcatctgctgagggtggagctgagggtggaaggggagtgagctgacgctcggaaggtgtcttgagattatcatcggctgatggtggaagcggaatccgcagacgctcagcaggtatcttgatattatcatctgctgagggtggagctgagggtggaaggggagtgagctgacgctcggaaggtgtcttgagattatcatccgctgagggtggaaggcaggtgtcttgatgttatcatctgctgagggtggagctgagggtggaaggggagtgagctgacgctcggaaggtgtcttgagattatcatccgctgagggtggaaggggagtgagcagacacactcgggaggtgtcttgagattatcatccactgagggtggagctgagggtggaaggggagtgaacagacactcgggaggtgtcttgagattatcatccgctgagggtggaaggggatagagcagacactccgcaggtgtcttgagattatcatccgctgagggtagagctgagggtggaaggggagtgagcagacactcgggaggtgtcttgagattatcatccgctgagggtggaaggggatagagcagacgctcggaaggtgtcttgatattatcatctgctgagggtggagctgagggtggaaggggagtgagctgacgctcggaaggtgtcttgagattatcatccgctgagggtggaaggggagtgagcagacacactcgggaggtgtcttgagattatcatccgctgagggtggagctgagggtggaaggggatagagcagacgctcggaaggtgtcttgagattatcatccgctgagggtggaaggggatggagcagagtactcggcacgtgtcttgagattatcatccgctgagggtggggctgggggtggagctgagggtggaaggggagtgagcagacactcgggaggtgtcttgagattatcatccgctgagggtggaaggggagtgagcagacactcgggaggtgtcttgagattatcatccgctgagggtggaaggggagtgagcagacactcaggaggtgtcttgagattatcatccgctgagggtggaaggggagtgagcacacactcgggaggtgtcttgagattatcatccgctgagggtggaaggggagtgagcacacactcgggaggtgtcttgaggctcagggagttatcagttatagaatgttgttgagttggaggaggtggctggtggcccatcctgttttttaaagtttcagctgtgaggtagggccagtagggcaatcctgaagaatgacgatgctccgctgccgccattctgacccagttgcaaagagcctttcttgcagaaggggggattttgcatttgtggtagtcctctgctcgccgccgcaactcttgcgcacgttgaaacattttctgttttctggcggtcttcctctttccattgattttgtcatgacggttgattttcgttgtcaccttcctcttacggattttagctctaacttttgtttccacatgtctccgtagagtaatgacgtctttcaggccaattttatttcctcgaaaggaagaaactcttttctttgtgtgcatacaaatggacctcagcccttcctgtctacggcggttggacctccaggctctctgctgtacatccgtggatccatcatgtccatttcgagaccagaagatagtcttcaggagagacacccaaaggtaaactatccagagggtaatgacaactttataacttgtcggaaacgcaataatgacatgtaaccaaggacttccaccaaagtcagtcccacgatgatgatggtcagccagagtattgataaccttcctcaggtactcgcatgggcatgtcactgactttacatgctgctgcagctccttggtgagctggccctggtcatgggacaggaactgtggggtcaggacaatagagagcttcaccatttgcagaatgagaacaggggctcatgatgagtgccaacctcagttttcttctgtgtgaaacaggaacaatagtttcattcgtcattcagtttctctcaagatttcacgagatcatacctttaattttctccaacaactgattctggtacacagtataccttaatgcctgcatccacggcctcacgtcatgctgtttacatgaacgtaaagcttcgccgaagagtggaataagacagtcctctgttgaaagtctgttagaaactgtggtctccaaagcagacgagcaatacagctgcaaggtacttagaactggcaaagactgtgaaactgttaaagtagaaagtctcagaggtccaatagcgatgcgggatgtttgcttcaagtactttaccacattttcagttatagactgccacttctgatcttgttctatcgggtttaaagcagttgccaaacaaacagaacttcttaacaatggaacttcaatggatttctgaggttcccttggatctggacttcacatgttacgaagcagttttttcatgtctattttttcttttgatcctccagcaagtagattgatattttctcctggtaacaattctaattgctcggtacattcgacaaattttccagactcaaagctgcttaatgattttatatagttgaagtcagctttcaggttgagggaagtgctactggtactctttttcaagtcatggatagcgttctgccattcctgcacagcagcccaatcggcagttgagatgtagcactcacatgctttgtttcctaaataatttataacctcaggggaagagtcagtcggtttggacagcacactttttctggattcaccattcagacaatgtttcaggctggcactcttacacccagcactggctaaggtgagcaccgatttgtcaaagctggagatgcagcaatcaacacctgtcatggcacacaggtgttcctggtactccacagaggccttttcaaacctcccttcagcctgttgagccactgagttaatccacagaagatgttttccaacaatagatgatgaccagacagcaattccctgtatagcttcaggacaatgaagttcacatagtgcttctaccaccatcataatgcttacttccaattcattcccctgagataggctggttgttttcatctctgtaagcaagtcaaagccatgtctcactgtcactgcaggctggcctgccaacaatcctaccctcatgatggagagtcgaatccgcgttagccagtcctgacaagtttggcgattggtatacaaaaaagttctaatgaccttgggaggtgaagttaaggcattagcacatccctcgtatgcattatacattaatttctccagattttccagatactgcagaagaagaacaagtctaagttggttgttaccatggccttcatcactgtctgcagttgtccactgactaacatcctgatcagggtttaatgtgtgacctgcgagacttcgaatgataccttcaattgtctggaaggtgtcttgagctctgcccagtggggttctcagcttagaaagaacagtgaattgtgcagcttcccatatggcccactgccaaaggatagcatctgtcttcaggagattgcgtggaattgttgactggtcacgcttatccagtctctggcagctatagaacagtctttccaaccaattgtccttccctgttctatgagagttcccatacaaaataaaactaataacatcagagaaatcttgggggtggaatgtattacttggtgctttactcatgtgacttcttaatgctaaagaaatttcttgaatttctgtgtgattgttatcgcttaggaaaacacctaaaggaattgatttcaacagttttccaaatgcttgtcgaatacaagttccacggtgcactagttggacacggcaaacatcaacacatctctgtaaaagatcatctggcaaggaagaggatagagcatgtagactgctgcatgcctgcagacagatattcacatcttcaacgagagtgtcggctaaaaggcctttgcaaaatttatggaaagacggaagacagaataaaggtgcatatgtttcggacttcttcattacaacagctacttccaaagcccaagtcattaacagtttcctcgtgtcctg

SEQ ID NO: 64948 - DNA, 989 bp, Homo sapiens
tttttttttttatctttctgttctctgttcattgaacattggtttttaaggttccaaacctactaaatgaaaagtggaatgaatggtacttgtagcttggatttaactcaattttgaatattgtcaatctagtacaatttcttaaatttagcttaagatatctgcaaagccaacaatgtttctaagacaagatgaggttacgggcttcaatcaataagaaaaataaaaaagcaattaatttattatttggaacccaccaggtcattatgcattaatttttaaatactgcaacttcatgttttatagaaactagaaacatgattcaaaatgtcacaaagttatattaaattaaaaccactttagacaattcaaggtctcactgaccaaagtccattaaggtgacagttttgctgttttgttactggttcccacatgatatcatctcttctcaatttcatttgaagattatgaactcgtattggatgaaagctgctgtttttctgaaaaaggttagtgtcagtcaaacattttctggggctattttttatgttctttgatcctttagggtagctgtcttcttgctgaatacctgaagcttcactcatctttgagttttgaactttttgctgcagtttacagacactgtcttgatgcttcttcagtttggagatttgttctcctttaatttccattttcttgagtaaacactctagttcacattctatgtcgtcacagactgaatgactttcagtttccttcatttgtttcagtagttcttggtgctccatgctcatttggtccagctcatcttgcattgccatcaaaagttcagataaattgtcacaaatggaaatggacttttctgagtcaggaggaatagctttacaccaggaagttgttctagaaggcttggggagacatctagtctcagtcacgttaaaaggtttctgaaggatatgtgggtcacgatgttgcctcatctgcaaaaa

SEQ ID NO: 64949 - DNA, 322 bp, Homo sapiens
ctacatggtccctctcatgagtctctgtgccagaggttggtgggggaagggagaaaggaaaggagggagaggatgtcactgtcctcaaaccgagcttctctgctccatgctatcctgggggcttcaggtgaatggctgcgctgttggggcgagcagccaggatgtagaggacattctcttgcaggaaggtaggccagtccacaaatctggactcctgctctgtgggcagcagggtcttgtcctgactcttgctgctgctgctggctgggctgctatctgcgatgggacccacatggctgatgctgacacgaaatcgtcgacc

SEQ ID NO: 64950 - DNA, 1825 bp, Homo sapiens
ctcttttattcccttttcgacgatttcgcgggacatgacagctttaacccatgactcaaagtctcagggaataatacacagtgttgaaatgcctctcttgcctaccaggtctcaagtttgacatgaaatacatgaacttccgtgtgaaggcctgtcacaaggcagttgcaggagagttctctgagccggtgactctggagacaccaggtgactggaatcccagcactttgggaggccgaggcgggtggatcacttgaggtcaggagttcaagaccagcctggccaacatggagaaaccctgtctctactaaaaatataaaaaattagccgggccatggtggctcacgactgtaatcccagctactcaggaggctgaggcaggagaatcgcttgaaccagggagtcggaggttgcagtgagccaagatcgtgccactgcactccagcctgggtgacaagagcaagactctgtctctaaaaaaaaaaaagtctcccccctgccaaacatggaacccctttgtggccatgcccccaaaattgtccaacatgtggttgggcagccctgcaggaagccccctgccccctgaaccaggcacagaatcccgaccccctctcctttccgtcttggtcagggcccagcgcacccgggatcgacctggctgagtccctggtggcagataactgtgtgaccctggtgtggcgcatgccggatgaggacagcaagattgaccactacgtgctggagtaccggcggaccaacttcgagggcccgccccgcctcaaggaggaccagccctggatggtcatcgagggcatccggcagacagagtacaccctgacaggtctcaagtttgacatgaaatacatgaacttccgtgtgaaggcctgtaacaaggcagttgcaggagagttctctgagccggtgactctggagacaccagcgttcatgttccgcctggatgcgtccacatcccaccagaacctgcgggtggatgatctctccgtggagtgggacgctatgggcgggaaggtgcaggatatcaaggctcgcgagaaagatggcaaggggcggacggcgtctcccatcaactccccagccagaggtactccatctcccaagaggatgccctcaggtcgtgggggacgggaccgcttcaccgctgagtcctacacagttctgggggacacgctgatcgacggcggggagcattactgggaggtgcgctacgagccggacagcaaggcgttcggcgtgggcgtggcctaccgcagcctgggccgcttcgagcaactgggcaagacggccgcctcctggtgcctgcacgtcaacaattggctgcaggtcagcttcacggccaagcacgccaacaaggtcaaggtgctggacgcccccgtgcccgactgcctgggtgtgcactgtgacttccaccaaggcctcctgtccttctacaatgcccgcaccaaacaagtgctgcacactttcaagaccaggttcacacagccgctgctgcctgctttcacggtatggtgtggcagcttccaggtgacgacaggcctgcaggtccccagtgctgtgcgctgcctgcaaaagcgaggcagtgctaccagcagctccaacaccagcctcacctaggcccccaggcacccacccagctggggtgtttttgggggagtcgccgccaagcccaggctgctggagccaggcaccctcctctgtcacttgctgcttggagccttaactccagatgggggggtcaccaagagggagtgggcaccctggcgggccctctccccacctcacctcttaataaaggtcagacactggc

SEQ ID NO: 64951 - DNA, 2802 bp, Homo sapiens
gcggccgcgggcgggaggtgcttcccaaggaccgtagatgcctctctagagcatgagctcaggcaagagtgcccgctacaaccgcttctccggggggcccagcaatcttcccaccccagacgtcaccacagggaccagaatggaaacgaccttcggacccgccttttcagccgtcaccaccatcacaaaagctgacgggaccagcacctacaagcagcactgcaggacaccctcctcctccagcacccttgcctactccccgcgggacgaggaggacagcatgccccccatcagcactccccgccgctccgactccgccatctctgtccgctcccttgcactcagagtccagcatgtctctgcgctccacattctcactgcccgaggaggaggaggagccggagccactggtgtttgcggagcagccctcggtgaagctgtgctgacagctctgctgcagcgtcttcaaagaccccgtgatcaccacgtgtgggcacacgttctgtatgagatgcgccttgaagtcatagaagggcgccgtggacaacgtcaaactgaccgcggaggtgaacaacatcacggtggccgagcagatcggggagctcttcatccactgccggcatggctgccgggtagcgggcagcgggaagccccccatctttgaggtggacccccgagggtgccccttcaccatcaagctcagcgcccggaaggaccacgagggcagctgtgactacaggcctgtgcggtgtcccaacaaccccagctgccccccgctgctcaggatgaacctggaggcccacctcaaggagtgcgagcacatcaaatgcccccactccaagtacgggtgcacgttcatcgggaaccaggacacttacgagacccacctggagacttgccgcttcgagggcctgaaggagtttctgcagcagacggatgaccgcttccacgagatgcacgtggctctggcccagaaggaccaggagatcgccttcctgcgctccatgctgggaaagctctcggagaagatcgaccagctagagaagagcctggagctcaagtttgacgtcctgggacgaaaaccagagcaagctcagcgacggacctcatggagttccggcgggacgcatccatgttaaatgacgagctgtcccacatcaacgcgcggctgaacatgggcatcctaggctcctacgaccctcagcagatcttcaagtgcaaagggacctttgtgggccaccagggccctgtgtggtgtctctgcgtctactccatgggtgacctgctcttcagtggctcctctgacaagaccatcaaggtgtgggacacatgtaccacctacaagtgtcagaagacactggagggccatgatggcatcgtgctggctctctgcatccaggggtgcaaactctacagcggctctgcagactgcaccatcattgtgtgggacatccagaacctgcagaaggtgaacaccatccgggcccatgacaacccggtgtgcacgctggtctcctcacacaacgtgctcttcagcggctccctgaaggccatcaaggtctgggacatcgtgggcactgagctgaagttgaagaaggagctcacaggcctcaaccactgggtgcgggccctggtggctgcccagagctacctgtacagcggctcctaccagacaatcaagatctgggacatccgaacccttgactgcatccacgtcctgcagacgtctggtggcagcgtctactccattgctgtgacaaatcaccacattgtctgtggcacctacgagaacctcatccacgtgtgggacattgagtccaaggagcaggtgcggaccctcacgggccacgtgggcaccgtgtatgccctggcggtcatctcgacgccagaccagaccaaagtcttcagtgcatcctacgaccggtccctcagggtctggagtatggacaacatgatctgcacgcagaccctgctgcgtcaccagggcagtgtcaccgcgctggctgtgtcccggggccgactcttctcaggggctgtggatagcactgtgaaggtttggacttgctaacaggatccaggccaggctgtggtttcccctgaaccagccctggacctttctgagccaggctggccacatggggtggtctcggggtttctgcctgccccgtgggcataggtggacaggctctggcagccgggcagtgccctccccgtcccatgctcggcgagcctccctctactcggcactgtccttgctgcccagcccctctctgggtgccaggtacgacgcttgccccggcccaccctccatccccaccctccatccccaccctagatggagcgagggcctttttactcaccttttctaccgtttttagactgtatgtagatttggttacctcctggttgaaataaatgctccacagactgtggctgtgagtggggacagctcctcgggacaagggggctgtgtgtggccttgaggttggtgtgcacaggcactggctgctgtgagtgggggggcatggggcagtttcctttggtggaccccaggacttcggcccactccggggcctcccctccctgctaggaggcaactcgacacacccaagctgctggcctccagtcccatctcccccaacacattgtgccccaaaaaagtgagccaggcacctctgtttcctgctgtttattgacagccgacggagacgccttgcccagacctcccctgcccacctgctggagcccagcctgtgccgccctctgaggagaggcctggggggacagctgggcacgtccact

SEQ ID NO: 64952 - DNA, 1833 bp, Homo sapiens
gcggccgccccctcgcccgtcacgcacggcgtttacagactctcctgcggcaggcggtggaactacaaagggatcggtgcctatatcacaataccaaacttgataataatctagattctgtgtctctgcttatagaccatgtttgtagtaggaggcagttcccatgttatacgcagcagatacttacggagcattgtaatgaagtgtggttctgtaaattctctaatgatggcactaaactagcaacaggatcaaaagatacaacagttatcatatggcaagttgatccggatacacacctgctaaaactgcttaaaacattagaaggacatgcttatggcgtttcttatattgcatggagtccagatgacaactatcttgttgcttgtggcccagatgactgctctgagctttggctttggaatgtacaaacaggagaactaaggacaaaaatgagccagtctcatgaagacagtttgacaagtgtggcttggaatccagatgggaagcgctttgtgactggaggtcagcgtgggcagttctatcagtgtgacttagatggtaatctccttgactcctgggaaggggtaagagtgcaatgcctttggtgcttgagtgatggaaagactgttctggcatcagatacacaccagcgaattcggggctataacttcgaggaccttacagataggaacatagtacaagaagatcatcctattatgtcttttactatttcaaaaaatggccgattagctttgttaaatgtagcaactcagggagttcatttatgggacttgcaagacagagttttagtaagaaagtatcaaggtgttacacaagggttttatacaattcattcatgttttggaggccataatgaagacttcatcgctagtggcagtgaagatcacaaggtttacatctggcacaaacgtagtgaactgccaattgcggagctgacagggcacacacgtacagtaaactgtgtgagctggaacccacagattccatccatgatggccagcgcctcagatgatggcactgttagaatatggggaccagcaccttttatagaccaccagaatattgaagaggaatgcagtagcatggatagttgatggtgaatttggagcagacgacttctgtttaacttaaaattagtcgtattttaatggcttgggatttggtgcaaacaaacatgattgatagctggacagacatgctcgtcatgaaaaaagaaccatttctgaagcccgattggggccaaacatttacaccttgcttcatagtaaccagttgagatgaagcacgtcgttagaacgttgttggacaccatgttgaattattcccccatcggttgtgaagaactgtgctacattcaggcttacccattgaactcagtatatatatttttttccttcctgtcttttgtctggcaggataccattcttgttgctcttctgtgtaatgaagtttaaatgcttgtttggaaaactttatttaacagtttagaaggcttgatagaaagagtgcattagtctgaagagtatacattggataggaaagaatttccttcttttgtttctccaaatctttccgccttatttagcttgagatctttgcagcttggttcatggattctagccttgcccgttgcgcagtatatactgatccagatgataaaccagtgaactatgtcaaaagcactctcaaatattacattttggacaaaaagttttgtacttttcacatagcttgttgccccgtaaaaaggggtaacagcacaattttttaaaaataaattaagaagtatttataggattaaaaaaaaaa

SEQ ID NO: 64953 - DNA, 1251 bp, Homo sapiens; identical to SEQ ID NO: 63981

SEQ ID NO: 64954 - DNA, 1553 bp, Homo sapiens
ttttttttttttaagtttgaagccttgcccaagctttaatgtcatgctaaccagttaccttgttagagctgggaagccaccttttgctcaaaatgcagacttctgcctttgaaaacacaccacacctgattttaagtgcttaaaggacagaaaatgtcgttgctttaaattgttgctttgttcagagacatctggatttgctgtatccatacaagcaaaagcttttccaattccagaatcaacccacactaatttgttattgcctcgtactgtattggcccagctgtaatcaactcagcaggcttttggttgtaaattcaagtggaaattgagttggtcttatttgtgcccgttgatatctgagggctgtgaggaagatggccagtaggtcaaagggaatagtgttgaaaagctgaccagtactgggcaggtggccggctgtccctcaggcaccacaacgccgagccacggtaaggggcatgagccacatttgcagaatatagccagagtccttccagaacctcctgattcgcgccaggaggcatcccagggcacacaagtgtcaagggcctactcaggtgcttggcagagctctctgtgtgttattaacagaagaggctacggcttagagtggaaaggagcatgtgatggctagcggtgggcagcctgtgtactctgccaagtttgggtggtccaggtccccacgatttctgtgtggagggttgtccggcatctggccactaggggggccggtggttctcacacacacgcagcggggctccttagcacctggcttatacagcttcctggggacgccaatccagtctctgctcacacctccactcttctgggagcaccagagccggctgcccctggctgagctccactccgcgttgcacggcgggaatgtctgcttctcttgcagctgtagtttgttggcctccaagcctctggtgatcgcagcttctacctgggtcagtgccggggtgggcagcccatcctctccgtagaaccgtcctgtcaccctcccaacacacacataattcttctcatagaatgaaagccaattgtgaagtgtcagcatctcagcggctgacaggtcggatacgtcatccacgaggcctgcttcagaacagtccccggtcacgaaagctctggatgcgtctcggcctgcgaagccgctatagtgggacccaggctcgtagtgcctccggccggaggacacatcgtagacacggccgagcaacgccaagtacaggcccgggtcccctgggccgccgcggtagcgagacagctcctccggtatgaaaaggcgaaagccagcgcggggaccccaccagcccataagccgtgctgccattaccgctgctgcggctacagccaggcccaacaaaagcccacggcctccgcacctcaacatctatataggcccacccgctccgcacttccgaggttgccgcctctatctacagctaagatggccgagacgccgagcgtgacgtcatcggcgcgcgcgctctcgctctctctctcgcgcgctagtgctcgcgctc

SEQ ID NO: 64955 - DNA, 1515 bp, Homo sapiens
gcaaagcgcaaaaagataaatcagaattcaagtaaagagaagattaataatggacaagaagtcaaaatcgatcagagaaatgttaaaaaagagttcactagccatgctttagattctcatatcttagattattatgaaaatccagccatcaaagaggatgtatcaacattaataggtgatgatttggcatcttgcaaagatgagactgatgaaagctcaaaagaagaaactgagcctcaagtgctgaagtttagagtcacatgcaacagggcaggagagaaacattgctttacctcaaatgaggctgcaagagattttgggggtgctgttcaagattattttaagtggaaggccgacatgaccaactttgatgtggaggttcttttgaacatccatgataatgaagtcattgtgggcattgcattgactgaagagagtctccaccgaagaaatataacacattttggacctacaactcttagatcaactcttgcctatgggatgctcaggctctgtgatcctctaccttatgatataatagtcgatccaatgtgtggaactggggcaataccaatagagggggccactgaatggtctgactgcttccatattgctggtgataataatccactggctgtgaatagagcagcaaataacattgcatctttattgaccaagagccaaattaaagaaggcaaaccctcctggggcttgcccatagatgctgttcagtgggatatctgcaatctgccattgagaactggctctgtggatattattgtaacagatttgccatttggaaaaaggatgggatccaagaagagaaactggaacctttatccagcttgcctacgggagatgagccgtgtctgcacacctaccacaggccgagctgtactacttactcaagacacaaaatgctttaccaaggcgttatctggaatgcgacacgtatggcgaaaggtggatacagtctgggtgaacgttggtggtcttcgtgctgcagtttacgttctgatacgtacacctcaagcttttgttcatccttcagaacaagacggagaaagaggaactctttggcaatgcaaagaatgaagatgactaatagtacttgtacttcccaccactggaaatgttagcataaaagaacttggagaggaaaaaagtattaacaaaactgcagtctgcactctttaaacctgtttaaggctcttcatcctggttagcaaaaggtgtgaatgtaatgtgatggaatttaaaagttttatgagaccaggcacagtggctcacgactgtaattccagcagtttaggaagccgaagtgtgcagatcacctgaggtccggagaccagcctggccaacatggtgaaaccctgtctctactagaaatacaaaaattagccaggtgtggtggcgggcgcctgtaatcccaactactcaggaggctgaggctagagaatcacttgaacccagcaggccggaggttgccggtgaagtcgagatcaccccattgca

SEQ ID NO: 64956 - DNA, 492 bp, Homo sapiens
ccgtggccctgcagagcactccctctctttttctagaggcaggaaacaggtccagagaggttcggtggctgtccagtagttttagtaggaagtaaggaagtaggaaggtagaagctgaatctaggtaggactgtgggctctcgagtgcgtcaacttaacaccattgcccatttcagcaccaactcccctgtccctccagatggtgtggtcctcgagggcagactaatcccatcaggccttttcaggcctggcctccctggcccaccctgcttagcacctgcggatctcaggggccagctgctccatgtcctggtggaagacgtagggagggttgctgacaatcaggtccatggggccccagggcaggtgtgtccagctcctttctgtcgtcaaagaagaggacacacagtagggactaacccattgggaggtaaaggatgatagctccacctgccaccatgtgcctctcaccatgccacaccttgggcctgc

SEQ ID NO: 64957 - DNA, 2081 bp, Homo sapiens
cgaccatgcttaccgattcactggccgtcgtgactggtgaaccatcaaaagagagtgatagaatctggcccagaccatttgaatgacaatgaatataccaagtttattcctcctaattatcacacacctccttatctcactggtgagccagaggtaacttaccaccgattaaggccacaggataagtttctggtgttggctactgatgggttgtgggagactatgcataggcaggatgtggttaggattgtgggtgagtacctaactggcatgcatcaccaacagccaatagctgttggtggctacaaggtgactctgggacagatgcatggccttttaacagaaaggagaaccaaaatgtcctcggtatttgaggatcagaacgcagcaacccatctcattcgccacgctgtgggcaacaacgagtttgggactgttgatcatgagcgcctctctaaaatgcttagtcttcctgaagagcttgctcgaatgtacagagatgacattacaatcattgtagttcagttcaattctcatgttgtaggggcgtatcaaaaccaagaatagtgagtggctctttcactggcaattctcaaatgatacacatttaaagggcagatttttttaaaaagatactactataataaacatttccagttggtcattctaagcatttacccttttgatactctagctagtcaggtactccaaattgactttgcagcagggtggcagggtcaggagagtctggtcctgcctagctcagatttcatggcacctgccacttgaagcaagtcacttctttatcacaggtgtcttgaaacattagcttcttttaccaacctgagaaaattaggatgacctggcaaataagatcttgaataggccaaaagcaagtatcttgctgtgtgtagtctcttggttaaagtgaagaaacagtactgttcacacctttcttcactgagattccagtgtacatgagaacatatatttattgcatgattttctagatacacagtctatgcattattcatatacatttattttagcctaaagtggttttcaaatccagttcttcaagccataaatgaccaagatccaagcaatctgaatttgtttttgtgattatttgactggaatgcttcttaagtggaataactatactccgttatccacccgatttcctaatgtaattgaaagattttctattttgccacacacttggagacaataagggtttttagttttatctactcttctattgaagttaaagaaaaaaaaaaagatttttttatttgtattaatgaaaagctttagtttaaaataaggagatccagaataaaaagaagagactgatctcttcaattattgtcatctgtagccaccagcacatcactcttatgtaatccccaaaggcttggcatgccgtaagtgtgtggtgggtagactgctgccggggaatcgtacttcttatttagtaatgataagacttttcattatttttggaattttaaagatgacataaataagtttaaatatcaatttggggagtaaggtttaatattgccatcgggtattgagacaggaggaagtttctgtttttctccatttagacataggtcaattaaaatatttgggtttaaaatgactaaatgctttaaacatattgtagcttaagatatatgtgttaagatatatacatgagaaactttaaaaggtaactactgtgcatgcctgatgcttaatagaatacttagtggcatcaaatgtttgcagcagtctccataattatattcagtcccttctaatactgtatcaatgtaaatgaaataaatatattcaaattggctttttgatatgcatcaagtggcattttgttcctgtgtttaatagtgatctgtatacagctgtgcacatattgtcatcacttattctagcatcactgttaaggctgtgattatgtttgatattcacctggattttaatacaagccaatatcagcttcccattgtgtaataacttgggtgtttaggagtcttttcacattttttggggatatgaactagatgttcaagaactcc

SEQ ID NO: 64958 - DNA, 3018 bp, Homo sapiens
aagctcacagcaaagagaagggtcctgaaagcaagttgccagttgcccccttcacagttgaatacaagggtgtaaggcacgaatttctggtggctccaccccatccttccagtgtgcctgtgggcccttagtctgagccactccatattaatttatatcccttgctgtgcatatgttacggaatggaattttccacgtggacatgtttaggcaatcccccctttgcaagttcccttatctgcacaaagcatctcatgctgtggagccagtggcaggttctccgggacccttcccttactgtctgcctaaagcaaactggctaaattctttcacaagtttttctttttcttttttttctttttctttctttttttttttccaatttgcattagaaagcttttattgagaccaggttaaccagtggcctgaaaatattacaggctgaaggaaggctgaggaaaccagtatgaaggcagctcaaatgatgaactaaatatattccaaaggtactatttatacttaaggcagttttaaaagtgaggtcttaaccaaaaagcctttacatggcattcaaaacaaaaacaaaaacaaaaaaaacacggggggggggggggcacttaaatctcttggattgactaaaagagctaaattatgtacccaaaatctgtacagcaggggcctgttttcagcaggaaagcctatgtacaagtaagaacctcttactcttgtaacattgtcctgttttgttttgtcttataagaatatataactcctatcctcacagagttagtccataaggcctcagtgacctcacagaaatatggagttaacctctactacagaactatttacactgcactgtaaatacacatatgtgtgtccaccctcacagctaagctgtcaatgccttgagtgaaggggttacagctcattcgttttgcatctacagtgacaatgaataggcactcaatacatacttttttttgcatgaatgataaatgaaatgattttacattaccaccactatttacattaacattcctaccattagccgtctccaaaataaaaacacaaaattgctgccacatgttcagcagttttcacaatacagtgtgtctggactttttaatgtaaacaaacatgcttgatttaccaattttcagagcaaggacacaaacttagcattcttctaggaatggaaaacttgccaggaagttacttcattctttttttttttttcaaaagtgcatctcgtagtgccaactgtttttctcggaaggaacgcttattttttgaccggacattctggctataccgcatcatcataaagttcttctgttttttcttctctttatttgtcgaactggaaaatggatttgttttggttttcttcctcacaaattcttttcggtctgtctttccagccattgcagttgctagtcttgtctctttgtcagactttggctttttatgaaggcgttcaatgtcccgaagagaaagtaattcacccctgggctcttcatcactgtctatttcaatgtatttcctcttctgggatttcccgggggcagcatcaagttcttttctcatttgggccatgcggattttctggaagtcttcctgagttaaaactcggctagtgctgatggctgcagctttggccttccgctcctccatgggcatgctgttcagcttcttggagatttcttgctgttcttcatcggaagagtgttgcacatcaatccattcaccatcagcatcctcctcctcactgagactggtactttcccatccatcttcatcattttcagcattctcttctttctcaacttccagaacttctgctcctggaatgtaatctttagcatctaattctccatattcttgtactcttgcttctatggaggcctctgtaggcttaccccggaatttcttctgcagcatctgaggattcagtgttcggaagaggtgaatcaaagttctagcagacatcattacattcttatccttgtgtgttttatactgagccaggtcttggagaagttcttcagtcatggccagaggacatcgagctgttatctcctttatagcattgattcctactgtcatgacttctccagagttcttgtcggtaacaaaattgtttgccacagtcataagcaatgattgaataatctctgggggtactaggtgatgagatgcttgtgcagcaaacagaaggatcttggttacttctctttggtggggctgcagaaacctttgcaaaaagggatagaaattgaagaggaaaagctcatgaattcccaccaatctggagataaggttcatgagcatcatcttcacttcaaacctctccttacagcactcaagctgctttagtagtttttccgcaaaatcttggggatcatgaatcaagtgaatggctgaaaagttaaacacctctggttttttcttcttcctgtgtttcttgagcactttcattgccttttccaactttttcttgtttttggaacttttcttccctgtagcatattgtactagcaggtctcttgctgttggtccatcatcctcagattcggagtcactgtcctgtttttcatcttcatctttcccaagaaagaatgtcaaagcggcaactaatatcttggtgaccttagagaaacatgcagttgtgataacattgacagtttttgcatcattccagatgttccttctgtagagttcaatcattacatctaaagacatcttggctgcggttgcattgctatctcttaacatggtgtacatgaaattttgcaatactacattcactttattgctcttgtgttttgcatttatattcttgatatcagtcacaatatgtgtgtataaagtctttcgcagaagtttatcatggcaacgaaaaagttcaaagaagagttctagcaggcttgatggattgatgagattcttatttctcagcaagatcaaagctttgcaaaatgtcattcgcagatctggatccgatacggtatgatt

SEQ ID NO: 64959 - DNA, 1428 bp, Homo sapiens
atttctgctacagtcatgcattctttaacatcttgtttattagcaaaaatcagcttttcaccaaggaagaaatacctttattaggagtctaggcatgtcagaaaaacccagttcagtcacagaaaaggaggcaaatattggtacagagcaagaatccaagtgtgaaaataaaacctccatctaaatatcctaacagaaatgctgctgaatttagcccaggtgaaacttctgaaagctcctggtgaaatgagatttttgcataaagagagagctctccagcactgctgcatctgagcttcttataaagtgacgggtcttggccagcagtagaggaagagataaaggggatgtctcatcacccaagcaaggtcgtctgtgttcaagtgagagaagaaccttagggttttggacagagtaaactggggcagcagagggaaaatggctgaggaaacacaacgtctagggccgtgtgtggcataatgtggaggggtctgtgcagtctggtgtgagtgcatctccaggaggtcttgggaaacactggcattccttcctgaggccattttggttctgttctgacttcattcagagcagaactgccaatgtccagcgccaagtcctggatcataattagctgagtggaatgcagtagccaccctatgactcccatacctcttcctttctggagcagtcacttttctcagaccaagtgagatcttacccagtaggggcccaatctagaaatcactcccaccttcatatgagcaccaggtggagagaatcattctcatgactcaaagctttagatctcgatcctcagatgatgttccttggacagaagatcagtctgaagttatctgtgtcaagagtagctggcactgcccatgggtaatgggcccaagcgatgtgatgccgcagctctcccaaagaagagctctctctgctttcacaggcaggagaggaggaaatgaggcaggcttcaaggtagtcaatgccacttaattcttccatcgaatttgcgagctgctgagaagagcatcaatcttctcctcctctgctgatcctttatctaccttactcctgtatgctagcaactgttgacgatccttcaggtcccggtaggtatcaatgacgacatcatggcacttgaacttagtggctaagttcaacttcgtgtccacatcttccaccagattgacatactcctgtaatatctgcacaggggcattgttcttgtgcaaaatttcgacaacccgatggaagccaatgggtgctctcttcttggtatagcccagccagttctttgtggtgaatagggcatctacatcattccaggctcgaagcttggcacgagcagccagggctgtcagcacatactgtttatctgggatcttaaatgtcttcttcaggttgacgggactgctgaatgcc

SEQ ID NO: 64960 - DNA, 397 bp, Homo sapiens
atgggcacatcaaacattacaacgaatgttgaaaagacaaaaagggggtataggaggccaactaccacctcaatcaaaactacatttagccttatttactttaaaatttttgactcctggtacggatggtaagactccagcagaaagacattggcaagtgttagaggaaaagaggaaagtttatctgaaagtgttacggaaatccccagaagaaggacaatggaaaggcccggtggatttactgacatggggaagagggtatgcttgtgtgtttacaggagattgacaagccatgtgggtgccctcaaggtgcttgcaaccctggaatgggagactggagaaacatggggtggccaaccatgggcccagtccctccggtatgagccatgagtcagct

SEQ ID NO: 64961 - DNA, 1255 bp, Homo sapiens
ggcaggcgaccatccgggtgaagtgtctgaccgctcagcagcagtcaggcgagcgtctctcagctttcgtgttgcggctggaagtgctgctgcagaaggccatggagaaggaggccctggccagagcatccgccgaccgcgtgcgcctgaggcagatgctcaccagggcccaccttactgagcctctggatgaagcactgaggaagctgagaatggccgggaggtctccaagtttcttggagatgctggggctcgttcgggagtctgaggcatgggaggccagtctagccaggagcgtgagagcccagacacaggaaggggccggtgcccgggctggtgcccaggctgttgccagagccagcactaaagtagaggcggtcccaggaggtcctggtcgggagccagagggcctcctccaggcaggaggccaggaggctgaggagctcctccaggaggggctcaagcccgtcctggaggaatgtgataactaggttggggctggggaggcagcccagcgcgagtcctccccgggcaaataggctccgagggccccggggcctcctctcctcctctcaggcagcagggccctggagacaggcggaggcggggccagggccggtccctcaccccacatcgggatcggggccccccacttccccccaaggggccctgcccaccaccaccttcccggtgacccagatgaccacatttaataccaaatggggtggggggaggcgcccctccagtgccaggggcacgtgctgtgagcttcctgggagcccaggttgtgctcactgctctcccgtatcgtgagcaccacctctgctttccctgcgtagatctaggccaggggctgcttgtttttgtggagccgtgtgtgttcttctctgagcagctcctccccagaggaccccagcgcagtcccgggagatggcggaaagaaggcaccagggcacagtggacactcatcccgtgacagcgatggtgaccatgactgtgggagaaagaacaggacccgggatggagtggggctgtctgagtttccccagtgaactttgtgctttggcgttccacccctgttgttacttgttactgagtttcctagacctggggtgggtgttcccccaggaggaggggggtcccgacctgtgtcctgtggtggccatttgcagcttctgtgttgtgattcccttctcttcaacggtttcaagtacatatctctcaataaatttcattcagtgttccaaaaaaaaaa

SEQ ID NO: 64962 - DNA, 2009 bp, Homo sapiens
cgggatcaatttgatttgacagtcggtataactgatcctgagaagatggcgtcgggtggtggtggctgtagcgcttcggagagactgcctccgcccttccccggcctggagccggagtccgagggggcggccgggggatcagaacccgaggctggggacagcgacaccgagggggaggacattttcaccggcgccgcggtggtcagtaaacatcagtctccaaagataactacatcccttcttcccatcaacaatggctccaaagaaaatgggatccatgaagaacaagaccaagagccacaggatctctttgcagatgccacagtggagctatccttggacagcacacaaaataatcagaagaaggtgctagccaaaacactcatttctcttcctcctcaggaagccacaaattcttcgaagccccagccaacctatgaggagctagaggaagaagaacaggaggatcaatttgatttgacagtcggtataactgatcctgagaagataggggatggtatgaatgcatatgtagcctacaaagttacaacacagacaagcttaccattgttcagaagcaaacagtttgcagtaaaaagaagatttagtgactttctgggtctttatgagaagctttccgagaagcactctcagaatggcttcattgtccctccgcccccggagaagagcctcatagggatgacaaaagtgaaagttgggaaggaagattcttcttctgcagaatttcttgaaaaacggagggccgctttagaaaggtaccttcagaggattgtaaatcatcctaccatgttacaggaccctgacgtcagagagttcttggaaaaagaagagctgccacgtgccgtgggtacccagacattgagtggtgctggtctcctcaagatgttcaacaaagccacagatgccgtcagcaaaatgaccatcaagatgaatgaatcagacatttggtttgaggagaagctccaggaggtagagtgtgaggagcagcgcttacggaaactgcatgctgttgtagaaactctagtcaaccataggaaagagctagcgctgaacacagcccagtttgcaaagagtctagccatgcttgggagctctgaggacaacacggcattgtcacgggcactctcccagctggctgaggtggaagaaaaaattgagcagctccaccaggaacaggccaacaatgacttcttcctccttgctgagctcctgagtgactacattcgcctcctggccatagtccgcgctgccttcgaccagcgcatgaagacatggcagcgctggcaggatgcccaagccacactgcagaagaagcgggaggccgaggctcggctgctgtgggccaacaagcctgataagctgcagcaggccaaggacgagatcctcgagtgggagtctcgggtgactcaatatgaaagggacttcgagaggatttcaacagtggtccgaaaagaagtgatacggtttgagaaagagaaatccaaggacttcaagaaccacgtgatcaagtaccttgagacactcctttactcacagcagcagctggcaaagtactgggaagccttccttcctgaggcaaaggccatctcctaatggaccaaggaccccagagcccacctgtgtgacgctgcctttttatacactgtcctcctccaccttgatggacccctagtgatgcatcctgcctaggctggacttaaccccttcctccctgtccccacgaccaactgtccccagttactctaaccgttatttcatttagcttccatatatattttcttacctaagagaatagtttcctgctttaagcaaaagacctacaataggtggtggaattatgggatggggtggagtattgatataaatatataaatacaaatgtatatttttcaggatgtggtttaggaactgggaataacgttttctgttactcctgatggtgccatgaaaaggttatgtaataaaatattttaaaatcaaaaaaaaaa

SEQ ID NO: 64963 - DNA, 812 bp, Homo sapiens
ctggaggaggaattagcttgaagcatggcgatgaaatctacattgctccttcaggagtgcaaaaggaacgaattcagcctgaagacatgtttgtttgtgatataaatgaaaaggacataagtggaccttcgccatcgaagaagctaaaaaaaagccagtgtactcctcttttcatgaatgcttacacaatgagaggagcaggtgcagtgattcatacccactctaaagctgctgtgatggccacccttctctttccaggacgggagtttaaaattacacatcaagagatgataaaaggaataaagaaatgtacttccggagggtattatagatatgatgatatgttagtggtacccattattgagaatacacctgaggagaaagacctcaaagatagaatggctcatgcaatgaatgaatacccagactcctgtgcagtactggtcagacgtcatggagtatatgtgtggggggaaacatgggagaaggccaaaaccatgtgtgagtgttatgactatttatttgatattgccgtatcaatgaagaaagtaggacttgatccttcacagctcccagttggagaaaatggaattgtctaagccaaaagaaagtctaattatatacagagataaagctaaacgtaattattatttaaatgaaagctatttttttaaataaattgaaatttttcatgatgctactaatttgccactaaatactgcaaatggtcaccctgaatctcttctgacattggatgttatttgcttatattcttataattttaaatgagggcacagtgaaatgaaaatttt

SEQ ID NO: 64964 - DNA, 2402 bp, Homo sapiens
agcggccgccgtgctggacatggtgcggcccaaggcccagctggtgctggctgcctgcgaaagcctgctcaccagccgccagctgcccatcttctgccagctgatcctgagaattgggaacttcctcaactacggcagccacaccggtgacgccgacggcttcaagatcagcacattgctgaagctcacggagaccaagtcccagcagaaccgcgtgacgctgctgcaccacgtgctggaggaagcggaaaagagccaccccgacctcctgcagctgccccgggacctggaacagccctcgcaagcagcagggatcaacctggagatcatccgctcagaggccagctccaacctgaagaagcttctggagaccgagcggaaggtgtctgcctccgtggccgaggtccaggagcagtacaccgagcgcctccaggccagcatctcggccttccgggcactggacgagctgtttgaggccatcgagcagaagcaacgggagctggccgactacctgtgtgaggacgcccagcagctgtccctggaggacacgttcagcaccatgaaggctttccgggaccttttcctccgcgccctgaaggagaacaaggaccggaaggagcaggcggcgaaggcagagaggaggaagcagcagctggcggaggaggaggcgcggcggcctcggggagaggacgggaagcctgtcaggaaggggcccgggaagcaggaggaggtgtgtgtcatcgatgccctgctggctgacatcaggaagggcttccagctgcggaagacagcccggggccgcggggacaccgacgggggcagcaaggcagcctccatggatcccccaagagccacagagcctgtggccaccagtaaccctgcaggagaccccgtgggcagcacgcgctgtcccgcctctgagcccggccttgatgctacaacagccagcgagtcccggggctgggaccttgtagacgccgtgacccccggccctcagcccaccctggagcagttggaggagggtggtccccggcccctggagaggcgttcttcctggtatgtggatgccagcgatgtcctaaccactgaggatccccagtgcccccagcccttggagggggcctggccggtgactctgggagatgctcaggccctgaagcccctcaagttctccagcaaccagccccctgcagccggaagttcaaggcaagatgccaaggatcccacgtccttgctgggcgtcctccaggccgaggccgacagcacaagtgaggggctggaggacgctgtccacagccgtggtgccagaccccctgcagcaggcccaggtggggatgaggacgaggacgaggaggacacggccccagagtccgcactggacacatccctggacaagtccttctccgaggatgcggtgaccgactcctcggggtcgggcacactccccagggcccggggccgggcctcaaaggggaccgggaagcgaaggaagaagcgtccctccaggagccaggaagaggttccccctgattctgatgataataaaacaaagaaactgtgtgtgatccagtaaggcctcaggcccaggcccaaggccaagtgagagagcccaggccacaggacatgctgccattctgccaagagaggctcttctgggggccaggctgggactgggccccggaaaccaaaactccgtgccttacccagccggggccctcctggagccttcttggggtgttgtggctgggaacccgacaggcaccagtgccctgccaggcctggtgccctcctggaccgcctgcacgtgccagcctcccacctgcttcctaaaggcaaccctggcccacacccgcatgcgcccggtgcagcctgccaagggccagtcggggggtgctgcgtcctgccagtgtccaccacagctctgcctgcccttcagcccagcaaggtttaatcaaaatgcaatgctttgcaagtctttactgcttggaggtggctgagttgggggccctgggcaggggtaagctggcaggcagtgccatggcaggccagggtcccctcccatggggtctggcccccgttccagcatgtccagcccctgaagttggagttgggggcggtctgcctttgctgccactgccaggcctctgccctgcagctgaaacttggccatcacatcaacagaaaacccctcccagtgccagctgcccagcgtgggcaggccctggggacaatacaggtccacctgaggggctgcagggtgacacccagcagccgctgccccctcactgcccacccagcgagggcagcctacccgagcctgccccctgccaggtgtgtgccctgaggctggcggctggatgcgtggccaataaaaagcagacctagcccggtgaaaaaaaaaa

SEQ ID NO: 64965 - DNA, 949 bp, Homo sapiens
gatcacagcccctacccacgtgcctctccagtacatcggccccaaccagccccggaagcctgggctgcctggccagcctgctgtaagctaagaacccacccacagcagccctcgggggtgtcactgcttcctggaggttcaggagaccccggacacctgggacctgtgttcctgagcccgtcctgacatctgtgttcttcctgtcagctccacgcccgggcccctggaccacggggtccacctctcctctgtccggaccatttattggggactttttgctcagcactgtaggaggaaagaaggaaggagggatggaagcctcttcctctgcttctcctgtccctagaaccgtaaagcccagacgtcctgcttcccactgggaccctcaatgataacagggtcagtgactgactctgaggcagcaaggacagaggagaggtggaccccgtggtccaggggcccgggcgtggagctgacaggaagaacacagatgtcaggacgggctcaggaacacaggtcccaggtgtccggggtctcctgaactccaggaagcagtgacacccccgagggctgctgtgggtgggttcttagcttacagcaggctggccaggcagcccaggcttccggggctggttggggccgatgtactggagaggcacgtgggtaggggctgtgatccgatcagtgccgaggtaggactggagggcagggggcacgagcactgagccgtccttctgctggttactctccaggagcgcgatgagaaggcgggggacagcacaggcggtggcgttcaccgtgtgggcaaactgcagctccccagcctcggtctggaacatgatgtggaggcggcggctctggaagtctgtgcagttggaagcactggtgacctctccaaagcggcctcggcctggcatccaggcctcaatgtcaaacttgcgctcgtgcc

SEQ ID NO: 64966 - DNA, 339 bp, Homo sapiens
ccatagcctccaccttaagtaactagaaaaaggaataaattacacaccaaacaagcaaaagataagacataataaagatcaaagcagaaagcaactaaatagaaaacagaaatacaatcaaggacatcaatgacaccaaagctttgatgtcatttgatgacacctttgagaagatcaataaaattgataaacctttagctggattgactgtggattaaaaagagaagacagaacaatcaatggtaggaactaggtaatatcactatactacaccacaaatagtaaaagaataataagggaatactaggaacaaaattaggcataaaacatatactttta

SEQ ID NO: 64967 - DNA, 5049 bp, Homo sapiens
ggcggcggcgagccggtgccctgggatcatggtggcgttgcggggccttggtagcggcctgcagccctggtgtccgctggatcttagactcgaatgggttgacacagtgtgggaactggatttcacagagactgagcctttggatcccagcatagaagcagagatcatagagactggattggctgcattcacaaaactctatgaaagccttttaccctttgctactggagaacatggatctatggagagtatctggaccttcttcattgagaacaatgtttcccatagtacactggtggcattgttctatcattttgttcaaatagttcataagaagaatgtcagtgtacagtatcgagaatatggccttcatgccgctgggctttactttttgctactagaagtaccaggcagtgtagccaatcaagtattccacccagtgatgtttgacaaatgcattcagactctaaagaagagctggccccaggaatctaacttgaatcggaaaagaaagaaagaacagcctaagagctctcaggctaaccccgggaggcatagaaaaaggggaaagccacccaggagagaagatattgagatggatgaaattatagaagaacaagaagatgagaatatttgtttttctgcccgggacctttctcaaattcgaaatgccatctttcaccttttaaagaattttttaaggcttctgccaaagttttccttgaaagaaaagccacaatgtgtacagaattgtatagaggtctttgtttcattaactaattttgagccagttcttcatgaatgtcatgttacacaagccagagctcttaaccaagcaaaatacataccagaactggcttattatggattgtatttgctgtgctctcccattcatggagaaggagataaggtcatcagttgtgttttccatcaaatgctcagtgtaatattaatgttagaagttggtgaaggatcccatcgtgccccccttgctgttacctcccaagtcatcaactgtagaaaccaggcggtccagtttatcagcgcccttgtggatgaattaaaggagagtatattcccagtcgtccgtatcttactgcagcacatctgtgccaaggtggtagataaatcagagtatcgtacttttgcagcccagtccctagtccagctgctcagtaaacttccttgtggggaatacgctatgttcattgcctggctttacaaatactcccgaagttccaagatcccacaccgggtttttactcttgatgttgtcttagctctgttagaactgcctgaaagagaggtggataacaccctctccttggagcatcagaagttcttaaagcataagttcctggtgcaggaaattatgtttgatcgttgcttagacaaggcgcctactgtccgcagcaaggcactgtccagctttgcacactgtctggagttgactgttaccagtgcgtcggagagtatcctggagctcctgattaacagtcctacgttttctgtaatagagagtcaccctggtaccttactgagaaattcatcagctttttcctaccaaaggcagacatctaaccgttccgaaccctcaggggagatcaacatagacagcagtggtgaaacagttggatctggagaaagatgtgtcatggcaatgctgagaaggaggatcagggatgagaagaccaacgttaggaagtctgcactgcaggtattagtgagtattttgaaacactgtgatgtctcaggcatgaaggaagacctgtggattctgcaggaccagtgtcgggaccctgcagtgtctgtccggaagcaggccctccagtctcttactgaactccttatggctcagcctagatgcgtgcagatccagaaagcctggttgcggggggtggtcccggtggtgatggactgcgagagcactgtgcaggagaaggccctggagttcctggaccagctgctgctgcagaacatccggcatcacagtcattttcactctggggacgacagccaggtcctcgcctgggcgcttcttactctcctcaccaccgaaagccaggaactgagccgatatttaaataaggcttttcatatctggtccaagaaagaaaaattctcacccacttttataaacaatgtaatatctcacactggcacggaacattcggcacctgcctggatgctgctctccaagattgctggctcctcacccaggctggactacagcagaataatacaatcttgggagaaaatcagcagtcagcagaatcccaattcaaacaccttaggacatattctctgtgtgattgggcatattgcaaagcatcttcctaagagcacccgggacaaagtgactgatgctgtcaagtgtaagctgaatgggatttcagtgggtctctaggaggtgatcagttcagctgttgacgccttgcagaggctttgtagagcatctgcagagacaccagcagaggagcaggaattgctgacgcaggtgtgtggggatgtactctccacctgcgagcaccgcctctccaacatcgttctcaaggagaatggaacagggaatatggacgaagacctgttggtgaagtacatttttaccttaggggatatagcccagctgtgtccagccagggtggagaagcgcatcttccttctgattcagtccgtcctggcttcgtctgctgatgctgaccactcaccatcatctcaaggcagcagtgaggccccagcgtctcagccacccccccaggtcagaggttctgtcatgccctctgtgattagagcacatgccatcattaccttaggtaagctgtgcttacagcacgaggatctggcaaagaagagcatcccagccctggtgcgagagctcgaggtgtgtgaggacgtggctgtccgcaacaacgtcatcattgtaatgtgcgatctctgcattcgctacaccatcatggtggacaagtatattcccaacatctccatgtgtctgaaggattccgacccattcatccggaagcagacactcatcttgcttaccaatctcttgcaggaggaatttgtgaaatggaagggctccctgttcttccgatttgtcagcactctgatcgattcacacccagacattgccagcttcggggagttttgcctggctcacctgttactgaagaggaaccctgtcatgttcttccaacacttcattgaatgtatttttcactttaataactatgagaagcatgagaagtacaacaagttcccccagtcagagagagagaagcggctgttttcattgaagggaaagtcaaacaaagagagacgaatgaaaatctacaaatttcttctagagcacttcacagatgaacagcgattcaacatcacttccaaaatctgccttagtattttggcgtgctttgctgatggcatcctacccctggacctggacgccagtgagttactctcagacacgtttgaggtcctcagctcaaaggagatcaagcttttggcaatgagatctaaaccagacaaagacctccttatggaagaagatgacatggccttggcaaatgtagtcatgcaggaagctcagaagaagctcatctcacaagttcagaagaggaatttcatagaaaatattattccaattatcatctccctgaagactgtgctggagaaaaataagatcccagctttgcgggaactcatgcactatctcagggaggtgatgcaggattaccgagatgagctcaaggacttctttgcagttgacaaacagctggcatcagagcttgagtatgacatgaagaagtaccaggaacagctggtccaggagcaggagctagcaaaacatgcagatgtggccgggacggctggaggtgctgaggtggcacctgtggcacaggttgccctgtgtttagaaacagtgccagttcctgctggccaagaaaaccctgccatgtcacctgccgtgagccagccctgcacacccagggcaagtgctggccatgtagcagtatcatctcctacacctgaaacagggccattgcagaggttgctgcccaaagccaggcccatgtccctgagcaccattgcaatcctgaattctgtcaagaaagccgtggagtcaaagagcaggcatcggagtcggagcttaggagtgctgcctttcactttaaattctggaagcccagaaaaaacgtgcagtcaggtgtcttcatacagtttggagcaagagtcgaatggcgagattgagcacgtgaccaagcgggccatcagcacccccgagaagagcatcagtgatgtcacgtttggagcaggggtcagttacatcgggacaccacggactccgtcgtcagccaaagagaaaattgaaggccggagtcaaggaaatgacatcttatgtttatcactgcctgataaaccgcccccacagcctcagcagtggaatgtgcggtctcccgccaggaataaagacactccagcctgcagcaggaggtccctccgaaagacccctctgaaaacagccaactaaacagcgcctcccaccagtgtccaggcaggcaggagcccttgaggaagcagtctcgtgtcctccgtgtgaaggcagctggatcacttcccgcagtccttgggcagcgctttgctgtggaacacgagagctcctcctcaggggcctggcactcaccttctattctgtatgatgtatttggttaaacactgtcaaataatagagatgtgccagatttagattttccttaccctaatctgtttaatattgtaactttattccatttgaaagtgtcaagccccattccagataagcctataatctggtcctttaagggaacacaactttaaaactgcagctttcttttatataaatcaaggcctctgttaacttgaattccttatagtacatattttcccatctgtaatgacgaaattttgattctaatattttttctattatttataagggcaaattttttaaaaaaagtgtacagcttttctaaaagtaataaaggtttagcataaatacagccaaaaaaaaaa

SEQ ID NO: 64968 - DNA, 1964 bp, Homo sapiens
attcagcatcttttcttctcaagacgctgaatgtaatcttagttgtaaatacccatcacctgccagtcaccgagcactcatgcaccagggctttgcgttatgtcctaagatcctcataaccaccctgcaaggggactatcatcattacctctgtattacagatggagaaactgaggcacagagaggtaacgtgacttgtctcaggccataaagctggggaaagtagtggagctggttttgaacctgagctgtgagacctcagagccctaaactctggtgcctgtgtgttcccctttcaacccagactttggaaatcagtagacaccatatgcttcaaaaaacaggagctattaaaatgacatcaggagccagaaagtctcatggctgtgctttctcttgaagtttatacaacaaccagatcaccgatgtcggagccagactgggaaaaaacaaaataacaagtgaaggagggaagtatctcgccctggctgtgaagaacagcaaatcaatctctgaggttggtcttgcgtccaacggcatctccacagaaggaggaaagagccttgcgagggccctgcagcagaacacgtctctagaaatactgtggctgacccaaaatgaactcaacgatgaagtggcagagagtttggcagaaatgttgaaagtcaaccagacgttaaagcatttatggcttatccagaatcagatcacagctaaggggactgcccagctggcagatgcgttacagagcaacactggcataacagagatttgcctaaatggaaacctgataaaaccagaggaggccaaagtctatgaagatgagaagcggattatctgtttctgagaggatgctttcctgttcatggggtttttgccctggagcctcagcagcaaatgccactctgggcagtcttttgtgtcagtgtcttaaaggggcctgcgcaggcgggactatcaggagtccactgcctccatgatgcaagccagcttcctgtgcagaaggtctggtcggcaaactccctaagtacccgctacaattctgcagaaaaagaatgtgtcttgcgagctgttgtagttacagtaaatacactgtgaagagactttattgcctattataattatttttatctgaagctagaggaataaagctgtgagcaaacagaggaggccagcctcacctcattccaacacctgccatagggaccaacgggagcgagttggtcaccgctcttttcattgaagagttgaggatgtggcacaaagttggtgccaagcttcttgaataaaacgtgtttgatggattagtattatacctgaaatattttcttccttctcagcactttcccatgtattgatactggtcccacttcacagctggagacaccggagtatgtgcagtgtgggatttgactcctccaaggttttgtggaaagttaatgtcaaggaaaggatgcaccacgggcttttaattttaatcctggagtctcactgtctgctggcaaagatagagaatgccctcagctcttagctggtctaagaatgacgatgccttcaaaatgctgcttccactcagggcttctcctctgctaggctaccctcctctagaaggctgagtaccatgggctacagtgtctggccttgggaagaagtgattctgtccctccaaagaaatagggcatggcttgcccctgtggccctggcatccaaatggctgcttttgtctcccttacctcgtgaagaggggaagtctcttcctgcctcccaagcagctgaagggtgactaaacgggcgccaagactcaggggatcggctgggaactgggccagcagagcatgttggacaccccccaccatggtgggcttgtggtggctgctccatgagggtgggggtgatactactagatcacttgtcctcttgccagctcatttgttaataaaatactgaaaacactaaaaaaaaaa

SEQ ID NO: 64969 - DNA, 1191 bp, Homo sapiens
cacagtccaaagacatgggcagcaacaaaggacacacaatgactgaaaccattaacgttaccttttggaatctctcagtgccctgagcaatctgtgtgtctacctacagatgggcaaagcatttttgcaccctggccccattcccagttctcccgtgagaactcagtcctccttgaagacttggtgatgcctgtcaattgagctcccatttagcggctcattgtgcccaggggctcacatctgcaagttaaaattgcttttatcaacatctgatacaatggttctcatttcacataaataatcacagacttgactaaaatgaatatattattctaggttaatttttttccattcaaatgtttatactccatctacccagaacaattacagcagaaaaaataggcacctccaaagtcttcccaagaatgatgactttctgaaatgacacactgtacaaactggacaaatgagacgactgactgtgacaggggccggggagctcttcaaggggccgttttcttcaagtctcggatctgtttaatcaagtagttcttctcgtcagcgaactgctcatcatccgtcctttctttttggaagctgctcagaaactcaatgagtttgggctgattttttaacaggatctccacaataggctgtgttttgtgaggactggccacaaacaccttaaaaacatgaaaggcttcaaactggatgttgggacttttatcccgaaggaggttcatcatgagtttcaggttctccggcttgctgatatactttgtcatgatggcaaagttgtgacggtccaggatcagctcccctagcagctttaaagactgtctcttagtaacataattctcagactgaagcaatttctcatagtcttcaaaaatagtgtcgtaattttgttctaagaagtctgctaccaacactttatgtctggttagtaaatccttgaaagtagcaaaggcatctgaagcaatatcaaatgttgacaactccacgtacttaaagaaatctctgaattgattagaaaagaggatgattttggcaagtggttcatgtcgaatacattctctcagcataatcccacaacgtaaggcaatctgtggggcttcatatcctttgaggagcataaacaggatatgaggatgagcactaatatactccacagtaggacttcgagtgcta

SEQ ID NO: 64970 - DNA, 360 bp, Homo sapiens
gagataacccacattgttggagagacagctgcctttctatgccccaggctgaggctgagacggggtgggaaggatggatccccaaagcctgggttcttggcctcagtgattccagtggacaggcgtccaggtgagtaggacatccagaagatttggacttggagatgtttccccctattttgagtgtccagattaagagctggctgccctagtcattttaaaacatgctgggaatccaagttgggtctcctcattttaatgatgtctaggctgagggctgggcctttcattcttgagtccctgggctcagaagtgggtctctttccctcctctcagggtactgaggaaggaccccaggtg

SEQ ID NO: 64971 - DNA, 380 bp, Homo sapiens
aaaaatactactggtggccttcagcagaatcccaggggcctgatttagcctggcggccctgcttaaagtccaggtgttggcagagggggtgggccataacttacctgccctgtatactgggggaacacaggtggagttttccgaagcccggatttatgaggagaccctgaacattatgctgtatgaggcccaggatggccggggacctgacaatgcgctcctggaggccacaggcggtgcggcggtgcgctcccaccacctggacgaggactaggagcggaagcggatcgagcgcgtgcggaggattcacattaagcgcccttgggaccgggccattctcaccagtgagcaggctggataccgagccgcccttttttacc

SEQ ID NO: 64972 - DNA, 927 bp, Homo sapiens
cgggttgagttgggtatccagggtctacactgctcatgggctagaggagagagttgccagaattccgatggttaacctttcatatctgtgaacgctaactacccctttaggtcaccaatcccaagggataaatcaaccacccgggcacatcataatcaaaccaataaaaaccaaagacaaagattcctgaaaatactcagagaaaaataacatgtttcatacaggggaaatattactttaatggctgcacatttctcatcagaaaccatggaggctgaaagaactgtcaacacagtagtttatatccagcaaaaatatctttcatgaattaaggcaaaataaagacattctcagatgaagaaaaaataagagaattaaatgtcaacagacctgcactaaaagaaattttccagatgaaaaggactgatacctatgtaaacttggaacatcaagaattaaggaagattaatacaaatgataaatattgtggtaaatgtgacagactgttttcctcttgggttcttaaaaatatctatgatagttgtaaggaaaaaatacattatctgatgagtcttattttttatttttattttttgagacacagtgtctagctctgtcactcaggctggagtggagtggagtgatcttggctcactgcaacctttgcctcctgggctcaagtaatcctcccacctcagcctcctgagtagctgggaccacaggaacatgccaccacgcctagctaattttgtgtattttttgtagagttggggtttccccacattgtccaggctggtctcgaactcctggacttaagcaatctgctcgcctcggcctcccagtcctgggattacaggtgagccactgtgcccagccaagtcttatgatttataagaaaattataacataaaggggagagggtaaagg

SEQ ID NO: 64973 - DNA, 374 bp, Homo sapiens; identical to SEQ ID NO: 35811

SEQ ID NO: 64974 - DNA, 367 bp, Homo sapiens
caagattactgatttcgggaagtgggacactggtaacctgtgtatggtgactggaggtgctaacctatgaagaattggtgtgatcaccaacagagagaggcaccctggatcttttgacgtggttcacgtgaaagatgccaatggcaacagctttgccactcgactttccaacatttttgctattggcaagggcaacaaaccatggatttctcttccccgaggaaagggtatccgcctcaccattgctgaagagagagacaaaagactggcggccaaacagagcattgggtgaaatgggtccctgggtgacatgtcagatctttgtacgtaattaaaaatattgtggcaggaaaaaaaataaaacccg

SEQ ID NO: 64975 - DNA, 428 bp, Homo sapiens
tgatagaaaacataactaaaaaagtagaagacactgttaaatttgaatctggatcctatatagcttcttctctgggatctactgaggagtgaaatctaaatgaagatttagcttagaaagcatgaagatagtatgttccaattttaaataaaaattatattgtctgaaagacaatacaattttagtactgggggaaaaaaaactagattgttatttgaagaagaaaacatcatggttctctccaggtttaaaatgggtgctcccatgtaggctgattttcccggcatttgatcttaacttgaaggccatctgcccagcccagcaatcaaagggctgctaagctgtccttggcagcctctactgggcaaagctgtgcatataactctgaagaaagggagatcttttaatgttgcggacgcgtgggtcgg

SEQ ID NO: 64976 - DNA, 986 bp, Homo sapiens
ttttttttttttcttcagcattgtgttttactttttgggagagaggctaggaggaggaaggggtgaaaacagcatctcactggagtctcaaaagtgtatgaatcttctggtagtgcaaggatgggataagatggccagggaagtcagatggaaaatccccaagattctttttgctactgatttctataattaaaatatgacatatgtaagggactagtgcatgatattcaataaatgtcagttgtctttcctaactaggttcctcacaggctaggttatgcctagatatcatcatcctcctttcagggaatgaagctcacctagaaaactagggaactaaaagtgcaatatggtttgggtaatgcagttggttagctgtctccccatcctcccaactcactattccagggaggggctgaaaacagaagtggctcccctgaagtctagttagcatgtcatgacagagtccacatgaagggctgtgggctgcaactttctagtgcacagtcctctctttttggcgatgataattgtagggaaagaagcgcacacgcatgctgatttcacgagctgtcttcaggatctcaacagccttgctgtgctcaatatcttggaaatccacatcattcacagctagaacttggtccccttcctgcagtcctgctctatgtgcatcagagtcaggaatcaccttggagatgaagatgcctagctgggaggcctttcctcctcggatgttaaatcccaactgagctccaggaggcttcttcagtgtgatggttcggggcagaaactgggtcaactcattgttgtagtccgggtggtgtaccctctcatgaggaggaatccatgctggaggattctcataggcaggcaagaaaaccaccgggtagtcatcataaggaatccggctgtccatctcgggcaaggcccagtgggcagtccacagcgacctcagactccgctcacacgaaatcgtcgacccg

SEQ ID NO: 64977 - DNA, 1364 bp, Homo sapiens
gaatggacatgtaaaatttagttacattccagggaattttcaggtgaaaattagtagatagttaatatgaaaattttatatgaattcatattttttcttggacaatatgctaatatttattgatttcacaaatttacagcatatgggtgattttggaagcattcatagacccggaattgttgttgactatcaaaacaaatccaccaatgtgacagttgctgctgcaagaggaataaagagaaaaatgatgcagccatttaataagcccagtggaacctttatcaagaaacccaaactagcaaaacctatggagaagataagcctcagcaaatcacccacaaaaactgatcctaaaaatgaagaggaagaaaagcggcgaattgaggctcggcgagagaaacaaaggcgcagaagagaaaaaaacagtgagaaatacggagatggatacagaatggcatttacatgttcattttgtaaatttcgaacatttgaagaaaaagatattgaactgcatctggaaagttcttcacatcaggaaacattagatcatatacagaaacaaactaaatttgataaagtagttatggagtttttgcatgagtgtatggtgaataaattcaagaaaacatctattcgtaagcaacagacaaataatcaaacagaagtagttaaaataattgaaaaagatgttatggaaggtgttactgtagatgatcacatgatgaaggtagagacagttcattgcagcgcttgcagtgtgtatatccctgctttacatagttcagttcagcagcacttaaaatctcctgatcatatcaaagggaagcaggcttataaggaacaaataaaaagagagagtgtcttgactgctacaagcattttaaataatccaatagtgaaggcgcgatatgaacgttttgttaagggtgagaatccttttgaaattcaagaccattctcaggatcagcaaatagaaggagatgaggaggatgaagagaagattgatgaacctattgaagaagaggaggatgaagatgaggaagaagaagcagaggaagtgggggaagtagaggaagtggaagaagtagaggaagtgagagaaggaggaatagagggcgagggaaatatacagggagtaggggaaggagggaagtaggggtagtgggagaagtcgagggagtgtgggttgtgctggatgttttgtaatcccttaaacattttatgatgtactctttagtgctatatgcattttcttacttttgttattactgtgtcccttgtgtatgactgctcttatatgtttatggagattgaacacgttcactttccagcttatatgtactttatactgacttgttcttttt

SEQ ID NO: 64978 - DNA, 2388 bp, Homo sapiens
cggacgcgtgggctgggagctgtggtgcatgtacatcagccccccaaaagactggtgggacgccggagacccttctctccccatcaggaccccagccatgataggctgctcgttcgtggtcaacaggaagttcttcggtgaaattggtcttctggatcctggcatggatgtatacggaggagaaaatattgaactgggaatcaaggtatggctctgtgggggcagcatggaggtccttccttgctcacgggtggcccacattgagcggaagaagaagccatataatagcaacattggcttctacaccaagaggaatgctcttcgcgttgctgaggtctggatggacgattacaagtctcatgtgtacatagcgtggaacctgccgctggagaatccgggaattgacatcggtgatgtctccgaaagaagagcattaaggaaaagtttaaagtgtaagaatttccagtggtacctggaccatgtttacccagaaatgagaagatacaataataccgttgcttacggggagcttcgcaacaacaaggcaaaagacgtctgcttggaccaggggccgctggagaaccacacagcaatattgtatccgtgccatggctggggaccacagcttgcccgctacaccaaggaaggcttcctgcacttgggtgccctggggaccaccacactcctccctgacacccgctgcctggtggacaactccaagagtcggctgccccagctcctggactgcgacaaggtcaagagcagcctgtacaagcgctggaacttcatccagaatggagccatcatgaacaagggcacgggacgctgcctggaggtggagaaccggggcctggctggcatcgacctcatcctccgcagctgcacaggtcagaggtggaccattaagaactccatcaagtagagggagggagctggggcactggagcctggcccccaggacatggctgctccccccaacatctggaccagctgccctggcggagagacagcaaggggccggcaggtgctcgatgggccccccagggcttctccagggcagcacagggaccccggatgaagactctgtcccccctcaggcattcagctgcccacaagtttcctgcaccctggaaaagccccccacccttcctctgggaaactgacagctgtcttccacagcctctgatgtggacctggtactgaggagcaagactgtccagttctcctccacatctcccatcccagaatcaggatctgggactggcagggtcccctcctgtgtctcatctcttgcagcagcagctgctgaactccagccatcaacacggtgggaggcagcgggggcttcagccatgtcctagctccccgccctaaaaggaggcagtgaggaccaggcactatttcctccgaggttacttctacccagatgacacctgcctgttcacgccccaaggcagctactgcccctaacccttcccaccagggtagctttgggcactgcagctctggacttttctggcccctcctgagatgacctgatggagctgatgctttctctcctaatccctgggcactaggctcttatcagggtgcttgggccagctctcctgcctgtgtctagaggaagccagagacagaaataggctaagcctgcagtaggatctcagccacaagggccccgcaggatggagctgggtcaaggaccagggagccctgactcccagaggctgccaccggggagaagcagcggtcctccatccagaacctaagggctgaagcaaaggctgccaggacccttgaagatgcttttggctcacctcatttcaccccacgctctgctggctggcagaggagaaggcagtcgtttcctctctgaagagtatttttttcgattgccctctggttagggtgcacatataaatcagagttaatatatgaacgcgtgtgcatgcacaagtgtgtgtgtgcctgcgtgctgtgcgtggcagggtgtgtgtgtgtgtgtctggctgtgcgttccggagtgtgtgacgatgctgactctagcatgtggggccttgggcttgctgcttcattactcaccctggatggggacgagggatgagaagggtgtgggtttggcccccatgtcactggccggaaggatgtgtctcagccctgccctgtggggtgcccccgatgggaggctgtcccatctcccagtccccatctctttttccccacactgtccctggccaagccctgcccagagctgaaccctgtagctgcccccttgccctgtgtgggattcgcagtgtctcatttggtgacgtcttactggtgatcatctcctcaccccatctccaaccttgtggaataaatacatgttagcacttcccaaaaaaaaaa

SEQ ID NO: 64979 - DNA, 2617 bp, Homo sapiens
atcggattgctcagcagatggcaaggagcagtatgaaaggctgaagctgacatggcaccaagtcgtcatgttggcattgtacaacttgtctctgaaaggaagtggacgtcaaggttatttcaggtggaaagaagatatctgtgcttttattgagaaacattgaacttttttactaaggaataggaaaaagacgtctacctggtggagcaccgtggcaggttgcctcagcgtgggaagtcccatgtacttccgttcaggtgctcaggaatttggagagccaggatggtggaaacttgttcataacaagcccccaacgatgaaacctgaaggagagaagttgtctgcctctactttgaaaataaaagcagcctcaaaaccaactttagatcccatcattactgttgagggacttagaaaacgagcaagtcggaatcctgtggaatctgccatggaattaaaagagaaaaggtctcgaactcaggaagcaaaagacattagaagagcccagaaggaggccgctggctttcttgacaggagcacatcttctacccctgtaaaattcataagccgaggccgcaggccagatgtgattctggaaaaaggcgaagtgattgacttttcctccttgagctcctctgaccgcaccccgctgacaagcccatctccttctccttctctggatttctctgcccctgggacacctgcctctcattctgccacacctagcttgctttcagaagcagatctgattccagatgtgatgcccccacaagccttgtttcatgatgacgatgagatggaaggcgatggagtcatagacccagggatggagtacgtcccaccccctgctgggtcagtagcttctgggccagtggttgggggcagaaagaaggtcagaggccctgaacagataaagcaggaggtagagagtgaggaggaaaaacccgacaggatggatattgacagtgaagacacagattcaaacacatctttgcaaacaagggctagagaaaagaggaagcctcagctggagaaggacacaaagccgaaagagcccaggtatactcccgtgagcatctacgaggaaaagctgctgctcaagaggctggaagcttgtcccggtgctgttgccatgactccggaagctcggagactgaaacgcaaactgattgtcagacaagcgaaaagggataggggattaccactttttgacttggatcaagttgttaatgctgctcttttgttagttgacgggatttatggagccaaagaaggaggaatttccagacttccagctggacaagccacgtacagaaccacctgtcaggacttcagaatccttgaccgataccagacttccttgccgtccaggaagggatttcgacaccagaccaccaagtttttgtatcgcttggtaggatcagaagatatggctgtggaccagagtattgtcagcccttatacctctcggatcttgaaaccttatatcaggcgtgattatgaaacaaagccacccaaactgcagctcctgtcacagattcgttcccacctgcacaggagcgaccctcactggacgccggagcccgacgcacctctcgattactgttatgtgcggccaaatcacatcccaacgatcaactccatgtgtcaggagtttttttggcctggcattgacctgtctgagtgtctgcagtacccagacttcagtgttgttgttctttataaaaaagtcatcattgcctttggcttcatggttcctgatgtgaaatacaatgaagcttacatttcatttctgttcgtccaccctgaatggagaagagcagggattgcaactttcatgatctatcatctgattcagacctgcatgggcaaggacgtaacccttcacgtctcagcaagcaaccccgctatgctactgtaccagaagtttggattcaagactgaagaatatgtattagatttctatgataaatattacccattggagagtacagagtgtaaacacgcattctttctgaggctccggcgctgatgcgaatacagctcacagagaaacgcatgtgctattggagaacaggtctttgtggagatctaaaggcagtgattgatttcacagggagctctaatctctgtgattacatggtccttcaaactcccaaccaaagtgagaaaagcggcatgcagtgaaatgagcagtgagcagccctttagcaaaatcgccctccagtccttcctggagatgccttcagccagcatcccagactccacagttatttatgaacgatgtcgtgattctccctccacctgacagtttgtaagagtgaaagagcatctaacctgatgctcttggagagagataacctgtctgtcataacttaaaggatgagaaaatgtggtgtagctattaaagattcatgcagtcccaaaaggcactgtcctgggatgatgagagattataaggtgatttcataaaaggaatccaaccctgtgcccggccattgatgtgttgtcattgaatccaggaggatttctagggcactgaagttttgttgtttcttttgctgactttggttacagtcagaaaaaataaactagatgtttgtgtctaaaaaaaaaa

SEQ ID NO: 64980 - DNA, 1773 bp, Homo sapiens
taccaattttatttcattaatttatttgctattttaatattttaagaaactacattttaatcacatagacaagcagataagtaaggcttcttctaccaggtgggcttatgaaatgcaaaataagcaaaaggagcatttttttgctccccacagaggcaaagacatcttttaacctaactctcctaatgcatgatgggtaacaaacccaaaatgaatgcaggttcacatgtactataattgttgggagtcgaatgcatgtattcttcaggttcacttctggaaatttagataacttatttattacacgctttatttgagttaaagataagaaaacaatatacttttaatgtaaattgctatggcaatgtagtttacagtaattccttttatatatacttcgtattattcttttagacattttataaggaataaagctaattgtatattaagtttaacaataatcagaaaatattctccaaaagaatttcctgaagtgggcttgctaggtataaagctcataattgtcaagatacttacattagggacatgaacccaagtcgttaaataaaaataagatatttgtaaaaaagtgctatagaagaaggtgcacaaaaaacatgcacttacacatactttccaaaaggatgtaaactgtacttttaggcactgtcatctcttcaaatttcctttaccaatgatatatagcacaatttttgatgtctagatggtgctgtaggaagatgactaaggcaaccacgtgcagaaaagcatgtgtgtgatgcacagaaaatataaagattgcattccaaaagtgaaggtctgcaatgatagtttgttatctgaaaggtttggagtgtcttgtcattaaaaaatgaaatatatgccactggagtcatatcacaaatggtgcctgatgtggacactctacctttaaaatgactttttaaacaggcagacatttctatgctgttttataggtggctatgtgacttcagtactttataataaatagccagtcaatcttgagagccagctacttctcttaaacccaagtacaagatataaatattcaaaatatggaatgtttaacatagagactcgaatgaaaaaatgacaatcttcaaaattccccatgttttgtcatattgcatagctgaaaattcatctactacttagtaaaaagtgctctgttcattcaagctgaattttgctccagtctccttcagtttccatctttcatactgaatagtggatccacaagtttattgtgcacatgcattagacctttaaagtatttcacagttttaactcttaattctaaagtagcatcttcatcgcatacaaaaatagtccggggatgctgctggaaagcggaaacagtccacatgtgattgactccttcttctattgctttgtacagggcaaatgccttgtgtgcccctgttataaggatcattacttctctagcatccatcactgtccccacaccaacagttagagccatagttggcacttttgataaatctccatcaaaatatttggcatttgccaagatggtatccattgctagagtctttaatcttgtccttgacactaaactggatccaggctcattgaaagcgatatgaccatctggaccaattcctccaacaaaaagatctattcctccagcttcttttattttgttttcaaaagcatcacattctgcttgtaaatctgcagcattcccgtcaaggatatgtgcattatcccacgcgtccgcccacgcgtccg

SEQ ID NO: 64981 - DNA, 333 bp, Homo sapiens
atcacatattgacgatcgctttccgtatctatgacaaggatacagacggctatattgggtatggtgaactcatccgggtattgaagatgatggtggggtacaatctgaaagatacacggtgactgcaaattgtatactaaaccataataaatgctgattaggatggagatggaagaatatcctttgaagaattctgcgctgtcggatgtggcctagatatccacaacatgatggtggtagatgcgtgactcttatcagacagtaccacccatcacttttgctttcttctacatctctgaagatctgcgtcggacgtccagcaatgctctttcg

SEQ ID NO: 64982 - DNA, 2145 bp, Homo sapiens
gagtaaagcaaagagaaaggaagcaggcccgttggaagtggttgtgacaaccccagcaatgtggagaagcctggggcttgccctggctctctgtctcctcccatcgggaggaacagagagccaggaccaaagctccttatgtaagcaacccccagcctggagcataagagatcaagatccaatgctaaactccaatggttcagtgactgtggttgctcttcttcaagccagctgatacctgtgcatactgcaggcatctaaattagaagacctgcgagtaaaactgaagaaagaaggatattctaatatttcttatattgttgttaatcatcaaggaatctcttctcgattaaaatacacacatcttaagaataaggtttcagagcatattcctgtttatcaacaagaagaaaaccaaacagatgtctggactcttttaaatggaagcaaagatgacttcctcatatatgatagatgtggccgtcttgtatatcatcttggtttgcctttttccttcctaactttcccatatgtagaagaagccattaagattgcttactgtgaaaagaaatgtggaaactgctctctcacgactctcaaagatgaagacttttgtaaacgtgtatctttggctactgtggataaaacagttgaaactccatcgcctcattaccatcatgagcatcatcacaatcatggacatcagcaccttggcagcagtgagctttcagagaatcagcaaccaggagcaccaaatgctcctactcatcctgctcctccaggccttcatcaccaccataagcacaagggtcagcataggcagggtcacccagagaaccgagatatgccagcaagtgaagatttacaagatttacaaaagaagctctgtcgaaagagatgtataaatcaattactctgtaaattgcccacagattcagagttggctcctaggagctgatgctgccattgtcgacatctgatatttgaaaaaacagggtctgcaatcacctgacagtgtaaagaaaacctcccatctttatgtagctgacagggacttcgggcagaggagaacataactgaatcttgtcagtgacgtttgcctccagctgcctgacaaataagtcagcagcttatacccacagaagccagtgccagttgacgctgaaagaatcaggcaaaaaagtgagaatgaccttcaaactaaatatttaaaataggacatactccccaatttagtctagacacaatttcatttccagcatttttataaactaccaaattagtgaaccaaaaatagaaattagatttgtgcaaacatggagaaatctactgaattggcttccagattttaaattttatgtcatagaaatattgactcaaaccatattttttatgatggagcaactgaaaggggattgcagcttttggttaatatgtctttttttttctttttccagggttctatttgctttaatgagaatagaaacgtaaactatgacctaggggtttctgttggataattagcagtttagaatggaggaagaacaacaaagacatgctttccatttttttctttacttatctctcaaaacaatattactttgtcttttcaatcttctacttttaactaataaaataagtggattttgtattttaagatccagaaatacttaacacgtgaatattttgctaaaaaagcatatataactattttaaatatccatttatcttttgtatatctaagactcatcctgatttttactatcacacatgaataaagcctttgtatctttctttctctaatgttgtatcatactcttctaaaacttgagtggctgtcttaaaagatataaggggaaagataatattgtctgtctctatattgcttagtaagtatttccatagtcaatgatggtttaataggtaaaccaaaccctataaacctgacctcctttatggttaatactattaagcaagaatgcagtacagaattggatacagtacggatttgtccaaataaattcaataaaaaccttaaagctgacttcgtttgttatgtaggctgtatgcatatattgaaaacagaagtgaaactttcgattgcttttaaataaatactttactaatgaatttactgctaagctc

SEQ ID NO: 64983 - DNA, 369 bp, Homo sapiens
  misc_feature (1)...(369): n = a,t,c or g
tttttttgccgcgcactcagactttattctaagaccaggaagggccggtgcaaggaggggaggagggcccgatgggaggcccaacgggctagaggaacgggtaccgacgctccagcttaacggtattcggaggtcatcacggagctcacagataccaggaactggtccaggaaggcgtgcaccgcaggggtgaacttgctatgctggatgtcggcctaggtatccacccatgctggtctaatgagctggttattgaccgtagccatcctaaatgcgtacgcaagcaagatgcttatgactgcagctcctgtgcatgacctctgagacgccaacactgattacgtcaaaggtcccgctttggggtcccan

SEQ ID NO: 64984 - DNA, 2251 bp, Homo sapiens
cagttaataatcaactgtacctaattgggcattcacttgtggacctcttttctgccaactaaagaaaaattgagctgctttactcctctgccttcccacccagaaaccgtgtcagcatggttgcctggctacctgctcatgaaggacttgattaatagcaaattggcaatttaacgagccacttccatgatctccaaagaaaccaaaatacaaacacaatatttaatcttgccaaccgaagacgatgtgactgcatgaagtgcccttcgttttaaaagaaagattattggattaaaagatgagttttacaaccgctacataatgaaaagttttttgtttgaaccagtagtgaaagcatttctcaacaatggatcccgctacaatctgatgaactctgccataatagagatgtttgaatttattagagtggaagatataaaatcattaactgctcatgtaattgaaaattactggaaagcactggaagatgtagattatgtacagacatttaaaggattaaaactgagatttgaacaacaaagagaaaggcaagataatcccaaacttgacagtatgcgttccattttgaggaatcacagatatcgaagagatgccagaacactagaagatgaagaagagatgtggtttaacacagatgaagatgacatggaagatggagaagctgtagtgtctccatctgacaaaactaaaaatgatgatgatattatggatccaataagtaaattcatggaaaggaagaaattaaaagaaagtgaggaaaaggaagtgcttctgaaaacaaacctttctggacggcagagcccaagtttcaagctttccctgtccagtggaacgaagactaacctcaccagccagtcatctacaacaaatctgcctggttctccgggatcacctggatccccaggatctccaggctctcctggatccgtacctaaaaatacatctcagacggcagctattactacaaagggaggcctcgtgggtctggtagattatcctgatgatgatgaagatgatgatgaggatgaagataaggaagatacgttaccattgtcaaagaaagcaaaatttgattcataataatggcaacggcctaggatcagtacctgttgaaaaaaactggttctccacccctcccccatacaaaatccacaacaaagcgcagtggtctcttgtgaatgactgacacagatcagcctcttacacttgacttctgctcatcaagtgccaattcaatggagcaggaggaggggatatcatatatttaggggaaagacttaagcctttgagctctccagcttggaccacacattgcccttttctcagggaaggaaatggaaacaaaaagccaacagggcaggggttttgtaagtggaactctggattgactggtcagttgctacaatcagaatatgctttcttggaccatgtttgagactcagaagaatgggcctttctgccataattcttcactagtcaagaatgccagcagtttctttgtataaagagacctgcctttaaaatcatacattctgaacattttagtcaagctacaacaggtttggaaaacctctgtgggggaggggcgagtataaagttttcctcttttttaactgttccctttgcccttcaaactgcagatatttttttttttaaggggggacttctccctacttgattaaagattgagtggaattctagatgtggtcatttgtgtcataatttttttgttttattttgtttttgattttttttttcctcccctgagtgtatgcttagttgttgagtatatatatttgggaccattaaaactttttttgatgtaatataacctaacgttgtgctggtacctgttttaccatgtgtaatttttgttctacatcacagttcttaatttgtttagagttttatgaaagatggtatagtttttattgacaaaagcaaagtaatcttacaactatgtgcatacaaaagcaatactattttgtgactaaatattttatattaaaatttacatcagcaactgtcttgagaattcagggaaatagaatggaatttaaaacttcaacagttttgttaaatctagaaacatgaaattagtattccaaagagattctgaaatttcttttcttggggaaatgacggtacattaaatcaaaattgaggatggatgatttaaaaacatttgactttttaataataaaaagaaaagtgaagagtaaaaaaaaaa

SEQ ID NO: 64985 - DNA, 298 bp, Homo sapiens
tatgggttaaatatattatatttaatttatatctaatttatctataaattatatataatatatactttaacaaataaagtacatatttgtttataatgtataaatatattataaatatataatataatttattatatattataattaatataattatatattacgatataaatacataattataatatagtatatatgtataatatataatatgtaatatataattatatattataaatatacaatataattatatatacgtattaaatacatataaatataattatatataatagac

SEQ ID NO: 64986 - DNA, 325 bp, Homo sapiens
tcgattaaaccacctttgtcacactgactgagcggcactgtgacctgctcgtcgtgcatcctgagaacttcattgcttctagacctacgttgctggctctgttttacttggcccatcactttggtaaagaattcacctgaccatggcacgctggctatataaaagtggtgactggagtagatatagccctgatccacatttatcacttaactcgctttcttgctgaccaaactatatcatagtacctttgttccctaagtccaactacctagctgggggatattatgaagggccttgagcatctggattctggtcgacgcggccg

SEQ ID NO: 64987 - DNA, 2280 bp, Homo sapiens
  misc_feature (1)...(2280): n = a,t,c or g
ataatttttcatggggcctttgaaggaatctccttaactacaaatcagttcttatcaacaaatatttataaaccaaatatgagttgcttgattatgtttcaaatattaatcatgttctgtgtagaactcttggaatataatatacagcagaagcagtctcaaatgctggagatgcaagtggagctcagcagtatgaaagacagagcaacggaactgcaggagcagctgagttctgagaaaatggtggttgctgaactgaagagtgagcttgcacaaactaaattggaactagaaacaacactcaaggcacagcataaacacctaaaagaattggaggctttcaggttggaagttaaagataagacagatgaagtacatttgcttaatgacacattagcaagtgaacagaaaaaatcaagagagctccagtgggctttggagaaagagaaagccaagttgggacgcagtgaagaacgggataaagaagaacttgaggatctgaagttttcacttgagagtcagaaacaaaggaatcttcagctaaatctacttttggaacaacagaaacaactactgaacgaatcccagcaaaaaatagaatcacagagaatgctatatgatgcccagttgtcagaagaacaaggtcgaaacttagagcttcaggtacttcttgaatctgagaaagttcgaattcgggaaatgagtagtaccctagatagggagcgggaattgcacgcacagctgcagagcagtgatggtactggacagtctcggccacccttgccctcagaggacctactgaaagagctgcagaaacagctagaggaaaaacacagtcgcatagtagaattgttaaatgagactgaaaaatataaactggattctttgcaaacacgacagcaaatggaaaaagataggcaggttcacaggaaaacactgcagacagaacaggaggccaacactgagggacagaaaaaaatgcatgagctccagtccaaagtggaagatcttcagcgccagctggaagagaaaagacaacaagtttataagttagaccttgaaggacagcgactacaaggaatcatgcaggaattccagaagcaagaactagaacgagaagaaaaacgagaaagtagaagaattctgtatcagaaccttaatgagccaaccacgtggagcttaaccagtgatagaactagaaattgggttcttcaacagaaaatagaaggagaaacaaaagaatcaaactacgctaaattgattgaaatgaatggaggaggaaccggctgtaatcatgaattagaaatgatcagacaaaagcttcaatgtgtagcttcaaaactacaggttctaccccagaaagcctctgagagactacagtttgaaacagcagatgatgaagatttcatttgggttcaggaaaatattgatgaaattattttacaactacagaaattaactggccagcaaggtgaagagcccagcttggtgtccccaagtacttcttgtggctcattgactgaaagactactgagacaaaatgctgagctgacagggcatatcagtcaactgactgaagagaagaatgacttaaggaacatggttatgaagctggaagagcagatcaggtggtatcgacagacaggagctggtagagataattcttccaggttttcattgaatggtggtgccaacattgaagccatcattgcctctgaaaaagaagtatggaacagagaaaaattgactctccagaaatctttgaaaagggcagaggctgaagtatacaaactgaaagctgaactaagaaatgactctttacttcaaactctgagccctgattctgaacatgtcactttaaagagaatttatggtaaatacttgagggcagaaagttttcgaaaggctctcatttaccagaagaaatacctgctgctgttactgggtgggttccaggaatgtgaagatgccaccttggccctgcttgcccggatgggggggcagccagctttcacggatctagaggtgatcaccaatcgcccaaagggcttcaccaggtttcggtcggccgtcagagtatccattgcaatttccaggtaaagacttgaaggaaaatgcattttactagtagactctctaaaaggattagttatttttaattctccctctattctctgctggntatactctatatttatatagtaggaggtatgtgccatcactgaagcatgtctgctttttttttctaggttttcattcatttagcaggaatactggcag

SEQ ID NO: 64988 - DNA, 304 bp, Homo sapiens
attaatcctgccacaatatttttaattacgtacaaagatctgacatgtcacccagggacccatttcacccaatgctctgtttggccgccagtcttttgactctctcttcaacaatggtgaggcggataccctttcctccgggaagagaaatccatggtttggtgcccttgccaataaccaaaatgttggaaagtcgagtggcaaagctgttgccattggcatctttcacgtgaaccacgtcataagatccagggtgcctctatctgctggtgatcacaccaagtcttcctaggttagcacctcc

SEQ ID NO: 64989 - DNA, 335 bp, Homo sapiens
ggcacgagcccacccagacctagttcctcaagatggttgactccggaggccagccccagctgactcagccaggctagctgaccgaggccttctagcactttctgcgaggcatgggctacatggtctcatcctgcatgactcgcctgtcccggtctcgaacagcctctatgaccagcgcatgatacattgacggcgaccgagcccgatatctaaccctgtaccagagcaccgagtctggaactctttcttctgggccaccagcgctcacgcatggcggtctgctgatgaaaggcccttgttgccctaaagagtgacccagccctcacctcccccag

SEQ ID NO: 64990 - DNA, 1220 bp, Homo sapiens
ttttttttttttggtatttctggatggtttaatcatgaatggcggtaggcagtgtaagaaaaaagttcctagagcatgataaaccttggtttctggcacaggataaacctttcatttcatggtgtacatttcacaatattaaaaaaaccccagcctggttttcatgattaaagccgtggggaaaggacaatgtttccagggagcaacgactcgcaagcacacccctggggctgtgcggtggccgtcggcggggccagcttcaaagtccaacccacaaggcacaggttttcaaatctttacctctgtgtacaagaacgtacatgaactttaaaaacgtgtgtttcctcgtctgtgtttaacaccctaacgatgatcagtttgggggagacgtacccctccctaatcacaggtaggaccacttcccaaatcaatgaaacgaccgtcctcttttgtgtcttgacttcaggtgtccggccgaacgacggagtcttttcctttcttgtcgatgcagtttctcagcctcctgttgcttcttctgctgttcagacctctttaacgtgaatgtcaattgtttgctgccaacggtggtgtcggatacactcaatgtcccattttttgcttcaattttcaaacgatcttcaagggttttgttcatcagtttctgctttgtggcagaatctttgaagcttctaaattcttctcctgctttgatctcataaaactggggctttaggactgtctgctggtcctccttgagtcgttcctgccgcttcactttttcctcctgctggaggagtctgcgttgcttcctgacctcttcaacccaggctttttcatcatctgaactctccgaactttctgcatcacttggttttccttccggctcttcctcctcttctttttcacgaagttcttgttgctctaagagtcttagtttcttcttccttttttcactaatttttgaaacaagtggattcagaagcctaaattcttcactctcttcatctacttggaagtcagggttctcaaacataactttaaatcgatcatcggtgagaatattaggaagactcttaactttctttttccatgtagatttctgcttctcctcttcttcctcaattaatttaagtgccagctctttgttaacttttggcaatttctttaactggactctctgtgcacgtgtttcttctatgttgcgtggtagcgtatctatg

SEQ ID NO: 64991 - DNA, 360 bp, Homo sapiens
ggcacgagtaaacctcttgtggaagagcctcagaatttaatcaaacaaaattgtgagctttttgagcaggttggagagtacaaattccagaatgcgctattagttcgttacaccatgatagtaccccaagtgtcaactccgactcttgtataggtcttttgattcatttagatttgagtgtatgtaatgtcttatttattagtttttaagaatatttggtattgttctttatattttgttttatgtttctgataattcttttttttataataatttattattcattattttcctgttcttttatgatgcttatgttgattttttttctcaattcttttattttttattatttttgtgtta

SEQ ID NO: 64992 - DNA, 335 bp, Homo sapiens
ggcacgagggcctttgtcggtcgctacaagcctgatgagcagccctaactgatgccacgccatgacgtccctactttgaccatcaacatactcctgagccgagtcgggttggattacgacggcttacgctgtcgatatctgcgctacaactgttccatacgagccccacggaaaggctgaaccctcatgcgccctggacaactaacgcattaccatgaggggctactcatgaccaggggcacccgctacatcgcacactccttcgtcgaaccctaattgggcaggcctgaccctcttggacctttcatctttgccgagcaccattgcccagcagg

SEQ ID NO: 64993 - DNA, 767 bp, Homo sapiens
gcacgagcccagctgaaggcaataagctgggctcaccgctgcagcagagttctgtgctagccgggcataggggcgagagaaggcccagaggcgacgtcagagagaagcaactgcgccccggtgaagagaagctcgcccatcaccggctgggagccagctttcagtgaagatggcagggccagaactgttgcttgactccaacatctgcctctgggtggtcctacccatcgttatcactcttcgtagacatgatccgccactacgtgtccatcctgctggagagcgacaagaagctcacccaggaacaagtatctgacaggggacgaggcacccacagtccctctcccataagcctgccaagaagattgatgtggcccgtgtaacctttgacctgtacaagctgaacccacaggacttcattggctgcctgaacatgaaggcgactttttatgatacgtactccctttcctatgatctgcactgctgtggggccaaacgcatcatgaagtgagcaaattggggtttcctggggacaagggaagctctccactgggcccttttcagcatgcaagccacgggccacgtgctgcttcacctcctgttacctgcagcagctcctcgatgccacagaggaagggcatccccccaagggcaaggcctcatccctcatcccgacctgtctgaagatactgcagtgaaagcccaagccctagctttccccagtgaaggactagactaggggccccacgctcaactggtagtggccc

SEQ ID NO: 64994 - DNA, 334 bp, Homo sapiens
ggcacgagcggcacgagccttttaagcgcagtgcacactcataatttaaggccttggtgtgcatggcactgaatgagcagcgtctgccgtcctgactgaacctcttgtgcctgtccactgcactcttccagcctctctaccaactgtggagctacttggcacacacatgctttgagagtgccctcaacctgctcatgcgcctgatcatcctcaagtttagcctccctgtagatctggctgtgcgccagctcaaaaacatcatagatgccttttgatgacagtgccctaaccccagacaagctccttgttcagtatggatagatgtgctattctt

SEQ ID NO: 64995 - DNA, 340 bp, Homo sapiens
ggcacgaggattgtgtggggaaccatgactgtgagtggcctaggtatgctcatgtgagaaaaggtagatggggttgtatgcatcattgcgtgggtggctgtgaggttgtagttgtgtgtggctttggttgtgcgaagctgtgtgactgcagctgctgctgggccaaggatctggcagatatgcatagggaaggctctcttcgccagtacctcctctgccgcctactgctggggagctgagctgaggcatggctggatgtagaggctgatcataatgtaaaagattagcccaaggtgctgtgtgagttcagggaggccagggtctcttggtgatgctcccc

SEQ ID NO: 64996 - DNA, 1420 bp, Homo sapiens
cgtagagcaactacacaattagtgcttcataaaacatagattgagatacttagcctatcagttttgtcctctaccttcacttttccaggtttaacagctctagttgctttcatcttttttgtatatctgtggtatattgaaatgactaaacagtaagttttgattgagaattctaggttgagaaataagtaggctgaatgtagtaattccagcccttatacattggctttctgctcctatcaggaggttcccatgatccctcggccccactatgcccaacctggctgtgtctacttcatctgtttgctccgagatgacttgctgcttcgtcagggtgactgtgtgtatctgatgagggatagtcggcgcacccctgatggccacccggtccgtcagtcctatcgactgttatctcacattaaccgagataaacttgacatctttcgcattgagaagctttggaagaatgaaaaagaggaacggtttgcctttggtcaccattatttccgtccccacgaaacacaccactctccatcccgtcggttctatcataatgaactatttcgggtgccactctatgagatcattcccttggaggctgtagtggggacctgctgtgtgttggacctttatacgtattgtaaagggagacccaaaggagtaaaggagcaagatgtgtacatctgtgattatcggcttgacaagtcagcacacctgttttacaagatccaccggaaccgctatcctgtctgcaccaaaccctatgcttttgatcacttccccaagaagctcactcccaaaaaagatttctcgcctcattacgtcccagacaactacaagaggaatggaggacgatcatcctggaagtctgagcgctcaaagccacccctaaaagacttgggccaggaggatgatgctctacccttgattgaagaggttctagccagtcaagagcaagcagccaatgagatacccagcctggaggagccagaacgggaaggggccactgctaacgtcagtgagggtgaaaaaaaaacagaggaaagtagtcaagaaccccagtcaacctgtacccctgaggaacgacggcataaccaacgggaacgactcaaccagatcttgctcaatctccttgaaaaaatccctggaaaaaatgccattgatgtgacctacttgctggaggaaggatcaggcaggaaactgcgaaggcgtactttgtttatcccagaaaacagctttcgaaagtgaccctcaaagaatgagaacctcaagcatctgggatccagtggagctaatcagtcctgcctcctgctctctgggtatagacaggggtgggaagggtccatctgggcaaggggaatggggccatgttgttgacattaggtacttaataagccttggagctagtggagagggagag

SEQ ID NO: 64997 - DNA, 1924 bp, Homo sapiens
ttttttcccaagggctttaatttgggtaccccccgggttttccccctcccccctttttaaaacccgcccccgggaatttatttttggggcccctaaaaaaaaatttttctttcccacccccgggccttaaaatttgttccctttaaagggccccccctttttttttttttgaaagctaatgcactgtttatttgggggattggggggaagcaccctgccgctgctcactggtagccagccagctgcaggatgggggtgtagcaagtacgatgggccatgcacttctggcggtcgatgaagacactgttggtcatggcggtaacatccttctccaggctcatgtggatgtcctcgaggttgcaaagggactgctccccttctagaagcttctcccacagcgctgtgatggacttgtacagctcctccacctcactcaccagcttgggggtgttggggggtgtgagctggggctggggagggcagaagtatgcacctactggggtggaggggacccaaaactcccaatgggagctggcaggaggtcctgggaagacgccatgaaaggatcctaccaggaaagcggctctagggcagagcataaattacgagggtcctcccagggagcgcgggcctgagtgggaatgagtgacccgcgtgcaatctcgaccctgacaggacaggactggcctcagccgaccaggctcagttctttccattcctgatatttgacggaaggaggcacccagttccttgaaggaactgaggggcagggaaggaagaaaggtacttaggctcagaaggggcccaccaggcatccgttaacaagggaaacaaaaggacggcccatctatgcctgtagcccaggcgtaggtcatactttcctccagaggtggggacagctccctcagggcagcagggaatggccctctctggcctctctgtccccgtggcctccaggagctcaccttgtctgaaggagcttcctcccgggaagatgaggtagcacagggtggggtgagaccacgtgggcacaggtccctggcacggggaggcccccgacccatgacctgcccagtgtcatgtctatatctgtgtgtttaaggcgtgcttgcatgttgtgtgtggccgcagagtctccctcccctctcagcacctgtgggggatgtgtgtgtggagattggagtgtttattggagagggtcgcagcgaggaggtggatgggggcacctgggactgcctcagaggcccaggcagtacctgaactgggctgcatcgcggcacagctgcatgttgggccggtgtgagagcagctacagccgggtctgggctatgtgcagaggttcctccttgtccttgatggcctccttcagtgccaccacgttgtgttcctgatctgtgatttcccgcagcatctgcagacaggacagtgccccttgggcctgtgcccccatgcccgggcatatggaatgtagagaccagtctggtcctacccagctcctggggctgtgtccagagggtggtcctgaccagtggctctggggaggcgtgggtgaggggaacaatgtgcacggggcccccagcgggctctggagagtcaggcagcctgttgtctcttagctctggtccaagaacccccatccttggtggtcaccaggacccaaatcctgctcaaggactggggactcagaggtggtaaaggccatgctgaggccctagagtcagagccctgcctgccaggccaggactcttggggacctcccaggcagtcaatgctccccagaccagctcctgcctccatcctccccacagctcctccttctcagtcatgggggttgcaacacactgcgatcatacccagtgtcacctggttttacataggtttacggagaggtgacacttgcttctggggtccctcgggataagtg

SEQ ID NO: 64998 - DNA, 565 bp, Homo sapiens
  misc_feature (1)...(565): n = a,t,c or g
attacattaaaataaatttcactcatttctttttattttttaatgtgtgcctgttagatcatttaaaaattacnnnnnnnnnnnnnnnnnnnnnnnnnnnnnnnnnnnnnnnnnnnnnnnnnnnnnnnnnnnnnnnnnnnnnnnnnnnnnnnnnnnnnnnnnnnnnnnnnnnnnnnnnnnnnnnnattaaatatatacatacatacatacatacatacatacatacatacatacatacatacatacatacaaacaaaaactaaaaacaagttaaataacttgtcaaggtccaggagttaaacctgagaatgtgtgtctgtgctcttaaccagtatactagttgttcccaatagtggctgcatatcagaatcacctgtgaagtttgttaaactatcagtgtctcagccccacctctagagtctgactcagcaggngacatttatcctatagtactttagctgcctgtggagtgacctttttaaaggtactactttgcacccagaggattttcagttgtgttgttgacagacagattgacagtcttggttcttttgacttttagtcg

SEQ ID NO: 64999 - DNA, 1209 bp, Homo sapiens
ggcacgagcaggtctctgcccttcatagacgcataaaggctatcgtagaggtggctgcaatgtgtggagtcaacatcatctgtttccaggaagcatggactatgccctttgccttctgtacgagagagaagcttccttggacagaatttgctgagtcagcagaggatgggcccaccaccagattctgtcagaagctggcgaagaaccatgacatggtggtggtgtctcccatcctggaacgagacagcgagcatggggatgttttgtggaatacagccgtggtgatctccaattccggagcagtcctgggaaagaccaggaaaaaccacatccccagagtgggtgatttcaacgagtcaacttactacatggagggaaacctgggccaccccgtgttccagacgcagttcggaaggatcgcggtgaacatttgctacgggcggcaccaccccctcaactggcttatgtacagcatcaacggggctgagatcatcttcaacccctcggccacgataggagcactcagcgagtccctgtggcccatcgaggccagaaacgcagccattgccaatcactgcttcacctgcgccatcaatcgagtgggcaccgagcacttcccgaacgagtttacctcgggagatggaaagaaagctcaccaggactttggctacttttatggctcgagctatgtggcagcccctgacagcagccggactcctgggctgtcccgtagccgggatggactgctagttgctaagctcgacctaaacctctgccagcaggtgaatgatgtctggaacttcaagatgacgggcaggtatgagatgtacgcacgggagctcgccgaagctgtcaagtccaactacagccccaccatcgtgaaagagtagccggcttcagtgcctgccttggggtgaggaagacacctctgccccagtggattagcaagtgtggcaggcttaacatgtccaggttctccccaataacattgtccaggtggttttaaaattcccaggcagggggagagtggcatggggagtgacttcttaatgggtaaggggctgcttacttctggggtattggaaatgtttggggactaggtagaggtgaatgtactaaatgccactgaatttgtatacttcagaatgtttgttatgtaaattttacctcaactaaaaaaaaaaaatgcccaggtaaaaaaaaaaaaaa

SEQ ID NO: 65000 - DNA, 1523 bp, Homo sapiens
cttccggtggtggttacaagtaacatcaaaggtcatctttttctggcttcttgtcctttatcttcttcaagttgctgcaatagtattattctgctccacttctagcccacacagcatacctctgacagaggtgattgggccgatatggctgatgctgctcctgggaactgtgcattgccagattgtttccacaagaacacccaaacctcctctaagtacagggggtaaaagaagaaggaaattaagaaaagcagcccatttggaagtacatagggaaggagatggttctagtaccacagataacacacaagagggagcagttcagaaccacggtacaagcacctctcacagcgttggcactgtcttcagagatctctggcatgctgctttctttttatcaggatcaaagaaagcaaagaattcaattgataaatcaactgaaactgacaatggctatgtatcccttgatgggaagaagactgttaaaagcggtgaagatggaatacaaaaccatgaacctcagtgtgaaactattcgaccagaagagacagcctggaacacaggaacactgaggaatggtcctagcaaagatacccaaaggacaataacaaatgtctctgatgaagtctccagtgaggaaggtcctgaaacaggatactcattacgtcgtcatgtggacaggacttctgaaggtgttcttcggaatagaaagtcacaccattataagaaacattaccctaatgaggacgcccctaaatcgggtactagttgcagctctcgctgttcaagttccagacaggattctgagagtgcaaggccagaatctgaaacagaagatgtgttatgggaagacttgttacattgtgcagaatgccattcatcttgtaccagtgagacagatgtggaaaatcatcagattaatccatgtgtgaaaaaagaatatagagatgacccttttcatcagagtcatttgccctggctccatagttcccacccaggattagaaaaaataagtgctatagtatgggaaggtaatgattgtaagaaagcagacatgtctgtacttgaaatcagtggaatgataatgaacagagtgaacagccatataccaggaataggataccagatttttggaaatgcagtctctctcatactgggtttaactccatttgttttccgactttctcaagctacagacttggaacaactcacagcacattctgcttcagaactttatgtgattgcatttggttctaatgaagatgtcatagttctttctatggttataataagttttgtggttcgcgtgtctcttgtgtggattttcttttttttgctctgtgtagcagaaagaacttataaacaggtgggtataatgtagacttccgaataagaatattttatcgttttcataatattaaaagtattcctgaagtactttattatttcattatatcatttttacctaattattttttttttttgcttttatagtacctaaccaaataaaatcttaacaattc

SEQ ID NO: 65001 - DNA, 410 bp, Homo sapiens
cggacgcgtgggcggacgcgtgggtggtcagcctgtctgacatccaggttgtgctattaaccaagaaggaagcagatacttggaggcttagatgacttctgcaggatttatattcagatagaaagggtaaactgtttttgtttgctggcaggagtaggtgcatatataccagcacttcaagtttggtatttccattcaggacattttatctctgtgcaaagaccggagtataagctgatgagtggatcaagatattacgctggaaattgtcacaactaagaaaacagctcaaccaaggggaaggcacgatccgatctcggacgatcatctttagatatatcttatatgccaaggaatgcttatggaccatgagcaaatgggaaagctctccagatgcttggataaaattg

SEQ ID NO: 65002 - DNA, 1171 bp, Homo sapiens
gagctggtgaaatcctctgactcatagattctcttttgtccacagacagtcatctcaggagcagaaagaaaagagctcccaaatgctatatctattcaggggctctcaagaacaatggaatatcatcctgatttagaaaatttggatgaagatggatatactcaattacacttcgactctcaaagcaataccaggatagctgttgtttcagagaaaggatcgtgtgctgcatctcctccttggcgcctcattgctgtaattttgggaatcctatgcttggtaatactggtgatagctgtggtcctgggtaccatgggggttctttccagcccttgtcctcctaattggattatatatgagaagagctgttatctattcagcatgtcactaaattcctgggatggaagtaaaagacaatgctggcaactgggctctaatctcctaaagatagacagctcaaatgaattgggatttatagaaaaacaagtgtcttcccaacctgataattcattttggataggcctttctcggccccagactgaggtaccatggctctgggaggatggatcaacattctcttctaacttatttcagatcagaaccacagctacccaagaaaacccatctccaaattgtgtatggattcacgtgtcagtcatttatgaccaactgtgtagtgtgccctcatatagtatttgtgagaagaagttttcaatgtaaggggaagggtggagaaggagagagaaatatgtgaggtagtaaggaggacagaaaacagaacagaaaagagtaacagctgaggtcaagataaatgcagaaaatgtttagagagcttggccaactgtaatcttaaccaagaaattgaagggagaggctgtgatttctgtatttgtcgacctacaggtaggctagtattatttttctagttagtagatccctagacatggaatcagggcagccaagcttgagtttttattttttatttatttatttttttgagatagggtctcactttgttacccaggctggagtgcagtggcacaatctcgactcactgcagctatctctcgcctcagcccctcaagtagctgggactacaggtgcatgccaccatgccaggctaatttttggtgttttttgtagagactgggttttgccagcttggtcaaca

SEQ ID NO: 65003 - DNA, 1167 bp, Homo sapiens
ttttttttttttgattgggtaaaatatatacaagataatgctatacttttaaaagagaaaaagcactttacattgtttaggtctttggatctgcatatgtccctgaggtaagtattccagccatgggaaactgaagcacagagaggtagtcacccaccaaagctcagggctggcctccagagcttgaacccttgcctgagctggggtcaccagcctgggtgggccacggagcgatcatcatttctccatctgatcggaaagtcacccaccactctgttctggggcccagcccgcctggctccaggcaggctcggaggccgtgctctcctggacctggtgcatctggctgcagccagcactgggcaggaaaataccgctggagcagtgccaggtgcaggacgtccccactacctgcttcctcctgggtctggagggccaccatgagcccacaatcccggccaggcccaagccggtggctgaagtgggcagctgtgtctagaagtaaggcaatgaggtaggcggcttcctggggctctgggtcttccgctaggtactcttctaggccgtcgagcagcagaagggagggggctggccccggggcctcatgggcagagcacaggagccggaaaagctctcgggttgagggtgggtactggaagcggatcttctggagtcgcattgggtctagagtcgttccggtcccgcggggcatgctttgaagaggccttcgtgtcaggaagaggactgggccttggccctcccccgccgcctctagggccgcagcaaatagcagcgctgtttttccagatcctggtgtaccgagcagcagcaaaggcggtccggcggcaggcatgttctcctccccggaccaggccgcaccgcccctggttagcacccgcctcagcgtctccgccattcgccgcgtagctctgaccaatcggtgggctcgttcccagccttagtcccgcccaagccgtggccgcatcgtagagatggggtttcaccatgttgggcgaggctggtctcaaactcctgaccttcagatggatccgcctgtcttggcctcccagagtgccaggattataggcatgagccactgtgtctggcctgtcttcacatcttgacagaagaagatttaccatagaggagaatcatggaggaatgtac

SEQ ID NO: 65004 - DNA, 352 bp, Homo sapiens
ggcacgagaacaaaactaggcggttgaatgagaggttcctaagagtgctgggcatttttattttatgaaatactatttaaagcctcctcatcccgtgttctccttttcctctctcccggaggttgcgtggcccctctccttgccacttacttccatctcttcgctccgcctctcgcgtctcccctcccgatccccccacctctcttccgtcttcctctcctcattcgctcttttccccacctgcttcgctactctcttccttctcgctgcttctccctcctcctctctctactctcctcttcgtcttccaccctcgtcttcgctatatctcagctctcggtccgcgatagtg

SEQ ID NO: 65005 - DNA, 1634 bp, Homo sapiens
ttttttttttttctttgctgttcacaacttgtactttatttttctcaaaaatttttacttatgctttttgtcattatccacagtgtttttttttttaaagcctgagccactttgtggttttagcctcaatataataatcatccccttactcttagactaattccttttcccctgtcactttgcctgtatactctgtaaaaatgaggaccttagaaaatcaacatttcctgtgaacttgagagactatacaagcagtgcccaaatcagtaggattaggcaggtaaaaccagttggatagcagatatattatgatctgttggacaaaggtatagttgtgtgcatgtctacaaggtcatcgtgattcgccattagcttaaggatcatgtaggttgaccagggtgaggtaggactatccacaggattgtgtaaattgtggtaggggatgcagtattcaatattcatgaattaaacacttagctaactgctttcctgaaaatggtctgtgttctaaaagacaaagatctaggttttttgctgttttttactttaacttatgaagattcaagtcactaatatgttacttgctctggtttaaaatgaaagcaactggctatggtaaggtagagaagacagctgaattgtatcagaatatttaagacttttaaattaagttctgagttacctccccttataaaaatatatgtcaatatactaaatacccaacaaagatccaggatgtgggatatttaaaaatacatttctcttgtatcagcaccaaaaataccagtttctgtacaacccgtgtcaagtttttaagtatacacacattaaaattatttctgataaaaaaatcacaaactccacagaaataattaaagatatatgcaaattactttcaaatacattttgacatcaaagtcaggcaattcccttggaagaatgttataatgaatgtcactgaatttttgtagtaagatgtttgacgtcaactttgattatgggaatacatctcacacacaggaggcactggtatttagaaacttaggaaaattactagaattgttaagactgaggtgaagaatttgtacagccttccacaatttcaaagaggtagtgatagatacttgtcctcctggcaatatcaaatgcagtttcttccaagttgtttttcagccctggtttgacgtaacggttcatcaggaggagttctagggtatccttgctgtctctgttcccagcagcaagatgcaagggggtcaagaggccttttgtttgggcattgatatctgcatcatgctgcagtaagaaagaagccactctggtattattccacttacaagcactgtgcaggggcgtccagccatccacagtcactgcatgaacatcggccccctgtgcaatgagctcctgaacaatatctaagtgtccactgtaggctgctcgatgaagaggggtatactcatcttcatccctagtgttcacgtgagtggccttttcagaaagcagtctccgcactgtggtaagctagcatgacactttgcagcttaatatgtgctttcatgtacattgtctcatttggtcctcacaatcaagacataggtatgatggccataacagtaaaggcaggtcttctg

SEQ ID NO: 65006 - DNA, 1468 bp, Homo sapiens
attcaacctcccactggagagcccctgctggcaaacgaccctactcggacagaggaagttcaggatgacacctggggagagaccaccacggccattacaggcacctcggagcacagcatatcccaagaggacattgccaggatcagcaaggacatggaggacagcgtggggctggattgcaaacgctacctgggcctcaccgtcgcctcttttcttggacttctagttttcctcacccctattgccttcatccttttacctccgatcctgtggagggatgagctggagccttgaggcacaatttgagaggggctctttatctccatggcattcaaactcctcattctgctcatagggacctgggcactttttttccgcaagcggagagctgacatgccacgggtgtttgtgtttcgtgcccttttgttggtcctcatctttctctttgtggtttcctattggcttttttacggggtccgcattttggactctcgggaccggaattaccagggcattgtgcaatatgcagtctcccttgtggatgccctcctcttcatccattacctggccatcgtcctgctggagctcaggcagctgcagcccatgttcacgctgcaggtggtccgctccaccgatggcgagtcccgcttctacagcctgggacacctgagtatccagcgagcagcattggtggtcctagaaaattactacaaagatttcaccatctataacccaaacctcctaacagcctccaaattccgagcagccaagcatatggccgggctgaaagtctacaatgtagatggccccagtaacaatgccactggccagtcccgggccatgattgctgcagctgctcggcgcagggactcaagccacaacgagttgtattatgaagaggccgaacatgaacggcgagtaaagaagcggaaagcaaggctggtggttgcagtggaagaggccttcatccacattcagcgtctccaggctgaggagcagcagaaagccccaggggaggtgatggaccctagggaggccgcccaggccattttcccctccatggccagggctctccagaagtacctgcgcatcacccggcagcagaactaccacagcatggagagcatcctgcagcacctggccttctgcatcaccaacggcatgacccccaaggccttcctagaacggtacctcagtgcgggccccaccctgcaatatgacaaggaccgctggctctctacacagtggaggcttgtcagtgatgaggctgtgactaatggattacgggatggaattgtgttcgtccttaagtgcttggacttcagcctcgtagtcaatgtgaagaaaattccattcatcatactctctgaagagttcatagaccccaaatctcacaaatttgtccttcgcttacagtctgagacatccgtttaaaagttctatatttgtggctttattaaaaaaaaaa

SEQ ID NO: 65007 - DNA, 2395 bp, Homo sapiens
ttgcctcgaagcataaacacaaacactttatctatttaaacatatagtggaaaaaatcaggatttctccagctttgaggatactgggaaaagtagtttaggggacatgttctcacctatcagagatgatgctgtatttaacaagggaagtgatgagtccataggcaaaggagatggctttgactttctaccgcggctgaactcagtgtttccttcaagaaaaaatccagtaacttcaagtacttcagcattgcattctagtcctcttaatgtttttatgggatctccagggaaagaggaaaatgaaaaccgtgatctaacagctgagtctaagaaaatatatatgggaaaacaggaatctaaagactccttcaaacagttagcaaagttgggcacatctggtgctgaaagtggaaatctaaatacctctccatcatctaaccaaacaagaaattctgagaaatttgaaaagccagagaatgaaattgaagcccagttgatatgtgaacccccaatcaatggatcctcaactccaaatccaaagatagcatcttctgtcactgctggagttgccagttcactctcagaaaaaatagccgacagcattggaaataaccggcaaaatgcaccattgacttccattcaaattcgttttattcagaacatgatacaggaaacgttggatgactttagagaagcatgccatagggacattgtgaatttgcaagtggagatgattaaacagtttcatatgcaactgaatgaaatgcattctttgctggaaagatactcagtgaatgaaggtttagtggctgaaattgaaagactacgagaagaaaacaaaagattacgggcccacttttgaaatttcagtgaataccttaatgttctgtaatttgggaagtttctggcaacacagaactacatagaatcagtattgttttcatggcctccagggaaaaaatgtttttcaagtaagagtaaaagggtgatgggattttataccaacaactgtttcatcttaaaaatatgtatatttttatattaaaaattgtacagtatgtcatctacccaataggaaagtcaacaggatctttattttttgaaagctttagccatccactaagtgccctttttcataagagaagaaaattgtgcataaaaattggttatgtttgttttttagtcatcttttttaacatatatttttgattgacaaattgcctttcaaatttttggggctagttgagatttaaagagtttgatatgccttctatttttatggagaaagtaattttaaaatggcaattggtgtttctaagccattgactaataaaacatagggttggctagtaattattttgttaacttgatgaagtcaagtatgactattatttattgtacatttgataagacaatttttggaattttgaattgcacaaattacatgatatcttttgcatttatgttactatattgtacttctgacaaatctttattcctgggtggtatttttaagatatctttacctataaaaaatgtttaaggttcataggactcgacaagagctatctggtgattttctcattagtaacatgcaacgttgtactgcaaaatttcaatcaacatgacaacttataatgagtggagatttcatattaggtactaaatattatagtattatttctattttctttttccaaataagaagcttggattattttattttgggggctttatcattaactttaattctttctgtactgggtataatatttttatattattggccttaccataaaattatttaggaaaggttgtcaaaataagttatacctctttggcaatagatagatgtatacatctacctactatgatctacaattttaggttaagtgaagcttgggggggctactgacttggttaccttcttgtctcttgtcccaaagatttaaactatgtacctttgtatagctcttctgccccattttgacttctgagatgaaagtattttctaaaattaaaaaaaaaaaaacaaaaaacaaacctttagctcactaactttatgggtttctgaagtgatggaaatttttagggatttttttaataagcataaacttactaataattacttccaaaaataaaaacaggaatattacttttacccagtgtggtttatagcatacatttgtactgaagcatatagggatgttaatgtgatcttttcctgacagattatgaaagcattatgacttgtaacaagtttccttgtatatcactaacaggtttagaagacataaatattagtgtgttttgcctacatggtgtatttaaatctattaatattttcctgttgcttttttaaaaaaataaatacacataatgtaaaaaaaaaa

SEQ ID NO: 65008 - DNA, 1774 bp, Homo sapiens
cggacgcgtgggcggacgcgcgggcgaggaactagaggcggaggcgggggcggaggaactggagcaggcggcagaggggaaggaagtcaggttccaggcctctctgccgctgaccaggatcgatgaggaagaggctgctgcagccccggaggccgagacagagcgggtggagggggaggaataggacaaggaggagacgcagagagacggcgcggagagcaaggagagggatggggaaggacgcccggccaaaagccaggaagaggggaagcgcctctatggaagggacgagtttgaggacctcgagtggtccgaggaggtccagaagctgcaggagcagcagctgcgcagcgacctcctggaccagtaccgttccctgctggtggagcggaaccgctcccagcgctacaacctatacctgcagcacaagatcttcgaggcgctgcgcagaaagaagggcctggaggccgctgaggtggctgaccggggcgcagaggccgaggcccccgagaaagagcaagcgtacctgcgccatctgggcatgctggaggagctgaagaagcagcaggcagacgacctgcagtggtaccaccaggagctgggccagttgaagcggcagtgccaggagaagctcaccagggtggagaaggagtggcgacgcttccaggcactcaagaagcaggtggtgatgcaggccatgggcagctgtcggatgaggggcgggcgccaggctgctctgcgagaggtggagcagatccaggcgttggaggataaaaaggagaaggagatgagcgccgtgcggctggagaacattcagctgaagcagagcctggtgcattttgaaaccaggatgaggacccaggaggacctgacccagggtctgcttcttattgactttgaacagctgaagattgagaaccaaaccttcaatgagaaaattgaggaacgaaatgaggaacttttaaaacttcgcagcaaggtgaccaacagtgtgcaagtaataacccacgtgaaggaaaagctgcacttcatggacatggagaacgcgtgcaaaaagacacagctggcagaaatcgaggcccaggccgccctaggaagagacatcctgaccaagacgaagcaagcccgagaggggctgcggacggacaacatcagactgaatcagaagtgcggccttctaggcaaggactcacttcttcgggacttggaagaaaaggtggacaagaccgaactgcttcaccggcgcctggaatccctgaagcgccaccacgctagcctcactttgtcctgcagaggcgtgaggcagaagatcagggaggccaaagcctttctcccttcttgaccagatcgatgagaagagtctgcaaaacacttcatcctcaggacgtgctgtcctgctttattttaccttcgttgctatttaaaaaggcctgtgttcatttggggacgggactcttatttttgtatttattcttcaaaacgttttagcttccaaatcagtgctgagccccaacccccgggttaggagttttatcctgggattgagcaaaaataggtcccagaaaagcaaacaaagggtgatttaatgtaactgacttctcatgaaaaactgtcaaaagtctcaagtctgagcaattctataatttcagtgatgtaatactaaagagtactgttcctctttcatatgtaggagggtttaaaagttcagcgaatgggcaaggtacaaaaaaaccctgtgcattaagctaattattaaattctttggatttattaa

SEQ ID NO: 65009 - DNA, 1594 bp, Homo sapiens
cggacgcgtggggaaaccgctgtgctgtgggcgcagcgccgagattgattcaccttcacctgtgctgcactccagctgacccaagtaggaagccagacgagctgtaaaacatgaacggaagagtggattatttggtcactgaggaagagatcaatcttaccagagggccctcagggctgggcttcaacatcgtcggtgggacagatcagcagtatgtctccaacgacagtggcatctacgtcagccgcatcaaagaaaatggggctgcggccctggatgggcggctccaggagggtgataagatcctttcggtaaatggccaagacctaaagaacctgctgcaccaggatgctgtagacctctttcgtaatgcaggctatgctgtgtctctgagagtgcagcacaggttacaggtgcagaatggacctataggacatcgaggtgaaggggacccaagtggtattcccatatttatggtgctggtgccagtgtttgccctcaccatggtagcagcctgggctttcatgagataccggcaacaactttgaaaaacttgctctctttcaatactcccaatgaagatacatttcactcaccctccacccctgctattctgccatgtctttccctctctctgcatagccagatttgaagtgactgatacccaccccaaaccttgctgttcacagtctccaattcttcatattctaatgggaaagtaaaggtattgtttgaaggaaaactgaagaaaagacttggcttagaacaaatgaggagttatatattttactaggacttttgatagaaattcagctacaacccaaagagagaaagattgagtcttcctgtcaccataggcaataccttttttcttagctggcatgccataaaggccagctatgtgatattagaggaagaaaggatttttctttttaatgatcttccttgggaaattattgtggcctttatttaatttctaactacgtacctgggtgcctatatcgacaaagagtgagaagagcatttttacttttttaaaaaagcaaatacatatatacacatacgtatgcaaatattatagtataatagtgatccctatggagaattaaaggtgagaaagctactttgtggtgatctaggtttctgataaaagggatgatcttaactgaagaatttaaagagatacttaaacagagcaaatgtagtaggaacaagggagtgagccttataagaggacgttcagtctcatttattaaaataataactgagactgggagaggtggctcatgcctgtaaatcccagcactttggtagcctgaggtgggagattgcttgagtccaggagaccagcctgggcaacatggcggggcctcatctctatttaaaaaaaaaatagaaaaaaatgtaataactgaagcaactaattaaaaatcttagaagaacaatatttattcttataacagccaactatggggagttattataaggtaaattgccataatccagcgctgctcacatctaaaaaactttgaggtgtaaaggtaaatcgtaccaatctctggggctgccctagtgacttttttgatacctcaga

SEQ ID NO: 65010 - DNA, 628 bp, Homo sapiens
ttttttttttttgccattcatttgtttctttattcaatccctcgcaccaatgcctctctggcccagcgctgtgtggggagctgggacatggggtcatgggactgccccaaccctctgggaactcataggctggcagggtgggaggaggcaggcttgtggctgtaactgtgggtaggagtttcacgggcatctcaggctggccctggacccctggaaggggggctgggtttgggggttaagtggagtcggtcagggatgagggtgggaaggggacagcaggcagaggatgtggtgggcaggtggctgaggcctggagggacatggggaggggccaggggccaggcttacagggcttctgggtaaagctgtggagctgagactctactgcttgtgtggagctaggagaggtcttgaccatggatggtggttagctctgagctctgggcaggtggacgggtgtggggggacaagtggcagtgcggagtcaagcagagggttggcaaggccagctcgttcccctgggcctgacccctctgctctccgaagccacgagggcagggcagggtgatggtgcactgggtcacctcctgccaatcaaactgtccttttccccttcagtattgaaggg

SEQ ID NO: 65011 - DNA, 1088 bp, Homo sapiens
ttttttttttttggtcataccacttttatttatattgttatctatgttacattgtttattcaatatagaaaaaatatgaatacattcatagtattctcttttaatttggtaattccacattgtcaaatattgactgtttttatattgggtgtcctacccaattaaaaaaaaaagaggaagaatgacctggcagacagttcttgttgtgccatgttattgatataacagcaatatcatatatgtctctttttttaaacacctagttttgaaaagaccaatgattaaactactgtttactggctcagggaaatgttttaagaaatagaaattaattcattctttccccaagaaaaactttaaggtaaacatcttaaaacacctaagtgatgaaggagaaaatttgtattccttaaaaaggggtcagtgctgaaagaaaattgcatggtagaccccactgcacaacggttctgcaccaaaagaaaaatgaggaccatattaacataattatgttggagagaagaaaaacccacacttagaagtcaggtttcttttaaaactccttgttacaaatagaatcaatgattatatctcagacataataatgggtcaaactcacaaaatcagtgctacaaaatacagtatttttccatcacttttagttgtaatgtacactatgtacagaaagataatactacctattttaaactaaatatagatgaacaaacagcgttaaaaaccagaatcagggcttataaatagtgcagaaaatgcaaacgccaaaaaaacgatgcctcctatgattgtcacagttctgacagagattttctgtgctatcattcttcctccaattactgccaatcccgtgcacaggcagtgccccacagttccacccacggctacaccataggggtcctggaagcaagcgtcacagcattaattcaaaaccaaggtgacaactgctgcttgagaaccataacaattcagaagcactaaaaatggtggccaacaattaaaaagcataatagttataaaaatgcaggtgtgtaataaatttatgaaaggtgcggacgcgtgggcggacgcgtggg

SEQ ID NO: 65012 - DNA, 1404 bp, Homo sapiens
aggagctggagagctacacaggagtggggaggaggaggagccacgcgttccagtatatgctttaatcaagtggtcccttatatcaaacccagattgttctctgaaatccagggaggtgaagtgacttgcttagggtcattctgtaagctagtatagcacagaatgggtttcccttccctgatcctagcagttgtaggctgcaatgctgttccgtatcaggaactgcccaaggttgaaacagttcagccctgaagggcctagttatggtgaaagcagcaactgactccaggaaaggaatggcattttgttctgtaacatagccatgttgttcaaccctacaggaggtgttaaatcactctgaccatcaccctatcctttttctttcaaacctggttgagggaacctacacttttcacctgaaagtgaccgatgcaaagggtgagagtgacacagaccggaccactgtggaggtgaaacctgatcccaggaaaaacaacctggtggagatcatcttggatatcaacgtcagtcagctaactgagaggctgaaggggatgttcatccgccagattggggtcctcctgggggtgctggattccgacatcattgtgcaaaagattcagccgtacacggagcagagcaccaaaatggtattttttgttcaaaacgagcctccccaccagatcttcaaaggccatgaggtggcagcgatgctcaagagtgagctgcggaagcaaaaggcagactttttgatattcagagccttggaagtcaacactgtcacatgtcagctgaactgttccgaccatggccactgtgactcgttcaccaaacgctgtatctgtgaccctttttggatggagaatttcatcaaggtgcagctgagggatggagacagcaactgtgagtggagcgtgttatatgttatcattgctacctttgtcattgttgttgccttgggaatcctgtcttggactgtgatctgttgttgtaagaggcaaaaaggaaaacccaagaggaaaagcaagtacaagatcctggatgccacggatcaggaaagcctggagctgaagccaacctcccgagcaggcatcaaacagaaaggccttttgctaagtagcagcctgatgcactccgagtcagagctggacagcgacgatgccatctttacatggccagaccgagagaagggcaaactcctgcatggtcagaatggctctgtacccaacgggcagacccctctgaaggccaggagcccgcgggaggagatcctgtagccacctggtctgtctcctcagggcagggcccagcacactgcccggccagtcctcctacctcccgagtctgcgggcagctgctgtcccagcatctgctggtcatttcgccctgacagtcccaaccaga

SEQ ID NO: 65013 - DNA, 1968 bp, Homo sapiens
ttttttttttttcatttgagacggagtctcgctctgtcacccaggctggaatgcagtggcacgatcttggctcactgcaacctctgcttcccgggttcaagcagtttcctgcttcagacttccaagtagctgggattacagacatgccaccatgccaggctaatttttttaatatttttagtagagatggggtttcaccattttggccattctagtcttgaactcctgacctcaggtgatctgcccgccttggcctcccaaagtgctgacattacaggcctgagccactgcgcccagccaataccatgagttttaagcctcacatcgtcacttgctgtcactgccagtgcctgttttattcatattgctggacaacagacatatgccaccaattgtatgattaataaagtctttttctggccattttgtccattataaaggaaataaactaattgttaacttgcatagattacttcttagtttcctatgctaccaccactgccaagggagaaaaaaatacatcattttgtaatgtctttagtatttctttataactagtgttaaggttttgttaattttattgtatacatttgtaacatttattaggagccttttaggttccaaaacaaacaaaaggcataaaaaagtctagcttagaaccacttttcacttgctttcatttttaattttattcacttaacagctaacatctttcttgtttcttgttttttccattatatggttatcgattcaactcttgctatattccttaaatttgtatgtatcatcagaagaaagagatgaacaatttagtgtagatattttattctggagaataatattcaattaaattatttctacagcaggccagtaacaactagattatttgtcctttctcagtataattttaaagagcattttgttttattgtcacaatttggtaccactagtcccaggtaaccattgggccaaaggatcagttgagaaacagttaaggatgaattagcataagttatggaacagtgttagaaaacaactcaaaagtatattctttattaatgaggtggtcattattacatttgtgtcaatgaagggcagtgtagttattttaaaatgactaatattttctccccaaatacagaataattcagatgggcaaccaagttttcaagagactgctgtaggtgaagtctgtctagccaaggcagaacacttacaggagtccctaactgtgccacccttggaatgggttagtgtacaggctcagaatattgtggattacagtttttcagagaaaactaccacagatgtagacaaaaatgatctctgaaagcattgccagcagccaggtatgttccttagatttccacttaggtttggcattttggcagataagctaatcttgtataaagcatcacattttactatgcttagtgttcctgggttgtatttatctacattattagagggaatttttattttaaaaaaattgtcattcatgagaagaatgggagttcatgccacatagtattttaccaatttatataaagtgggaaaagtctttaatacttcatgatcacttgaattaaagtttttgtatctctggaaagtagaatagtgctttcatttgaatgaaaagtgtttatagattcagaaagagagatgatatctttgtatcttgatttatatacagaccatttcagaggaagttaaatgtcttacaaatccaatactttctaatgctctaacagtgttggctatttaaaagaacatgtggcaagttctatatgaatattcttggtcatctcgactaattctgaggcaatgatggacagagatgctacttcttatttaactctaggcatgttgacttttcaaagcggtttccttatttctaaacagagatgatgatcaatgagttactaattctttagaggaaaaaatgcataatttgagtgtggaagtgat

SEQ ID NO: 65014 - DNA, 5214 bp, Homo sapiens
acggccgccccttttttttttttttcacagttccatttttaatgtttaaatttcatttcaaaaagcaggtctgtagtttgtaaccatgacaattaaaatctgtgctaatgcacggcagtctataacaattctacaagccaatcagacagtacgtgacatttcaatgagtaaaaaagagcataaaactgtatgtgtaagaacaaaatgttaaaaggcctaccacaataataaaaaaccgtcaattacatcatcacattaaaataagccagatgtacaaaagtctgagacagagaagacaaaaggacaacacaagatatttgttgaaaaatgtttgtgctctttgggcacttaattaaacattgcaaaatcaacatcatcttcttcttcatcagactctgcaaaatattttacttctttcctagcccgaccggttcgtggcagagaaggtggctcagtagggaagtctgaggggaagatgtccacatctgaatcctgatcaaaagatgtcttcttcggtttcttgcttgttgttttggatgttttcctgccagggttataatcgccttcattttcagagccagatgctttccttttctttgcccctcggcctttaccttttggtgttgtagtcttctttggaatgccaaattctgaatccgagtcagagtttacagcctctactactttcttctgttttggggctctcttgggcttagggactgtatctgaagacggttttccctttttagcagctaccgttttacttggaactttatctgtctgtttcagaccaaatgatggtgaaaaaacagaagcagaatcttcttcattactgtcaaatttagctgaatcatcttctgacttctgagaatatgaaggaaatgagaagagatttccaaaatcctgactttttttgtcatgcaaagatttttctggagtggcttttgatttgcctggtgaaaatgtatattcatctttatctaacccatctgaaggaacaaattcatcttccccatcatttgttatgggagatgctttaactttcaattcctctaaatcattattgtcatcatcatcatcatcagcatcatcatcctcttcttctgagaaatcaaatgtgtatttaggtctttcggctgctgctctcctaagcaaagaatctcttggaataaccacaggttctgtttcttccaaatcactttctgacttggattcatcatctgaccaaggattccgtttcttcactttctttgcactaggtttaccagatgatgtaggtgtttttctcactctggtaccaggctccttcttctccctcttaggtttgggacctttatttataggaactgatggagtcaatgcctcttctcctgcaccttctactggtgctccactgaattcttcatcaaattccacttttactgctgcagtatcaagatcacccttcttcttcttcagcaactttttgctggcatctgccttcatagctgtaatttcaggaattattcttctgccataaggtgagggcattgtctcttccaactggagtttcttcaccttaggtttgccaactttacctttaattgcttttccagacattccagccagaacatcttctcgttcttgagattccactttatccagttcttcaacaaatgccgctaaatcctctttccaaagatctgaaggagattttcttttaagatcattgacctctcgcccttttgcatctctctgtttaatcagttcttcaactttttctttagtaagagaccacagagacatatttaaaatataattaaaatctgggcctgaaggagttcctgaatcggaggaactatcatcatgctggttttgtgtttcatcctcttctgctgccttttcttgtgcttctttccaggctttcactgggtcagattcataacctctctggactaacatttgaatcaaatctttctttgacctattctatatagtaattttcccttgtatcttctctaaaatgaaacgggcttgattgttaagcttcgtaaattctgctcccaacattcccacaagccactccttacgtaacccgtaataacttaatcgtaaatcaaagaattctttcagaatgtcttgcacagtttcatatttcttcagacatcccatatgatcaaaaagtaccatggaattacaagtaagagtagtttgaagtttaaaaactttatgcagtccagcagcttctgcttgtgctagtttctcttcagtcattttcaccacaaatttcacagttgtgtcagtatgatattctttataatcagaaattaatgctggtgttttatctgttccatttagcataggttctaaaacctgttctttatatacctgtgtccaagttctaactggaagctctgtaatttctactgtgtttctgtccactacaaatatttcaccactgactgcatactggttttgaccaagttcttgaatcgtgcctttaaagtttttgtagtttggaagcatgggatgaggatccaggccatctagcattcgtctgacattgttcacaatttccctagcatcatagttgggtagtttacaagcccatccagtaccaatgccctcagcaccatttattaaaaccatgggaattataggaatataccactcaggctctacacgttgattatcatcataaaggaacttaaggaggttgtcatccacagcaggaaaaagtagccttgctaaagtgcttaacattgtgaaaatataacgagggcttgcagcatctttgccaccatgaagccgagttccaaactgaccaataggctgaagcaagttaatgttgttacttcccacaaagttctgagccaaattcacaatagtcatcatcaatgcttgttctccatgatgataagccgacatctcagcaacagagccagccaactgggcaacttttacttcacgtttatcattcctcttgaaacaggtaaataaaactttccgctggccaggtttaaagccatcaacaagagatggtatagatctttcattgtctgagtttgagaagagaatcaattccttgttgatgaaatcattataagtcaaatgctttgttgcagtaccatataaaaattgctctggtaagccatgtagcctacgctgtctccggtcttccataaaatttgttaaccattcttttctgtcatcaatcttcttcttactaaatgccaaggtaatggcagcatcatcttcaggaccagcatatctaaacaagatgcgatgcctttccatatcagcaaaatattcctttgcttctttagctgtactagtacccaatcctttatagtactttattttccaggctttctggttttctatatgttttttccattcgtcaaattcaggaatactgtagaaggaaagttcctgcttatttttgcttgcctttacaataggagtaatgaactcttcaagaaaaccatgcttcaaaagtgatggccaattgtgatggatgaaattaataagcaggccttttatgtgagaaccatcttgatcctgatcggtcataatcataatctttccatagcgtaaggttttcagagattgtgcatcatcgtaacttttcttatattgtagaccaactattttaataatattatttatttcagcattttccatgatctgtttatgagaagcttcccgtacattaagaattttgcccctgagtggaaaaactccgtatctgtctcgtccaatcacacctaatccagacacagccagtgatttggcagagtctccctctgttaatatcagtgtacactccagggaatgtttaccaccagcatcattagcatcatccagtttgggaatacctttgattttactgtattttactgatgaacacttcttattcagctgagtctgagccttaaatttcacccagttcaggatactttctacaatgccacaattagaggctgctttaaaaaatttttctgacagctggcatttagacccaaaacttttgggctgcagagtcatgttttccttagtctgagaatcaaaagttggattttcaataaggcaattaataaaaacccatatatggttttttacttgaaatggtttcactgatacaccagctttgttctttttcttaactacttcaatcagtttaccaacaacttgatctaccacataatccacgtgccgtccaccttttgtagttgcaatactatttacaaagctgatttgctggaatcctttttcactcaatgtgagacaaacatcccatctttcatttgcaagctcatgaataactttcagggccaccccagtttcatccaatttgtctttcacataaagatctacataactgcgaaatccatttacaggcaatttctttccattaaacatgaccttgacccctctacacgaaccagccaaatcatatgcccttctagtcatgagggccacaatatccttgtcaagtttttccatcttaaatttggacagatctggttggaatgttatgcatgtgtaatcttcaccatcaaaatgtttaattttggcttcagaagtcttcatcatattattcatccatgtctgcttaaaactgtgtttgtattctttgcaagctgtttctactgtaaactttgtactgaaaatattacaaagttttgcaccataaccattacgaccacctgtaacttttttctcatcatcatcatagttactggatgttaaaagctgtccaaaaattaaagcaggaacataaactttctccaccttgtgttctactactggaatgcctttcccattattccaaatgcttataatgttagattcaggatcaatagaaactttaatacaagtcatgttcttatccctctgtttattgtcagcagcattaaccaaaatttcatcaaagatcttgtataaacctggcacaaaggtaacctccctgcaattcattcctacatcttcatcatacacccacatgaactgcgtcaatggctccactgacccaatatatgtatcaggacgaagaagaatgtgttcaagttgtgtcttcttctgatacactctctcaacagacaacttctttgaagaatcatttttgttggcagtttctgactcttctttttttgcagcattgttcacccaggtcagtgccccgttgccgccgcccacgccggctcccgcgccgcagccacccgacttggccat

SEQ ID NO: 65015 - DNA, 1821 bp, Homo sapiens
ttttttttttttgaggatgggtagaaaagaattttattgagcaaaagaacagctctcagtggagaggggatgcagggagtggtccccaacccccacagcagggtgatttctctcctcactgcagctgagtctgggtcttttatgggctcagaataggggaatacacgttgactgatttgtaagtatgcaaaggcaccactcaaaaggtgggcacagcagtgtaaaaaccaattaggaaagggcaggtatacgtaaaataggtgaagggttgggatcaatcggaggaaagcacaccaaatgggaagacaggttctcaattcagtatgaggatttagccgggactgtcttcagctttaaggttgggtttcaccaggtacccacccctatctgcctgggcatttgactgcctcctgccactatcattacctgaccgggtttccacaacccaccatccacagtgaggaagggcagggctcctgaaaatgagccagcaattctccttcaggtggatggagatacaagtcttaccagtacagtctcatgcataatcacacacagaatgtctccactttggtatctagcaatggctgaaaaagccacagcactgtgtgtgtcctctggtgtctgatgaagtatgactcctggctaaaggctgtaccacattccctatacacataaagtttctatcctgagtgtgtcctctgatgtctgataaggttggacttccgactaaagccccgtccacactttctgcaaatataaggcttctctcctgaatgtgtcctctggtgtctaatgaggtgtgactgccggctaaagccttgcccacactccctgcacacatgaggcttcccccctgcgtgtgctctctggtgtttaatgagagttaacttagcacaaaagccttgcccacactccctgcacacaaaggcacctgagtgtgccctcttgtgcctaaacaggttaggcttctgccgaaaccttctgccacactccctgcacataaaaggcttttcccctgaatgtgtcctctggtgtgaaatgagggtggacttatcattaaagcctcgtccacactcagcacatacaaatggcttctcccctgagtgtgtcctctggtgcgtgctcagggttgatttccgggtaaagcctcgcccacactccgtacatacaaatggcttctcccccgtgtgtgacctctggtgtttgttaaggtttgacttcaggctaaagcactgcccgcactccaggcagacataaggtttaacccctgagtgtgtcctctggtgtgttttgaggtttgatttccagctaaagtgacgcccacattctgtgcatacataaggcttctctcctgtgtgtgtccttaagtgtctgatgaggtgtgacttctggctaaagccttgctcacactccctgcaaatgtaaggcttctctcctgaatgtgtcctcttgtgtctgaccaggtgtgaatgctggcgaaagccacgcccacattccctgcaaacataaggcttctccccagtgtgcgccctctggtgggtaatgaggtttgacttcaggctaaagctctgcccacattccttgcacacataaggcttgagccctgagtgtgtccgctgatgtgtaaagaggttcgacttccaagtaaagcctcgtccacaatccttgcacacataaggtttctcccctgagtgtgtcctctgatgtgtgatcaggtttgacttccacgtaaagcctcgcccacattccctgcacacataaggctttcccccagagtgtgtccttgggtttttgatgaggactgacatactgccaaag

SEQ ID NO: 65016 - DNA, 2507 bp, Homo sapiens
tttcgtgagtgagagagcgagtgagtgagtgagtgagtgtgtgtgtgggggggactcggcttgttgttgtcggtgacttccccctccccttcaccccttcccctccccgccgccgctgcagtggccgctccctgggccgtaggaaatgagcgataacgatgacatcgaggtggagagcgacgctgacaaacgggctcatcataatgcactggaacgaaaacgtagggaccacatcaaagacagctttcacagtttgcgggactcagtcccatcactccaaggagagaaggtccagtccaggtgcagcagcaaggagaacattctcagagccagtcacagtgctgtcgatatcaccaaggtggctagaagacatcgcatgtctccttttcctctgacatctatggacaaagcctttatcacagtcctggagatgactccggtgcttgggacagaaatcatcaattaccgagatggaatggggcgagtccttgctcaagatgtatatgcaaaagacaatttaccccccttcccagcatcagtaaaagatggctatgctgtccgagctgctgatggcccaggagatcgtttcatcattggggaatcccaagctggtgaacagccaactcagacagtaatgccaggacaagtcatgcgggttacaacaggtgctccaataccctgcggtgctgatgcagtagtacaagtggaagataccgaacttatcagggaatcagatgatggcactgaagaacttgaagtgcgaattctggtgcaagctcggccaggccaagatatcagacccatcggccatgacattaaaagaggggaatgtgttttggccaaaggaacccacatgggcccctcagagattggtcttctggcaactgtaggtgtcacagaggttgaagttaataagtttccagtggttgcagtcatgtcaacagggaatgagctgctaaatcctgaagatgacctcttaccagggaagattcgagacagcaatcgttcaactcttctagcaacaattcaggaacatggttaccccacgatcaacttgggtattgtaggagacaacccagatgacttactcaatgccttgaatgagggtatcagtcgtgctgatgtcatcatcacatcagggggtgtatccatgggggaaaaggactatctcaagcaggtgctggacattgatcttcatgctcagatccattttggcagggtttttatgaaaccaggcttgccaacaacatttgcaactttggatattgatggtgtaagaaaaataatctttgcactacctgggaatcctgtatcggctgtggtcacctgcaatctctttgttgtgcctgcactgaggaaaatgcagggcatcttggatcctcggccaaccatcatcaaagcaaggttatcatgtgatgtaaaacttgatcctcgtccagaataccatcggtgtatactaacttggcatcaccaagaaccactaccttgggcacagagtacaggtaatcaaatgagcagccgtctgatgagcatgcgcagtgccaatggattgttgatgctacctccaaagacagaacagtacgtggagctccacaaaggcgaggtggtggatgtcatggtcattggacggctatgatggtcaccagcaggagaaagctttgatgcatgtccacatatcattgactgtatcctgtaatatgcaacggcacagctagttttcccgatttggataaaagttgatctgtatagtcaacatcttgaactatatttcaaatgaatttaaatatcttttaaagaaaaaaacacctaaaaataaatcttaacagaaaattctgttctgattatatcaaggcaaatttttcctttcttgcaaattgctttgtgtgttcaatgctaggtctgatagcgatagcttttagtagacagcggtaggtgcctgcagaacttgtgtttttctcatctttaaaatacaactacttatgctcttaaatcaaggctgtctgcttatttatactagcgtaggcaacacttggatttcccttcttagtatgcttcataactgctttacagagagcttttgcttgttctttctcatgtatctcgtgtttatgtgcacagtgccaaaagaagactgactgggtggaggctctgccttgcctcaagaaccatcccctgcagagcatccagggaggtttctcgccccaatagcctcacggcacagtactcttgggcagtaactggacaccttttatttgaagaaacaaactgaagaaaaaatgcttccttaagtgctgacagcctttttaaccaatacatttaaaattgtacagaacaaaaaaataaaatcaaagactgatcttgtacagatattagtgttaccagcattcatgtggaaatcaagagcaaagacaaaataatgttaaacaattctgtaccataacattttctgtaatgatactgaaacttaatgaataaaaaaattccttgatcattatttaaaaaaaaaa

SEQ ID NO: 65017 - DNA, 1171 bp, Homo sapiens
ttttttttttttcagggtaaaaagcccaaccattactttactttaatagaggacagcttactggtgttaaatacatttattgtaaactttagacacaaaaataggttctctaggccattcacatgcacattaaaaccaacaggtgcaaactacaacaatgcatataattatacaaatgatgccactctgtgatgtttacaggattgctgtccatgcaaggtgatcataggcattatttatgaagccttaagatccagaagtgttgttactaccaaacctctgattaacactgtgaagtaagtgttttggaaggcagttccatgagttggctaacatttctttaaagcaaatgactgcttctaagcttagccgtacaagagattttggttgaactgaaaatattagtatttcattactgtgtgcagctctgtgatggacaagcaagttgttggcacatccaccaaaaacaattacttctccttcatcgctggcacaagctgtgtgccataaccttggtttttcggtatatggatgattaaattgtatccattcatttttactgatgcagtaagtccaggcatcacttagtggctgtttatcagtggtaaatcctccaaagagaaaaagatgatctgaagaaactggtgttagtgagtgccaagatcgaccaactgggcatatgccttgtggaattaattcattccactcccatgtatccagattaagatagtgaagatcattcattctagcatcctaaaaaaggataattaagttatcattttgaagaattcaaaagcaagtcattgaagtcgtttgaatacttactcgatatctgcctccaaacacgaagcctctatttccgacagttgcacaggcatgggcagcacgaggtgaaggtgctttaccagtagttataggctggctccaggtaaatgtttcagtatctaaaatatgtacatgatcattccatcctcttggatgacttgaattccaaaaagatgtttcatcgaattcaaaagttcccaatactttatcttcaggcaaatatccataccctccaaaaaatattaacttgtttttatatacccagacaccaagtttgtcctttgatgatggaggaattccttggcaatcaattctttcccactgtaacactctgtctgctcgtgcc

SEQ ID NO: 65018 - DNA, 1287 bp, Homo sapiens
gcggccgccgccaccctgcagctcaccgtgctgcaccgcgcgctgctcggcctcgacaagttcctgggccgcgccgaggtggacctgcgggatctgcaccgcgaccagggccgcaggaagacgcagtggtataagttgaaaaccctctcacggtcccagggagggagaaggaaggcatgctgatgggggttaagccgggggaggacgcatcggggcctgctgaagaccttgtgagaagatctgagaaagatactgcagctgttgtctccagacagggcagctccctgaacctctttgaagatgtgcagatcacagaaccagaagctgagccagagtccaagtctgaaccgagacctccaatttcctctccgagggctccccagaccagagctgtcaagccccgacttcatcctgtgaagccaatgaatgcaatggccaccaaggttgctaactgcagcttgggaactgccaccatcatcagtgagaacttgaacaatgaggtcatgatgaagaaatacagcccctcggaccctgcatttgcatatgcgcagctgacccacgatgagctgattcagctggtcctcaaacagaaggaaacgataagcaagaaggagttccaggtccgcgagctggaagactacattgacaacctgcttgtcagggtcatggaagaaacccccaatatcctccgcatcccgactcaggttggcaaaaaagcaggaaagatgtaaatcagcagaaaaaaaacaccgagacgtttctgtgacttcactttcacctgctccaggggtcaaggacttgccttgcctgataaccagccagcaggctccgaatcaccatctccctcacatgttatccggcaagagtgaattctaccaatggaagccaggttaatgattacaattaatcttttactgtacattcccaaggctttagttttaaatgccactgtgcctttaacaaggttgtaaatattttatgcccaccagagatgtggtcataagatctgatcctgagccagagattcagatggcacaggaagtattcatgtattttaacactggggttttctttctttcatactgagattttttttcagtatgtatcctccagctcttaaagcttacctgagaaagctttaaatgagaaaaggaccatgcgattggtgctgtgttacatacacatactttcttggcttctgagtagctcaggtgtggcttttggctgcagatgttaaattttgataccatgtaaacctacccagcttctcagacttgggtcttgttt

SEQ ID NO: 65019 - DNA, 2055 bp, Homo sapiens
  misc_feature (1)...(2055): n = a,t,c or g
ttttttttgttttttttgtgggagggaagacatttactttaggtataaaggtttactattattaacaagttatcactattatttacatgtttataaaatggaaataaaaacgggcatacacgtttggtgccaaaagtgggcacatccaaactaatatcagtataaaaataaattttcaagctatgtgtttttaaaataaaggtcattgaaacagtaagggggaaaaaatctgcatctggcatgtgttgaaatgcaatcatcatcacagcaaagcagccctggggcaacaaaaccagtgcctgctggaagaactgtccccacgcgctcttgcaagaacccaagcaaacaaacaaaaaaacaaatacaccagtgatgttcctgagctacagaagtttagggcatccaaactgttgtgaattcctgctaaagaggaggccctgtgggatctgagctgatgaactctcctgagtgctcagctagcgtggcaccaggacctggcactacactctgagaggacgctaagcctacctgtgaaacacaaatcctctgctaacacaaaacagcgcacgagtcctctctgtcaatcaccaatcccttgcaagtctcctggctgcagataaacagggacaagggctgaggacagacagaagccactgggtttgggagaccctgtgcccatcagacatgccctttggtggtttcggcagagatccccaatgtttcgttcattcgtagagacatgcttgttcacacctggcagcagacctcattggttaacacagctgtggccccagcagggaaagcaaagccagcccagcaaaccctctgtccaccccacatggtgttttggccttcagtggctaactttcctccttgtttcccatagagctgggccaggactgcatgcctgctggaagtggcatgctgggttagtgagcgtgctgagtgagccaactcccactctgcccgctgcagcacagaaggatgcctgcccatgcacaaagtcctccaggatcccagcaaggatgcaaatgctgtgggcagcgggaagaaaggactaatgaacaggccgcagcccacttcagagcaaccaaacattccacaggagctggtgccagctcaccccacctgggaccaggggcagcagcatggaggagaggacgccagcagtccctgcagctgtagctgtgggctcctctcacgggtcctggaccttggcccttttggctttcagagacaggtgcgttccttgttgataaaagtgtggagccagctccaacagccaggccgattcaatggcagtcacatctctcatgtagtacttggaggtctgtataacttcgttatagatgacccagcgaggcggcttctctgcatagaggactgacgcagggtgtatgtgcagctcatggtcatcacggatggtcctataagctccagtagaatgaaacctcgctgcattggcgaagaagccggagacaatgcacctcagaaccagatccgggtcaccttcactagacttcctgggcacttgaaacttgacaagaagctttttcaattgttctcttacagtcgcagctctgacaagacccttgtaattcaggaaatgttcctgacaccatttagagtccttattgtgtttgataaatgcttcatatatattgagcatagtgaggtggtcgccctcctccacagcaaatttacggtgcactcgaattgcgtgagacttctggtttggggggaccacaaagatattctggatctgcatcatggcagcgatgcttagaatttcctgagaacagccgaagtttcctgattcaagcagcattttggcaaacatgggattcaaaggaaactctgctattctcatgccaagcggttcagttaggcgacagtctttgtccagacctcccagagcatacagtcactccaaggcttgaaccatagaatgtgctggaaaaggcgacatgaagtggaacttgancgcacgcgtggcgnacgcgtagtcttccggtnntncnagcctggctaggccccccagnnttnntcccgcac

SEQ ID NO: 65020 - DNA, 3211 bp, Homo sapiens
agtccgcttaccagctggaggaggtgcccaggatgccagaggccttttctgggtcttagatgaggaagtccatgtagagggctccagtgacagtgtggtgctcgagcgtctgtgtgctgctttcgagaagaaaggagctgggactgaagggtcctctgccctgcggacctgtgagcagcccctccagtgtgagattttccaccagttgggatgggaccctgtgcggtacgacctcacgggctggctccacagagccaagcccaacctctcggccctggatgcaccccaggtcctgcaccagtcaaaaagagaggagctgcggagtctattccaggcccgggccaagctgcctcctgtgtgccgggctgtggcaggcctggagggcacctcccagcaggccctgcagaggagccgcatggtgaggaggacctttgccagcagccttgccgcggtgaggaggaaagccccgtgctcccagatcaagctgcagatggatgcgctgaccagcatgatcaaaaggtcccggctgcactttatccactgcctggtaccaaaccctgtggtggaaagcaggagtgggcaggaatctccaccaccaccgcagcctggtagagacaagcctggggcaggtggacctctggccctggatatcccagcactgagggtccagcttgctgggttccacatcctggaggctctgcgtctgcataggacaggctatgctgaccacatggggctcactcgcttccgccggcaattccaggtgctggacgctccactcctgaagaagctcatgtcgacctccgagggaatagatgaaaggaaggccgtggaggagctcctggagaccctggatctggaaaagaaggcggtggctgtggggcacagccaagtttttctcaaggcaggtgtgatctccaggcttgagaagcagcgagagaagctggtatctcagagcatcgttctcttccaggcggcttgcaagggctttctgtctcgccaggaattcaagaagctgaagattcgccgactggctgcacagtgcatccagaagaatgtggctgtgttcctcgcagtcaaggactggccatggtggcagctgcttggttccctccagcctctacttagtgccaccattggaactgagcagctccgagccaaggaggaggagcttacaacgctaagacggaagctagaaaaatcagagaagttgcggaatgaactccggcagaacacagatctgctagaaagcaagattgctgacttgacctctgaccttgccgatgagcgcttcaaaggtgatgtggcctgccaggtgctggagagtgagcgggcagagcggctacaggccttccgggaggtccaggagctcaagagcaagcatgaacaagtccagaaaaaactgggagatgtgaataaacagttggaagaagcccagcagaaaattcagttgaatgacttggaaaggaatcccactggaggagcagacgagtggcagatgcgcttcgactgtgctcagatggagaacgagttcctcagaaagcgtctgcagcaatgcgaggagaggctggactcggagctgacagccaggaaagagctggagcaaaagcttggggagttgcaaagtgcttatgacggggccaagaagatggctcaccaactgaagaggaagtgccaccatcttacctgtgaccttgaggatacctgcgtcctgctagagaaccaacaaagtcgaaaccatgagctggagaagaagcagaagaagtttgacctgcagctggcccaggccctaggtgagtcagtgtttgagaagggtctccgtgagaaagtgacccaggagaacaccagtgtccggtgggagctaggccagcttcagcagcagctgtagcaaaaggagcaggaagcctcacagctgaagcagcaggtggagatgctacaggaccataaacgggagctgctggggtcaccctctctgggggaaaattgcgttgctggcttgaaggagaggctctggaagttggaatccagcgcccttgagcaacagaaaatccagagccagcaggaaaacaccatcaagcagctggagcagctcctccagcggtttgagctggagatcgagcggatgaagcagatgcaccagaaggaccgtgaggaccaggaggaggaactggaggatgtccgtcagtcctgccagaagcggcttcatcagctggaaatgcagctggagcaagagtatgaagagaagcagatggtcctccatgagaagcaagatttggaaggcttgatcggaaccctctgtgaccagattggccatcgggactttgatgtggagaagcgacttcggagagacctcaggaggacacatgcactgttgtcagacgtgcagctccttctgggcaccatggaggatggcaagacatcagtcagcaaggaggagctggagaaagtgcacagccagctggagcagagtgaagccaagtgtgaggaggccttgaagacgcagaaggtgctcacagcggacctggagagcatgcacagcgagctggagaacatgacgcggaacaagagcctggtagatgagcagctgtacaggctgcagtttgagaaggcggacctcctgaagcgcatcgatgaggaccaggatgacctgaatgagctgatgcagaagcacaaggacctcattgctcagtctgctgctgacattgggcagatccaagaactgcagctgcagctggaggaagccaagaaggagaagcacaagctacaagaacagggacaacagatgtccaatagacttctctcatacttacagctgcaggtggctcagatgcgcatcgagtacctggaacagtccaccgtggatcgagccatcgtcagcaggcaggaggcggtcatctgtgacctagagaacaagacagagttccagaaggtgcagattaagagatttgaggtaccaatttctctgcagccagctggcttcaccacagtcctggtgatccggcttcgggacagcctgatcaagatgggggaggagctttcacaggcggccacctccgagtcccagcagcgggagagcagccagtactaccagcggcgcctggaagagctgaaggccgacatggaagagctggtgcagcgggaggcagaggccagccggcggtgcatggagctgtcttggtccgccctgcaggagatccttcaagaaggagca

SEQ ID NO: 65021 - DNA, 2531 bp, Homo sapiens
aaaacattcttggccaaaatctaggggaagttactgccacttcgtactatataaggaaaacaaagacaccatggatgctattaatgtactctccaaatacttaagagtcaagccaaatatattctcctacatgggaaccaaagataaaagggctataacagttcaagaaattgctgttctcaaaataactgcacaaagacttgcccacctgaataagtgcttgatgaactttaagctagggaatttcagctatcaaaaaaacccactgaaattgggagagcttcaaggaaaccacttcactgttgttctcagaaatataacaggaactgatgaccaagtacagcaagctatgaactctctcaaggagattggatttattaactactatggaatgcaaagatttggaaccacagctgtccctacgtatcaggttggaagagctatactacaaaattcctggacagaagtcatggatttaatattgaaaccccgctctggagctgaaaagggctacttggttaaatgcagagaagaatgggcaaagaccaaagacccaactgctgccctcagaaaactacctgtcaaaaggtgtgtggaagggcagctgcttcgaggactttcaaaatatggaatgaagaatatagtctctgcatttggcataatacccagaaataatcgcttaatgtatattcatagctaccaaagctatgtgtggaataacatggtaagcaagaggatagaagactatggactaaaacctgttccaggggacctcgttctcaaaggagccacagccacctatattgaggaagatgatgttaataattactctatccatgatgtggtaatgcccttgcctggtttcgatgttatctacccaaagcataaaattcaagaagcctacagggaaatgctcacagctgacaatcttgatattgacaacatgagacacaaaattcgagattattccttgtcaggggcctaccgaaagatcattattcgtcctcagaatgttagctgggaagtcgttgcatatgatgatcccaaaattccacttttcaacacagatgtggacaacctagaagggaagacaccaccagtttttgcttctgaaggcaaatacagggctctgaaaatggatttttctctacccccttctacttacgccaccatggccattcgagaagtgctaaaaatggataccagtatcaagaaccagacgcagctgaatacaacctggcttcgctgagcagtaccttgtccacagattagaaaacgtacacaagtgtttgcttcctggctccctgtgcatttttgtcttagttcagactcatatatggatttcaaatctttgtaataaaaattatttgtatttttaagtttttattagcttaaagaaataatttgcaatatttgtacatgtacacaaatcctgaggttcttaattttagctcagaatataaattagtcaaaatacacttcaggtgcttaaatcagagtaaaatgtcagctttacaataataaaaaaaggactttggtttaaagtagcaggtttaggttttgctacattctcaaaagacagcaggagtatttgacacatctgtgatggagtatacaacaatgcattttaagagcaaatgcaacaaaacaaatctggactatggataaataatttgagagctgccacccacaaatataaatacagtactcatgctgactgaaataataagacatctacaaatttataaacaaaaagtgattgtcattatcctgcttatgtactagattcaggcaagcattatagactttttggttgcggtggcttttgcatttatattatcaatgccttgcaggaacgttgcattgataggcccattttatttttttattttttttttcgagacaggatctcactctgtagcacaggctggattgcagtgcaatcctgcaattctcaatcttgcactgcagcctcgacctcccaggctccagtgactctcccacctcagcctcctaagtagctgggagtacaggcgcgcaccaccacgcctagctgatttttgtatttttttgtaaagacgggggtttggccatgttgccgaggctaactcctgggattacaggcatgagctgtgctggccgggtttttttttcttgatgtaaacgtgtacagctgttttattagttaaggtctaatttttactctaggtgccttttatgttcagaactctttccactggactggtatttgctcaaaaataaataatggtagagaagaaaactataaaaatggacaaggctttcttctatcagtagcgtttaccctttgtcaccagtggctttggtatttccatgtctggcattgcataaacttctctggtgtgaaaggataaatatgcctttctaaagttgtatatcaaaattgtatcaatttttattttctatgatttctacgcaacaaatgtaataaatatttttaaaatctcctttctactggttatgtaaataaatcaaataaatatatcaaaatg

SEQ ID NO: 65022 - DNA, 2778 bp, Homo sapiens
aaagatgtcaacagctatctgctacaatacttacagatcatcagtatttggagaggacaccactatgtgccattttgaaacaaaaagctcctcaacaataccgcatccgagcaaaattgaggtcatataagcccagaagactatttcagtctgttaaacttcattgccctaaatgtcatttgctgcaagaagttccacatgagggcgatttggatataatttttcaggatggtgcaactaaaaccccagatgtcaagctacaaaatacatcattatatgattcaaaaatctggaccactaaaaatcaaaaaggacgaaaagtagcagttcattttgtgaaaaataatggtattctcccgctttcaaatgaatgtctacttttgatagaaggaggtacactcagtgaaatttgcaaactctcgaacaagtttaatagtgtaattcctgtgagatctggccacgaagacctggaacttttggacctttcagcaccatttcttatacaaggaacagtacatcactatggatgtaaacagtggtctacttagagatccatacaaaatctaaattccctggttgataaaacatcgtggattccttcttctgtggcagaagcactgggtattgtacccctccaatatgtgtttgttatgacctttacacttgatgatggaacaggagtactagaagcctatctcatggattctgacaaattcttccagattccagcatcagaagttctgatggatgatgaccttcagaaaagtgtggatatgatcatggatatgttttgtcctccaggaataaaaattgatgcatatccgtggttggaatgcttcatcaagtcatacaatgtcacaaatggaacagataatcaaatttgctatcagatttttgacaccacagttgcagaagatgtaatctaatattgccatccaatttagcatacataaaatgttgccactcaccttccctgtttgagcttcttttcctgacctgagttttgtatcagcaatgttgatgatgttagcatgggtatgggattagaaaatgtccttaccttaaatctcttggcttttactcgggtgcaaggtaaataattggctatggattttgttttgcctttcctgttttgcttttgtacaaagagacctgccttaaacaagtactgcctgagataagtgtctgatcaagcctacagtgtactttaagtagaaatggcaaagttgctttgttggggtgctgatactgatgattttaggataaattcatttctttaaacttgtaatacatgggtttaattgcttgtttctctccaggatagtagagatttctctatttcacctcaacctaataaaagtggtcagatttataatgttaatgacttaatattatccttttctaatagtctcatgtaaaatatgccgctattacaacttacaactaattgaatgagatgttaacttagtaaaatagtttgatttttacctgacagtgtttgtcaaatttaaaaacatgaatattcaattttatacaaacatttatatatatatatatagatttgtgtatgttatttgccaaagacagatataaattacctggtttaatattagtgaagaataaataagtgcacacatttcaactgtttcatttatttgccctaagttgagctgaaaaatgatatgaggcaaagaatcgaaataggtgtggcaatgcagcagatgtttagggctgtctacatcccaggtactgtgctaagcactaaacatgtatttgatcctcacagcaacctatttttccgataagaaatctgaggcttgattgataagctgacttgactaagttcacacagtttgtaaaagctagagtctgtgccttaattcacataatctctattcagagcctgtactgttaaccactcaaggattctggaacagaagctaacagttttctgcaacgagtctttgacttaaacatctgaaataacattggaaatagattataagaggagtcagtgtgtttttctatagtttcaaaatacttttaacatcttattgtcaaaaagattggataactgactttctttgctcataataactctaaattctagttcctgagtacattaacacatcttctttacctaactaccaatgtcccccatcatcgacttatcagcttgtttgagacaatgagaaagactgattttattttcaagaatatagactcttggttcaaaacattttcaggaaaaatattttaaaaccctacagttgaacaggtgtgtttccgtgttgatgatgtgctcaggatacaaaggtgaaataaacattttttctgccttcaggaagccctcaatctagaagagtagaggtccaaaggtgccatatgttcacactgtgagcctgcaagatctccacgttaacaaaggaaaactcttcctatgaatcttcatgatgataggccatgtctcttcttatttttgttttaaataaacatccaccttatcatgatttcttttggtttattgtggggttttgtccttgtctttttaaaaaaattttcagtttttagcaagaattattccatcaacatctagtgtttctctagagatgatgtatgcactttatgctaatcaggaacccagagaggagaattttatttctggagcaacaactaaatggtagttcattgtgccccaatttgatccctgcccctttctgtaaacactgatagaatcttcctgtcagattttaaattacacaaatttaagaaagaagg

SEQ ID NO: 65023 - DNA, 1671 bp, Homo sapiens
ttttttttttttctcgggaaactggtttaataaggacaattccagaggggcctggctgtggccaaagctgtgccaaacggttgggatccagagctaaaggcacttcttgccacgtgagaccatgggcgaggctccccacgctatctccaccaccacagtcatgagagccaagcgagactggcctgtggcctggggctccacagctgcccagctccacctccggcatttactggtctcatcctgagaggcattgggtgcccactcactggctggatgctgggctggttcatgggtggcagagccagggtataccctttggggatgtccctaacccctcaggaccagaggcagcaccaagcagcatgtcacagccagtgctagggtcagctgcaccctttgctgggactctagctctcctcagagggcctcctagggccattccgggcactgtgggtggcaatggggagccccggctccctcattaggccagacaccagtctggccgggtcagggaggcccagccttgggccctgtcacacgtagtccagaatctctgtctccatttcgttttcactgccgtcggatggcttgaagtcctcctcctcctcttcctcctcctcctcatcctcctcgtcttccccagactcgtacgtcagctgctcttttccgccatcagccttggctgagctggaaaagagagcaggcctcttggagcggatggtctgccggatcatgagggacatggtgtccctgagctcgtcgctggtcttggggaggcaccacccatcccgttctgtgcaggaattctctgccccgtcattgcggtgaatgatcttctgcaactcttccacattcaagtcgcataactggtagaacatctgccgatagggtggcaaggccccttcccggaagatgtagacagagtccctcagtgtctgaaggctgaccttgagcttgtacttgctggaagctggtttccgagcaccactcgtccccgacgggcccaggccctgcttcaggtcatgcatggtgacaagctggctggatgtcttcttgacggtgatggggaggctgtagttgtaggtgctgcgctttgctttgaccggcaagtcactgggggcgtaaccgtgtttcattccacaacggattcggaaatcgaggacttgataaatcttggcatctgggttttttcgggggtcatacccaaatcgaatccataggctgcgccaggggcctgttatcatgtaataggctatgaagggaagcaagaccttgagcttgtctgggtggacgctgatgttggccttgacagcatttcgggaccagatgggacggatgtcaaacagcttcctcagctcctcctccaccttccggtccacggggttagtgcagactctcctccacgtctgggctgcagcctccagtggctgcttgggcacctcctcatcctcaaagttgacaaagatggcattgtgggggcgccgggctctgctcaggccaatcagattctcacctgagatggggggattgttgtagccttcccgctcgcgtcatcctaactccccgggctcagcaagacgcgagggcctccagggagcaaatggcccatgggagggcccatgtcttcgggaaaacgaccaccgtgtcctcgactttttatttaaaattaag

SEQ ID NO: 65024 - DNA, 890 bp, Homo sapiens
acttgagataagggagaataggttcttctaattcaagatacaatcaatttatgatcttgggagaacaaagtgcaaggggccagtgagtctggacacactccaaaggctacagagggttttatgccctgagccctgggttctctccaagccacaaggggtttcataccctgggtttagattgtactgcggcagggcagccttccaccctttggcacagagtttggtgttccaaaggtcatgaggggttttagaccctggacccaggacatgttccaagactcttttacattatgtcagaaaaacgagccctgcctcagctcttctgccaacatgtctcccttttttgtcctgcaaaaccgccacagctatcattgcttgttcttggcagcggctttctctccagaagcggcttccgcatctgtagattaaaaggagacagcacaagcacataattattagaacaaaatttacaagtgtagagtttccagtggtcttaatccatttaagagaattgattgcagacaacccattggctgcctcgctgaaaatatcagttccagggagcagggttaagtgagcctgagaggcttcaaaaacctgctcttttacttttacaatatcaagggtgagattttcctctctgcccactagatggcatttaatttcccattggtgttctgtttcattctaactatgaggagtaacgcaaaaatcggatgtattccagtcacattgcatttgaattctagtttctaaacttatgatgcaatcccccatccaaattactgtctgagggagatcattaatttgactaactatattttgatctgtttgggcctgagagctccataatttcatagaattctttttccatttatcaacaaatttga

SEQ ID NO: 65025 - DNA, 403 bp, Homo sapiens
  misc_feature (1)...(403): n = a,t,c or g
cggacgcgtcggacgcgtgggttacagagaaaggaaatactgtgttagaatttttagtaggactctttaaaccttttgtggaaagctatcaggcaaatggaagaaggagagagagtgactaatacgatcagtgatttcacctcaccagtgagaccttgctccccgcattcaggaggaagcttggttcattacagacccaagaggacaacagcttagtgatgccatggtcacagtattcacaggaccacagttacacccacgcatcatctgtcatactgtgtctcatgtcttaacgaggccttcatgtcagtcaatatgtaacctcgaggtttgatatatatcaggcactcagtaaaggcaagacttgagtgatacataaagtcagttacagattaccagatgn

SEQ ID NO: 65026 - DNA, 3202 bp, Homo sapiens
ttttttttttttgagataattaggtaagaagatttattgtttacccttgcagtgtttatggggggaaaaggtatttacagaattactgttgctagcgagaatatacagtaaagtttaaaacattttggagaactgattttgattcttaaaatgtgtctttttgcaacatatgctctggttacctataaatacatttattttggcccttgaaaacattcacatcctattctttgttagccttatttttccagtccttgttaactctctcagtgctggataataaacctgcatttcttttaaaacatttgttcagtttcggcatcagtgtcttcccccagcactcccttaatctaaattagtaacattttactgtatgaaaaatagttgctgttaactaaaaattcaataggtgagttagacatggcttttcaagtaggattttcagtggcttcagattccatcatacacaagtgtatgttttttctgtgtaagttttttccgtgtaagttttttccgtgctcaaccgtaagtgctcaaccatcttctccccactttagtctgctatgtcaaaaaactgcatcaagcttttgtgtgaagatcctgttttcgcagaatatattaaatgtatcctaatggatgaaagaacttttttaaacaacaacattgtctacacgttcatgacacatttccttctaaaggtacgtagtactttggaaactcagtgtgtcatttccaattagttaatgcttgtggtttcattatgctggtcttttggagatttttttaaatcttctttttcaggttcaaagtcaagtgttttctgaagcaaactgtgccaatttgatcagcactcttattacaaacttgataagccagtatcagaacctacagtctgatttctccaaccgagttgaaatttccaaagcaagtgcttctttaaatggggtaagaactatgcagaggcggcggcacacacttttaaactgtccttcagttaactgtgtggccttcatatgattttactctcgtaactttaacttactgattcaaactcttaagccatgtgcgacaaaaaaacaagttttaaatacacgtttactatgccttgtatgtacacagcacactctatcaccttggaagctacaagctggtatcattaaatgctgaaaggtaataaagggaacatcttagtggtcttatctctagttgggtatatttttggaaacaatacttgtgatgtttctattactgcctatggctcctatgtaactgaaacaattaatgatctactgatttaaaaaaggcagttaaatctagagcattagttgccttgtgcagactcccatgacagccatgtcctagaataatggaacactctggaaatgggctagaatgttgagcagcagcctcccaaatcacagtatgcataaaagccaaaacagatgacagagctcagtaaggaagaccttactatttgtgacatccatcagaattttaacttgagaaactgatttcaaggtttgtttttaaaattcttatatttccttttccatttttcagaaaacactatttcaggctttggtctgacttactggttcgtgggcataaaataatgctattagtgactttaagaactaatgaggctgggcacggtggctcatgcctgcaatccaagcattttgggaggtcgaggccggtggataacgaggtcaggagattgagaccatctcaatggccaacatggtgaaaccctgtctctactaaaatagaaaaaattaagccaggcgtggtggcgggcgcctgtagtcccagctacttgggaggctgagggaggggaatcgcttgaacccgggtggtggaggttgcagcgagccgagattacaccactgcactccagccttgccaaagaacaagactccatctcaaaaaaaacaaaaacaaaacaaaaaaaaaaacaactaatgaaatgctgtagtatcttaacactggctttctggttttatcattctaagaatcccagagaaaccagggtattcttaggaaagaatggattcctgggaaaataaacatctgcaattaactgtaaacaactgcatcaaagtgttggctttagaatttgaaatgttcctatctgggtttttgtaggacctgagggcactcgctttgctcctgtcagtacacactcccaaacagttaaacccagctctaattccaactctgcaagagcttttaagcaaatgcaggacttgtctgcaacagagaaactcactccaagagcaagaagccaaagaaagaaaaactaaagcgttagctttatggactactatcattacctttagggtgggaggagggagtaatacacttggtgtaactggtttaagagttgtgtgttcagctgaacctcctaaatataaatgctagaaacaaaattaacttcccacatccccccctaacgtgatcttaatgactttcagagaagtttcccttttggcatgtgttttcacagatgatgaaggagcaactcccattaaaaggcggcgtgttagcagtgatgaggagcacactgtagacagctgcatcagtgacatgaaaacagaaaccagggaggtcctgaccccaacgagcacttctgacaatgagaccagagactcctcaattattgatccaggaactgagcaagatcttccttcccctgaaaatagttctgttaaagaataccgaatggaagttccatcttcgttttcagaagacatgtcaaatatcaggtcacagcatgcagaagaacagtccaacaatggtagatatgacgattgtaaagaatttaaagacctccactgttccaaggattctaccctagctgaggaagaatctgagttcccttctacttctatctctgcagttctgtctgacttagctgacttgagaagctgtgatggccaagctttgccctcccaggaccctgaggttgctttatctctcagttgtggccattccagaggactctttagtcatatgcagcaacatgacattttagataccctgtgtaggaccattgaatctacaatccatgtcgtcacaaggatatctggcaaaggaaaccaagctgcttcttgacattaggtgtagcatgtctacttttaagtccctcacccccaacccccatgctgtttgtataagttttgcttatttgtttttgtgcttc

SEQ ID NO: 65027 - DNA, 833 bp, Homo sapiens
tcggccccctcactgcaagcagctgcacccagttaacccccagctcctgacactgaccccacacccacctacccaggactcaccctgctcctcactaacccccgaactaactcaaccctgcctcccacactgcacctgccctcacgaccgaccccatcctcacccccatcaacatctctgcctccctccttggtcctagggttttttttaaaaattcaatcaggaaaacggagggcatacccagaacacttctgggtgcagaatggggagagaaaggctcagccatccgtccatgcccctgtgaattcagccagcgcttagacagcacccacgcatcccaggtactgggcatggggagttcaaccgtgaacaaaaaccatgcccccaggagcttccgctttggagcaggaggcagacacggacctagaaagtcatggtttgaggcgatgtatgctaaaatggagggagcacagacagtgagaggaacactagaaactcccaggggatggggccgggcatcagggaagactcgatatctgcagtggggccttaaggttgagcaggagttctgaccacacgcagaggaagaaatcccatcgacaggaacggttgaagggaaccgcaggacagagcttaggagactagactgtggagggaggattctcaggtagatatgaggcaggcaccgggctgagaggctgccaccttgtctaggggcttggggaggaggcaggtgagctgggaggggcagctctggggtcttgtgaggatggactggaggtgggaggctggaagttaggaggctgaggtgacaggtggaagcgtgagctggg

SEQ ID NO: 65028 - DNA, 1456 bp, Homo sapiens
taaccacaggaaagttctctctggagcaaagcgttatgaatgcaatgaatgtgggaagtcctttgcttatacatctagtctcattaaacacaggaggattcacactggagagaggccttatgagtgcagtgaatgtgggagatcctttgctgaaaactccagtcttattaaacacttgagagttcacacaggagaaaggccttatgaatgcgttgagtgtggaaaatcatttcgccgaagctcttcactcttgcagcatcagagagttcacactagagaaaggccttatgaatgtagtgaatgtgggaaatcctttagcttaaggtccaacctcattcaccatcagcgagttcatactggagaaaggcatgagtgcgggcagtgtgggaaatcctttagccgaaaatctagccttattatacatctgagagttcacactggagaaaggccttatgagtgcagtgactgtgggaaatcctttgctgaaaactccagccttattaaacacttgagagttcacactggagaaaggccatatgaatgcattgattgtggaaaatcatttcgccacagttcttcgttccgtcgccatcagagagttcatactggaatgaggccttataagtgaagcaaattttggaaattctcttgcccaggctttttgctccttcaaggccagagagttcacaccggatcaaggtgttatgagtgtgacaaatggggaatattctttagctagaatgctagcttctttacataaaagagtgctcccactgaagaagtgccttttgagtgcaatgaatgtgagaaagccttcagccctctctcattggttaccacaatatttacatgaggaaaataccacagatgtggaggtaatattattttttcttcaatataacactggaggaaaccccttatgaggatgccatctgcctaaattgaatgtcatacatcaaatagctgcatacattccaggtatgtgggaactgcatagtatttttcgacctgcccaggtctcttgctagacttctgtgacttacagttctcttctaaaaagcatttcacctttaccacttggcaggtgcccacagtacatcattcgcctaactcatcatgatccagaagtaactttgattttgtttcattcaacagagggattttttagtatcctcagcactcattctattctcatttctttctctccaatgagttaggccatgaacctgactcatttttggcacagaggactcttctgataacttgaaaaaatggactacctttttcagggatcttttggatctcacagagttcttaagatggaattttccagcctgccagtcatgaatctcagacagcctgccacctattgccctgatttgtgttataataaaggccttgttgcttaagacaccttcagtctttgcaggagggcatggaagctccaaaaaaaaaa

SEQ ID NO: 65029 - DNA, 1269 bp, Homo sapiens
ttttttttttttcctaaattacagtattttatttaatatgccttttaaaaataaatgagccttagcttatcaggcacaagttttttttgttttgttttgttttatttattcacttacaggaaatataaacacaaattctaaaagtgtgaagttgcaaacgacaggcaagttcacatttcaattaatgtgaactgaacaagagtttaaggtgatttttaaataccttccacgttagaaaatccttctttcttaaataagttttcatataaagccaagtccttgcaacttaacgacggttttacagtcttaagtgattttagaaagtgctcttgtttcactgtagttgcgtctagtccattttcttgcagagccagcaaagcagcttctgtgcagaggtttctaagatcagctccagaaaaaaaacaggtttctgctgcgaggttttctaaggagacatcaggccctattggcatggtttttgtacagacttttaaaatagaaagcctgcccttgtgatctggaggtgggatatagatgatcttatctaatcttccaggtcgtaacaaagcagtatctaacacatcaggtctatttgttgctgcaataatcatgacacttcggttaaaaacttcttgaaactctcttcattttttcagctccttgtatttaccctgttgacttgatttacttcctcttctctctattgtcttaagtccaacaccatctaattcattcaggagaacagaaagaactcgttcttgaacatcacatcctgtcttgctggctgagcgagctcccaagattgaatcaatttcatccaaaaacaaaattgctggagtgcttgctcttgcttgtcgaaatatctgagacaacactttttctgaatctccaacaaacggtgaaaacagatcagctccactcactgaaacgaaagagcagtgacagcttgtggccagggccctcaccagagtggttttagcacatccagggggcccatagaggagaactccctttggttgtgtcaggcccattctaacaaattcccaagggaatttcagaggccactcaatgctctgttttaacttcagttttacatcttcaaggccaccaatctcctcccagtcaacaggcttgatatccattaatccaatgacgcttcgaaacgatgagggctgaatatttttaaaagcttcaaggaagtctatttcatcaatcacaggattgtccttctcactatgaaggagggcatgcatggcagcctccctacag

SEQ ID NO: 65030 - DNA, 1449 bp, Homo sapiens
tagatggtgagtgccccttcccatccaaaaggtctcagcacactgatgatagtgccttgtgcatgtcgctgtcagggttgaatcaagtgggctgtgctgctaccctgcctcattcttctgccttcacgcctcttaagagtgatgacagacctaatgctctattaagttcacccgcaacagaaacagttcatcattcccctgcatattcttttcctgctgctatccagagaaatcagcctcagcgccctgaaagcttccttttccgagcaggtgtcagggcagaaaccaacaaaggtcatgcttcacctcttcctccatctgctgcacctaccactgattctacagattccataacaggacagaattcaagacagagagaagaagagctggaattaatagaccaactgcgtaaacatattgagtaccggttgaaagtgtctctaccttgtgatctcggagcagctctaactgacggtgttgttctttgccatttggccaatcatgtgcgacctcgatctgtcccaagcattcatgttccctcaccagctgtagtaagttgataatcctaaaaagccttggctattcatcagacatttgttaagcacagtggacagacatttcttaagcattgtgctagatattaaggatacagatataaagagtccagtctctaccttcctggtctcacttctactcgagaagaaatagacatgtatacagctacttacagcagtgcgataaatgtaagaaaggcatgtacagtgtgtgttatagggatataaaaaggggccacttaactccacctggagagttcagggaagccttcccagaacgggcaaaatttgaactaattcttgaagtttaagaaggaattttccagcagtacagagaggggagggggccttccaggcataggatttctagattcagaagctaaggaaagtttggcttttacttaaggaattggtaaattgttcagaatggatcgtgcacagggttgtaatacaaatggtaaggggtaaggctagagacgtgagctggggccgtggtacaaaggccttatgaaccgtgtgaaggacgtttaccctagtacagacaatgaggatacactgaattaaagagggaataccatgattctaactgcagtttagaatgatgaatctaggctgggcgcggtggctcatgcttataatctttgcaatttgggaggccgaggcagacgattgcttgagcccaggagtttgagaccagccaggacaatatggcaaaaccccgtctctaccaaaaatacaaaaatcagctgggtatggtggcatgtgcctgtggtcccagctactcgggaggctgatgtgggaggatcacttgagcccaggagttcgaggctgcagtgagccgtgattgtgccagtgcactccagcctaggtgagagagcaagaccctgtctcaaag

SEQ ID NO: 65031 - DNA, 1550 bp, Homo sapiens
ttttttttttttatattttatcaattttattgaaatattccaaggatcccaaccccatttaaaaataaaaattgtaaagcactccattcaataaaagcacataagtccccctcaataattagtatgacaattcacgatacagctcttactctgggagagtttattttaccctttattccaaaaggcacaaagtcatctgaggcctcagatattaaccccactgcatgttaatgacacaccactgaggtgcagctcaatgtaattattaaagcttataacacacttccccaagaatttatagattctttctataaataataatttaaaaaatactgcaccttaagaccaatacaggcttaacaaaagacctgaaatttctgcaagggcagttttgtttcttgatagaagtacaacttttgaaagtctattcccagcaaaagaaacactagacccagcttggccaaagaaacaaaataaaacaagtgatttctaacacgctaaaagagtacattttcatcagctccaaagaaagcagtcctggtcattcagaaggctcctatgatcccaccagtctgcagtcattagaaatatatgctttacaggccacaggctgctctggatttggtttcagacaccagtgaccagaagaagccagttttgcgtgtgaggggtgtgggcccccgctgccttgggcctgctcaccggggtggatggacccccgccgggtcacagcctgctgtcacgtctggactgttggcctcttctgcatctgggctgttgggctctcctgctctctgtccctcagtcacgtcattgtctggctgtccggtgctggctgcactctcatttgtgaggataaccccttccttcttcttttctcccaatacctccagccccatcatcctgagataatgaagccgttcattcttgggcacaaaagttcgaatggaggcctttccccgccatccgcataagacgatgggacactgcagagcgtctggattcgcagaatctggttcatacttcagcacgatgcttccctttgccaggtcctttgcttgactgtaggtctcactgctgagttttctaaaaaagggattttcctgggtcaacagtatcttaacatcttccattgatacagtaataattcttgagttaataaatggatacaatgtatatattccctcctgtgccagccggaaagcacagtcaaactcttcaccgctgttatttctacaccagactttgatccccgtgttaataacctgtaagtaaaaaaataagatgaaacacagagagatgaagacaggaccatctcctgtaaggatgccgggccacatggagcaaccgtcacggaatgggaaaggagaggagaagcagaaacccaccgagaaaccccggttaagaacgaactgatactcacaacttgtgattacgtcgcttggaggacagtaaagcaaatgaaaaaagggcaacccaatggccaaattctaagggaagtaccgcacgcgtggggcgtggctcgacccgggaatgccggagtaaaagta

SEQ ID NO: 65032 - DNA, 638 bp, Homo sapiens
ttttttttttttgtgtgccacaagtttattactcaataaatattctgtggtttgacgtgctgtattgtatttttaatgtatcctgatgagaaaaacaatcctaagacatcctgtaagtatcagacacgattgaataagaaggggaatgactccatgaaactatatttggcatcagtaagattcttctgccagttttctcgaaagcgaaccattcctggtctgtgaactaatgcttggtggtcacctacataagaaacaacaatgggtgcatccgaaaaatattcgtcaatttgtttaagacccttttccacagtgaattcaccgtgagtcatccacttgatgtttttcaaagggtttcgctcctcttccacaatcttaacagcataattgatgacatcctcaaccagagctagagctacttgagtcaattcatcctcgtagttcttgtcttgtgtattcggcattgtttggcttgcggctttgttatcctcatccattgctttctggcttgttgaattttgagtctcactcattttctttttccggagtgagcagatcttctttgcttggaacaggagcagtggtaggtggctggggatgtctcaggattctctcagtagcttctctcagattgccag

SEQ ID NO: 65033 - DNA, 2057 bp, Homo sapiens
gaacgacagatgaaatccagataagtgacccgaccctcaggtgcacctaagaaagaacacgtaaatgtagtttttattggccatgtagacgctggcaagtcaacgatcggaggacagataatgtttttgacccgaatggttgacaaaagaacactggagaaatatgaaagagaagctaaggaaaaaaacagagaaacctggtatttgccctgggccttagatacaaatcaggaggaacgagacaagggtaaaacagtcgaagtgggtcgtgcctattttgaaacagaaaggaaacatttcacaattttagatgcccctggccacaagagttttgtcccaaatatgattggtggtgcttctcaagctgatttggctgtgctggtcatctctgccaggaaaggagagtttgaaactggatttgaaaaaggtggacagacaagagaacatgcgatgttggcaaaaacggcaggggtaaaacatttaatagtgcttattaataagatggatgatcccacagtaaattggagcatcgagagatatgaagaatgtaaagaaaaactggtgccctttttgaaaaaagtaggcttcagtccaaaaaaggacattcactttatgccctgctcaggactgaccggagcaaatattaaagagcagtcagatttctgcccttggtacactggattaccatttattccgtatttggataacttgccaaacttcaacagatcaattgatggaccaataagactgccaattgtggataagtacaaagatatgggcactgtggtcctgggaaagctggaatccgggtccatttttaaaggccagcagctcgtgatgatgccaaacaagcacaatgtagaagttcttggaatactttctgatgatactgaaactgattttgtagccccaggtgaaaacctcaaaatcagactgaagggaattgaagaagaagagattcttccaggattcatactttgtgatcctagtaacctctgccattctggacgcacgtttgatgttcagatagtgattattgagcacaaatccatcatctgcccaggttataatgcggtgctgcacattcatacttgtattgaggaagttgagataacagcgttaatctccttggtagacaaaaaatcaggagaaaaaagtaagacacgaccccgcttcgtgaaacaagatcaagtatgcattgctcgtttaaggacagcaggaaccatctgcctcgagacgttcaaagattttcctcagatgggtcgttttactttaagagatgagggtaagaccattgcaattggaaaagttctgaaattggtcccagagaaggactaagcaattttcttgatgcctctgcaagatactgtgaggagaattgacagcaaaagttcaccacctactcttatttactgcccattgattgacttttcttcatattttggcaaagagaaatttcacagcaaaaattcatgttttgtcagctttctcatgttgagatctgttatgtcactgatgaatttaccctcaagtttccttcctctgtaccactctgcttccttggacaatatcagtaatagctttgtaagtgatgtggacgtaattgcctacagtaatgaaaaattaatgtactttaatttttcattttcttttaggatatttagacccacccttgttccacgcaaacccagagtgtgtccagtgtttgtgtgtgtgttaaaatgataactaacatgtgaataaaatactccatttgaaactcttcggttatttgaaatgcttttgaataatgtttaaatgtcattatgtaatgctattcaattagctttattactttctcaaatagttgaatatgttctatcacttaaaaacttaaaaactcttcaccacttactgttttaagtgaggaatttacaaacaatgcataagtgtgtattaaaggaataattttaattttgagaaaaaaacgtatgttaaggctcttcccagtgggctttgttttctctgtccaagtccagtcaataaaggagctcttctgcttccccacttgtgatttg

SEQ ID NO: 65034 - DNA, 442 bp, Homo sapiens
  misc_feature (1)...(442): n = a,t,c or g
atccttcccagaaaaattcaggcacagatatggaaccaaggactgttgagataaacagggagctcagtgatgcccttggaatcagtattgctggaggaagaggaagtcccttaggagatatccccgtatttattgccatgattcaggctagcggagtggccgcacggacacagaagcttaaagttggagatcggattgtcagcattaacgggcaacctttggatgggctgtctcacgcggatgtggttaatctgctgaagaatgcctacgggcgcattatcctgcaggttgtagcagataccaatataagcgccatagcagctcagcttgaaaacatgtctacaggctaccaccttggttcgcccactgcttgacaccatccanaagacacaaaggagcanctgcagatgacggccgatttaaacgagggatcagatttatc

SEQ ID NO: 65035 - DNA, 844 bp, Homo sapiens
tgcattgctagtcagtttggggcaacattctttatcatctctgcttcatccttaacttctaaatgggtaggtgagggggagaaaatggtccgtgcattgtttgctgttgcaaggtgtcagcaaccagctgtgatatttattgacgaaattgattccttgttatctcaacggggagatggtgagcatgaatcttctagaaggataaaaacagaatttttagttcaattagatggagcaacaacatcttctgaagatcgtatcctagtggtgggagcaacaaatcggccacaagaaattgatgaggctgcccggagaagattggtgaaaaggctttatattcccctcccagaagcttcagccaggaaacagatagtaattaatctaatgtccaaagagcagtgttgcctcagtgaagaagaaattgaacagattgtacagcagtctgatgcgttttcaggagcagacatgacacagctttgcagggaggcttctcttggtcctattcgcagtttacaaactgctgacattgctaccataacaccggatcaagttcgacccatagcttacattgattttgaaaatgcttttataactgtgcgacctatagtttctccaaaagatttatagctttatgaaaactggaacaaaactttatgttgtggaaagtaagtgggatacttgtaatcaaggcatctctgtattcagtcttctttattttttagcatataaagtttgggtgtgttaatatgatttttaagactatcttctaaatactgtacttgaccatatatcacagattttacatctgattgacatagtgtatgttaacgtacgttaggcatcg

SEQ ID NO: 65036 - DNA, 1018 bp, Homo sapiens
atttatttcatataaatctcatatggtacaaaagtattacatgcttgggcctgtcttgcaaaataagaggttctttcagttcttcaggccaaccttccttcagaggcaaataaataagaaacatgtagaacatatttagaaaattttttaccataataaaaatatgtgaacatcttatatttagcatagtttagcaatccagtttatgtcgacaaatttagttcactgctgggaggcacatgtcacagaagaacctaataggcagcagatattttaacctgtaggaacaaaatgtttaacatttttcttgtattttttgaagaaggtactccatttgtacattcaagtttggttggccctttttagtctttttgttcagtattttaaacacttccattttcttctttttgtactgcctttgggcttcttctctctcctgttttctcctctcgaattcttgtttcttagcagcacgtttggcttgtatctgttcatattcttcttgtgctttttgatttgatgttttctttttatttttctttggaattgtaaaggagtttactgttttaatacattgttcttctggctgaggctggtcaaagctacactgatcttcaaataaaggctcgtcaatgctacactgttcttcaagcaacggctggtgaacttgttctgacaaaggatggtcgacttttcttgcttgcttcctatgtctttcctcttcagctaaatagagatgtttcagattatctgggtatcgatctgtgaattgagattccagtgacgtttgagccttcttttccttccgtagcaatttcttgtaactttgctgtattttcagttttcttcgaaaagcaaagccttgtccctcgcgaacgctccccacgaaggcttgcgggtggttaggccgccatgtcttctgtctcacattcttattcctgtacccgacagtggaaaccccttcaccacgcgcctcaataccaccaggccgccacttcgcggaccgcctcaccggcgc

SEQ ID NO: 65037 - DNA, 474 bp, Homo sapiens
aagggttgtctggctgcctccttcaactgcatcttcctgtatactggggaactgtatcccacaatgatccggtgagtggaagcctaatgggagaatgacagccttttcctggggaaagacattcttctgtgcacaggtcagaccccagagctaaatcaagtacatcccagcccaaaggcccctcccaacactcatcattgcaaggcacatagtagccactgagtacacacctcatggcctagctaacacaggtgttactgtcctctaagcccttacgggaccctagaagatctcaaaagtagccaccaactggggcagggtaaggaaccaagaagacacatctcagagacaacaaatcgaagtcttcctttaatctccaaaacacaaattagaagctgccaccacatctacattccatctataaaccaagtgatatatctgaaagcaaaggccacaaacatgaaagcaatttcc

SEQ ID NO: 65038 - DNA, 2263 bp, Homo sapiens
aaagatgttaaacaaagtgaatttgggacatgctgctcgtactgtgtgttacagccctgaagggacatggtggctattggaatgaaaaatggagaatttatcattttactagtgagttctctaaaaatatggggaaagaagagagacaggagatgtgcaatccatgatatcagatttagtccggattcccggtatctggcagtaggttctagtgagaactcagtggatttttatgacctaacgctgggccccactcttaacagaatcagctactgcaaagacattccaagctttgtcattcaaatggacttctctgcagatagcagttatctccaggtctctagtggctgctataaacggcatgtctatgaagtgccttcaggaaaacatcttatggatcatgccgctattgacagaattacttgggctacatggactagtattctaggagatgaggttttgggaatctggtccagacatgctgagaaagctgatgtcaactgtgcctgtgtatctcattcaggaatcagtcttgttacaggagatgactttggcatggttaagttatttgacttcccatgtccagaaaaatttgcaaaacacaaaaggttcttgggtcattcgccccatgtgacaaatattcgatttaccagtggtgatcgacatgttgttagtgctggaggtgatgactgcagcttatttgtctggaaatgtgtacatacacctcactgagagatgctgagatgactacagaaattaactttgagaccagaattacagagaagaaaaaccaaaacccaaccctgcatggtcaagtggtgctaacccaagactgtaacagggagaaatgcccagaatcatcaaaatagtgaaagactgatctgttcaaaatatttgctatatgcactgggtataatccgtaatccatacactgccagataatgccatttcaaggaaggatcgaatacttgatggtaaaggccaagtccccctgtattgggaagtgtgtgatttcggcagacctgctgggaaaatttagggtagagcactctttacagaagaactcaaaaacccaatttggataattttcattatctttttatcaaaattttttcttaatgtttatattttattttcaaggttcattgtttaatgaaatattttattcttgcatttccataaggaaagggaaagtcatgatcatcctaaaggatcacagtttttaaaaggcaaacattttccctaaggaaacagacacaagctttcctagagaatatgatgttttttaggcattaataaggtccttttttataaaggacacttttctcctagtagttttgaattcaggaacagatccaaagttagcagtatatggctgctacatttccattttcattttcgagccatcagtttatgttcagatgccatctctgtaatcgcacatttaaaacataactgtagcctcactaatggaaaagtagtatgatgaacaatcattcccaatggtgtacaatgtaagggttttagggagcaacagtatttaactggaagaaagaattgcatatttaatgtagtctaatatatacacatttgtttaacatgtaaacaaaagtgttaaattcacatatacaacattatacaatttaatcactcttggaataaaatttttatagccttttttctattgggaaaatttgtttagatgtgtgccactccataggtttatttccaaaatgaatgagcccaactccatttgtaaaaacttgtcagttagaattcctttttttagtggattagggctgaattcttagatccttatttcttttcactttaaatgctgccaaagatcactactcatcattcaggaattcgctgtctagcctatctgtagtttcctgaagattgaaaattatgtagactgctatttaaaaatatatttttctaagtgtgaggtttaagatgctgtattgaccctatgagtttttaatgtgttaattatctttatagcataatagatcgctttaggttcctggaatcccatttggtctgacaggatatatgaagattcttaatacctattttctgtgtctaatacttggttaatactaaaaatagaaatgactaaattacatcacagaaagcataaccagtgattgaacctggtagttttaaagctctaaatagctgtggctgaaggactgattatggggctaagaagcttgaaacgtaagttggtacttgttcatcagtggattctcctaaa

SEQ ID NO: 65039 - DNA, 581 bp, Homo sapiens
ttttttttttttttaataactgttcagctacaaaattttattggtatctttttatgttccctctagaggatgtaatgcacaaaagcattgccacggaacatataaaattacaaatgaaatttattgtaaaaagtagaatgtcttctagactggtgtcagtatttatgtcattcataaaccaaaactgctgtataatatattcattgtcagcaagttcatgtgtgtaaattgccatccaatgttattgactgatataagacagatattgaaaagacaatttaaatttactcttccaaacataaactgttccacaaaagcactgtaaaaactccttcaagattttgggttgtgcttgacatttatggttaactacataatttggtcgtgtcataatccattgtgtttggcaatttggcattaaacgcctgcagagcagattggatcctcaccccctcactagtagacagcttgagtctatgacgaagcaagcaagagaaaagatctagacgacgctgcccaggtggggagagtttatctactagagatcagagcccgtgtagttgcaaaagtgctgaatcctg

SEQ ID NO: 65040 - DNA, 1275 bp, Homo sapiens
cccacgcgtccgcctagtcctgggggcagcccgaggcctataccggctacaccattcagaagcacctgaactccacggaaaaatcagaagctcaaacttcctggtaactcaaggctaccaagtgaagatttgggtacctggctgagtttggggctggcagccttcagcacaccaatggtgtcaatggcaggtgtgcatgggacaagaacatatgctgtcatgattgtgctacagtttctttaagaacaccagcttgcaggatttgagttgaggaaaacacagacttccatgagtttgggaactacgagagaaaagacagacagagtcaaatctacagcatatctctcacctcaggaactggaagatgtattttatcaatatgatgtaaagtctgaaatatacagctttggaatcgtcctctgggaaatcgccactggagatatcccgtttcaaggctgtaattctgagaagatccgcaagctggtggctgtgaagcggcagcaggagccactgggtgaagactgcccttcagagctgcgggagatcattgatgagtgccgggcccatgatccctctgtgcggccctctgtggatgaaatcttaaagaaactctccaccttttctaagtagtgtatcaaaatctaaaccaaggagtctctggacaagaagctgggagaggcacaaactggacatctctctctctcatatccttcggcattgggttatctatgggagcaaggagtgggcacgcttctctgttacaaatagaaaacgattccagtcatacaggacacatcccactccaaatgatatttccaaaaacatacctctgacagtaactttgatagatggtttgtcaaatgtatctttctgggtatccacacctcttggcaatgaaatttgcagctcctcccttccataaatgaagtctctttccccaccatttgaatctgggctggcactgtgacttgatttgatcaatagaatgtggaagaagtgactgtatgccagttccaagcctaggtttcaagaggccttataaatgtctgttggaaccttacccagccatggacatgttgagtgagcatgctggagaatgagagaccacatgaagcagaaacatgctttcctagctgaagtcatactagcccaaccaacatggcagctaacacatgaatgaggccaatcaagaccagaagaaccactcaagcagatcccagcccaaattgcccattccacaatcaggagctaaataaattactgttgtcttaacac

SEQ ID NO: 65041 - DNA, 569 bp, Homo sapiens
atcgatgaccctcgtccatgtggtggaattcgcctcccaagaaaagaggagcatagctatagcaaattggaaagatgatgagtggtgccccgaaaggatcatacagtactataggcctgccacatgggcacaagacgactcatagggataccatacccccatctacatgctcaactggatcatacggttacaggccatcttagaaataatcactagtgaaactggcagagctttaactcttttagcccagcaggaaacccaaatgagaaatgccatctatcagaatagattggccttagactatttgctggcagctgaaggaggagtctgtgaaaaattcaacttgaccaagtgctgtctgcaaagagatgatcaaggacaagtagtcaaaaatatagttagagacatgacaaagctggcacatgtacccatgcaggtttggcataggtttgatcctggatccctgtttggaaaatggcttccagctctaggaggatttaaaactcttataataggaatgataatggtgtaggaacctgcatgttactcccctgttgttacccatattt

SEQ ID NO: 65042 - DNA, 1436 bp, Homo sapiens
aattccccagagggaccgaagacaccagtgacaggcctggcctgaatcttggggcaccagcagccatgctggcccttgggcagggagctgtgtcccatctccccagcacagcctcctgcctgccagccagccagtaaaagggtggcggcctccaacctccagcctggcgctggctgatgcactgctcagggaggggcaggtgagcgtgcacacgaggagggggcatctcccacccccaggccccctgaggcaagagtgttggggctcatgggccctccgtgggccctgccagggtggaggccccaggcctgtcttgagctgggctggtgttgcaggtgggggtggggcggctgctggtggccagcagctatcccagccttggtttctgtctggaaagtggggtgtgagtctggccactggggcttgggaggcttttatggggtgacttggggcttctggtagtcccccgggaacccccagagcctggggtctgagcctgtcctcaggcatgtggtctgggtgctccaaggggtttcatcaggttgaggggtggctttgccagcccattcccaagtcctgtccagtccagggtggggcagggatcccccagggctgcgcggcccttccccagaaccagtcaaccgtcggcaccccaggatgtctacccaccacccacctgggcacccacgctgcagaccgggagctggtcagcattttcgggggactgcttgtcccgtgcccaggcctggaacatatctcccgtctcatcctgaaacggcccaagcccgaggcctctgtctgaaggaggggtcctggcggacccctgctttccttgaggccttgctgggccagcagcctagcaccctctctctgggcgcagcaccccctcggctccccctgcctcttcctgttttaattgatttttataagaacaagcacttaggaaacacagtaagagctctggcggttacagacactgcaggaggtggccctccgggtggcaggtgctcctgtgggacccgcctgctttgttcccaccagtgcccatgtggctgtaagaaatcataacttggcccgggcgcggtggctcatgcctgtaatctcagcactttgggaggcccgagacgggctgatcatgaggtcaggagattgagatcaagaccatcctggcggctgggcgtggtggctcacgcctggaatcccagcactttgggaggtcgaggtgggtggatcacgaggttgggagatcaagaccatcctggctaacacggtgaaaccctgtctctactaaaagtacaaaaaattagctgggcgtggtggcgggcgcctgtagtcccagctactcgggaggctgaggcaggagaatggcgtgaacccgggaggcggaggttgcagtgagccgagatcgcgccactgcactccagcctgggtgacag

SEQ ID NO: 65043 - DNA, 602 bp, Homo sapiens
agagaagtaggttccaggaaacaaaaaggtcagaggtgtacccagtgaagacaacagcaggtgtgaaagccaagaaactgcagcgctcagttcactcaagaaacaaaggggttcaatatggatggactgcagatctccagatggaagcggggcatggccaggccagcatcctatggctctactttgagacgggtacctgggtgtatcctgtgtttgccaaactcagcctcttgggtctagcagctttcttctctctcagctacgtcttcatcgccagcatctacctacttggagagaagctcaaccactggaaatggggtgacatgaggcagccacggaagaagaggaagtaattgcacaccattttccaagaaccaagaaagaagaaaacacaagagatttttctcatccttttttttttttcggggggggggggggggggggggaacataccaaagtgggggggacaaaaagggatccttaattttaaaaaaaggttggggaagggaccttaacttgaaaactctgggttttttgaagggtggactgcccatgccaaaaacaactcctggtatttaaaaattaattatctttgaccttgg

SEQ ID NO: 65044 - DNA, 1672 bp, Homo sapiens
tttcgtgggtcagaagggaggtggtcgccctccgtcgtggtctggcgtgtattccgagccttggtgtctggcggtttccgagcgttggtgtctggcggtttccgagcgttggtgtcttggcggtttccgaccgttggtgtctggcggtttccgaccgttggtgtctggcacgcgccaccctctcttgctttggttgcgccatgccgatgtaccaggtaaagccctatcaccgggtctgcgcccctctccgtgtggagcccacctgcatgtactggctccccaacatgcacggcaggagcggcggcccagcacttggcactggccacttgcagacaagaagacaagaaaatgatttgaggacagcttcaatcgcggtgtgaagaagaaagcagcaaaacgaccactgaaaacaacgccggtggcaaaatatccaaagaaagggtcccaagcggtacatcgtcatagccggaaacagtcagagccaccagccaatgatcttttcaatgctgcgaaagctgccaaaagtgacatgcagggatgtccttcctgagatccgtgctatctgcattgaggaaattgggtgttggatgcaaagctacagcacgtctttcctcaccgacagctatttaaaatatattggttggactctgcatgataagcaccgagaagtccgcgtgaagtgcgtgaaggctctgaaagggctgtacggtaaccgggacctgaccgcacgcctggagctcttcactggccgcttcaaggactggatggtttccatgatcgtggacagagagtacagtgtggcagtggaggccgtcagattactgatacttatccttaagaacatggaaggggtgctgatggacgtggactgtgagagcgtctaccccattgtgtaggcctctaattgaggcctggcctctgctgtgggtgaatttctgtactggaaacttttctaccctgagtgcgagataagaacgatgggtggaagagagcaacgccagagcccaggcgcccagaggactttcttccagcttctgctgtccttctttgtggagagcaagtctcattttgtcacccagggtggaggcagtgggcagttctcggctcaccgaaacctttgcctcccgggctcaggcaattttcatgtctcagcctcccgagtagctgggattgcgggtgcacccccccacacctggctgatttatgtatttttttcgtaaaaacggggttttcccgtgttggccgggctggtctcgagctcctgacctcgggtgatccgcccgcctcggcctcccaaagtgctgggcttacaggcgtgagccaccaaccccagcccacttgtaggtcctatgcacaacagccagacttctctctgtgtatgtcacctcgctctccacaaagaaggacagcagaagctggaagaaagtcctctgggcgcctgggctctggcgttgctctcttccacccatcattcttatctcgcactcagggtagaagagtctggtggaatggacacgaggaaagggctcagcacaacaggaaacaaggaggtgtaacgacaacagagggaggagatggcccaaggagatgataaaggaaaaggaggtgagagctaaggaaagccccaaggagatgcgaaaagaaaggagacaccagggagactttcacagag

SEQ ID NO: 65045 - DNA, 2288 bp, Homo sapiens
cagtggcggtccgagatgaatgctactggcgccacgtcttctgggaccaggacctctggatgctcctttttattttgatgtgccacccagaaaccgccagggccaggctggagtaccgcatccgcacgctggacggggccctggagaacgcccagaacctgggctaccagggagccaagtttgcctgggagagtgcagactccggcctagaggtttgccctgaggacatttacggagtccaggaggtccacgtcaacggggccgtggggttggccttcgagctgtactaccataccacccaggacctgcagctatttcgagaggctggtggctgggacgtggtcagggctgtggccgagttttggtgcagtcgtgttgagtggagccccagggaggaaaagtaccacctgaggggagtcatgtcccccgacgagtaccactcaggggtcaacaactctgtgtacaccaacgtcctggtccagaacagcctgcgctttgctgctgccctggcccaggacctgggtcttcccatccccagccagtggctggcggtggctgacaagatcaaggtaccctttgacgtggagcagaacttccacccggagttcgatgggtatgagcctggagaggtggtgaagcaggcagacgtcgtgctcctgggatacccagtccccttctccctgagtcctgatgttcgcaggaaaaatctggagatttacgaggctgtgacgtccccccagggccccgccatgacctggagcatgtttgctgtgggctggatggagctgaaggacgcagtgcgggcccggggcctcctggacaggagctttgccaacatggctgaacccttcaaggtgtggacggagaatgcagacgggtcaggcgctgtgaacttcctgacaggcatggggggcttcctgcaggcggtggtcttcgggtgcacggggttcagggtcacccgagcgggtgtgacctttgaccctgtgtgtctgtcggggatctccagagtgagcgtctccggcatcttctaccaggggaacaagctcaacttctctttttccgaggactccgtgaccgtggaggtcacagctcgagcagggccctgggctcctcacctggaggctgagctgtggccatcccagtcccggctctccctgttgccaggacacaaggtctcctttccccgctcggctggccggatacaaatgtcacccccgaagctgcctggaagttccagctccgagttccctgggaggactttttcagatgttagggacccgctccagagccccctctgggtcaccctgggttcctccagccccaccgagtcactcactgtggaccctgcctctgaataatcaggaacgggggcttcagagacgtctcttgggccttccctctggccacgtctgcacccacccctcctgggcaccctcctagcctgccatccctcacctgcagccaggctctcagggaaggtccatgctgcttggcctgagttcaaggctttctgcctgtagcctggactcccgtggacccccgtgggcaggtggcttccccgtggcatctccacaccgcctctgcctgcccctgtggactgatgctatcgcgcaccgtcccacgaccccaccccgagctcctgaagccggggtctgagcctgcatcacctctggcctctcatcccccactctcctgagagcagtggtcacagcggccggccgctctgctgagaaggcagagaggcaggctcaggcctcagcgtggacagcagggataaggggcacgaaggacggggactcggccccttcagaattcctcaggactctcaggtgcagctttgccaaaaaggaacttttcatgtcatgcagttgaggggacttagtctcaatcccaggctcctcttgactctgggcagctttaatcaggttgggcagcctctgctacagcgtggagtgggatggctctcttccctcagccacgccgcttgtgaggacagaggtgggggagtgggaagtgggaagtcaccagagaacaggagagggatttgagggcgcgaccccagcgctctccacggaccagccagagggactggagccaggtgtgcatgggttcaaggccctggccctgcccagcctctgtcttgggagctcagccccagggttcggtcgtcagcagtttcccaagaacaagatgtgatggcatctgctgctgaaaccctgatgaggaccaggccccctgcaccgctgtcagcctgaggaattaaagctttggtgctgggaaaaaaaaaa

SEQ ID NO: 65046 - DNA, 551 bp, Homo sapiens
ttttttttttttcatgtttccactagaaacttttactacttgattatcttaaaaagtcatgttgtaccatcacccaatcctgtttaaaacagcactcaggccgtttatgtagctgatcttggattagcccttgttgcacagggatgatttaccactggattccttggaatccgctttcgacggtctctgaatgctgcacctgattgtagggcttctagaagattatccatcacaccagtctcatcaccctctttgtttatatcaatgagttgtttctttttcttctggcgttctaacttttcttgttcagctttctcttttgcaagttttgccctcctggtcttctcttccatttctcttctcttattgttttctctcactgcttccaaaaacaaagttcggaagttgttgagatcaccaaagaactcttctatgctcactgtctttgagtcaaaaatgaagtattctccaagattctcatagagcttcatcatgttgttgtgcatggtggagaagttttacaacggttctcgggcagtctttgtaaagct

SEQ ID NO: 65047 - DNA, 1832 bp, Homo sapiens
cagcgaaggcaggcccaggctgtgacagccgccagtatccagcagcacgcccaggtgctggcctcccctgagcagagtcctctgcacacagctctccttccttaatgcccagagataagggtggcttgagctctggtgcacagaaccgcatcgtactgtcacgtgagctggacccaccttgctcctggtctgcggcagtctctacagtgcgtagatggaggaatcctgttccctggaggttcggggcagccactggtagggtgccagcaacacccccttctcttccagcacctgctgtccccagatgcccctgcagaagctgctcttctcagctactctgacccagaaccctgaaaagctgcagcagctgggcctccaccagccccggcttttctccacagggctagcacacaggggcctggaagatacagatggggacggggattcggggaagtatgcctttcctgttgggctcacgcaccactacgtgccctgcagcctcagctctaagccgctggtcgtcctgcacctggtcctggagatgggcttctcgagggttctctgcttcactaactcccgagagaactcccacaggctcttcctgctggtgcaagcttttgggggtgtggacgtggctgagttctcctcgcgctacgggcctggccagaggaggatgatcctgaagcagtttgaacaggggaagatccagctgctcatcagcacggacgccaccgcgcgaggcatcgacgtgcagggtgtggagctggtggtgaactacgacgccccccagtacctgagaacctacgtgcaccgggttgggaggacagctcgcgctgggaaaactggacaggccttcacactgctcctgaaagtgcaggagaggagattcctccgaatgctaactgaagctggggcacctgagttgcagcggcacgagctctccagcaagctgctgcagccgctggttcctcggtacgaggaggccctgtcccagctggaggagtctgtcaaggaagagcgcaagcagagggcggcctaggctggggctcagagggccggagggactgaacgctcaccaccctgaccctccttccagagcagtgctgatcactggatcctgtatgtgaggaaaggaatcccccagtggacacagccttcctccccaagcacgtggtctctgcgccaggcagcccgggcgtcagagctcaagcacctgccccgactggagacttcagggcttgtcactttcagagtgtggaggtcaggatggctgcgggcaatgaagccttagtaaaacggtgaaaagtactcccagacggacgcgggcacccgtcatgcttttgctgagagttgggggcattaaccttgagctaatgttaaaaatcaagctcttggccaggcatggtggctcatgcctgtaattccagcactttgggaggccaaggcgggtggatcacctgaggtcacgagttcgagaccagcctgaccaaacatggagaaacccctgtctcctactaaaaattacaaaatttagcccagggcgtggtggtgcatgcctgtaatcccagctactttgggaggctgaaggcaggaaaatggcttgaaccccgggaggttggaggttgcagttgagctgagattgcgccactgcactccagcctgggcaacaagagcaaaactccgtctcaaaaaaaaaaaattgccgggcgcggtggcaaatgcctgtaatcccaggcactttgggaggccgaggcaggtggatcacaaggtcaggagatagagaccatcattgcctaacatggtgaaaccccgtttcctgcctaaaaatacaa

SEQ ID NO: 65048 - DNA, 353 bp, Homo sapiens
ggcacgagagagaggccagcggatgttgtaaacatcctgaaccaaatagaatggcctgtgcagaaaactatatatccggggtactgaaccaggtatgtgggtcgcatgaaaaaaccccccctagcgacagatgcaccccatgctggacagaatgcttggtgaacaggcgaccatgcttttcagctctggaagcctaggagacatactttcccaaagagtttaatggtgaatcactcacctttcatgcagatatgtgcccactttctgacaaggagagactaattgggatacacactggacttggtgaggtcgtgaaacacaggcccaatgcaacgcaagaccagctgtgagct

SEQ ID NO: 65049 - DNA, 1453 bp, Homo sapiens
tttaagttgagaactttcaccttttcatttaaaaggaagcactttgtggcttctctttggcatatccgaatcaccagcatcatcactactcctgctctctggggccactgttaagcaaagtgaggactgcttggtcacaggcactgtgaatgctgggatagttgatctgatcaccaagacggctactaagtcactagcagggtgggtggcgtatacagcgtggatgtgctggaccaagggatgactcacatccccggccggctggagccggacagcgagagatttcatcacgctactcagaagggcacaccatttgagacttaaaattctttatttctggaattttccatttaatatttttgaactgcagttgactgcaggtaacaaactgtggaaagcgaaaccatagatacgagcgggctactgcgttcaaaaggctcttcaactgttgtggatcctctgatgttctcggagatggtttaggtggttacatgccttcccgcactccttacattcgtaggatttcgccccactgtgcgttttctgatgttgtgtaagctgatggccgtgactaaagctcttcccacattctgtacacccatagggtttcaccccggtatgaattctctcatgtttcacgaggctcgatccataaatgaaagccttcccacactccttacatttatacggggtttcgcctgtgtggattctctcgtgctgagtgaggtgatagccacaattgaaggccttcccacattctgtgcacttgtacggcttctcgcccgtatgtatcctctcgtgcttaacgaggctcgaaccccagcgaaaggccttcccacactccttacattcgtgaggcttctcaccggtgtggatcttctgatgctgagtaaggtaattgactcgagtaaaggccttcccacattcttgacattcatagggtttctcacctgtgtgaattcttttatgctgaatgaggcttgaaccacaaataaaagccttcccacagtctttacactcgtaaggcttctccccactatgaattctcttgtgctgaataagtttatacacacggctaaaggtcttcccacagtctttgcattcgtagtctttctccccagtgtggaatctctggtgctgagtgagctcatcaccacgccgaaaggcctttccacagtctttacattcatagggtttttcaccagtatgaatcctcttatgaataacgaggcttgagccccatcgaaaagccttcccacagtctttacattcgtagggcttctccccagtatgaattttttgatgttgagtaagctgattgccccaacggaaggccttcttacattctttacattcataaggtttctcaccagtatggattttctgatggtgactaagttgatagccacgactaaaggccttcccacagtccttacattcaaaggaattctcc

SEQ ID NO: 65050 - DNA, 1255 bp, Homo sapiens
tttggtttacagaacttttatttggattctttccttgtctgttaataatataggctgcacctgggcatcatcgtgcccttcctttttgattctgctgttttgcttttaatcctacaggcatttcttctggcaggagccttgtacacactctgggtggttcatgaccaccacggacttgccctttcaaggcagaagcctgtgattcaaaaacttccattccttccaatcgactattataaaactcattttgtctagtgcccatactcctttaccttaggatcctgggccaactgtcactaaagaaaacaaaccatttcctcctcctgggggaatgtgcttctttcaagaaggtgcttagagaatagacattctaggtgacagcagttatgaaagaggtgtctctaatgaacctaacacttcttccaacatactccaggttcaccctcctttgaagacagaaagtactacaacttcagttgccaccctagtcaggttcataggatttactcagtaggttaagagatggtgctgagaatgaagtccagagtttgagtctacaagtggcatttgcttctcctttgggacttctgtggcagggtgtggaaccaaatcagattggttgcatatctgtttctcttccacctccttcaaataaaagcgagaacctcttgggagaatttaagcaccattagcagacacatcttagagcagttaatgaaatgttttgtatttcagtagaaaactatttcaatggtgaaaatgatgcaggaatcagaagcatattctgctgagatactaggtagttgacactttcccaaactggaaaaacatttcatagaaaggcatatagagttactgactgaaacacatttgttctaaaaataattcatgcctagtcaaacagcttaccagctgccacaactctgggatcctcatgggacttatgtctcccagctgcacgactatctgcactctcattccaccaaagaacatgaactctgttgagtgctccgtactctgtgtggaacactccaactagttttgtgtagcctagattgacatgagcatgaactgcccttttaaatgcatcaccccacagagctggcccaccaggtttcatctgaaaagtggccagttcatagactcctggaatagggagaaaaagaatttttcagaaaacattcaagcaatatccaatcacgtttctcagtgaatagtctttcactatctacacacacagatttggaggatcaga

SEQ ID NO: 65051 - DNA, 1131 bp, Homo sapiens
gtttccctcatgattttattgtctcctggggaccctgctttgggcggtctggatgtctgccttgggcctagtttgaggcgccccgaaggtggagccatcttggtctcgtaatttgctcttccctgccccccaagagggaagccagagctagcggggccagcactgctcaggaggcaaggtggcctacctgtcgcacacccggaggaggaaatcattgaccaggctctcgtgccggctgcagatgcttctcttggaaggcactcttgagccagtcctcaatgctgcacacctgcacgcggctggagtgccagcagatggagaggctgcggagtgccgggcccaggaggaagttgtccttctggagttcagtgagggaacggaagtgcagcagggaccagagtgcggggtcctcaaacacgtcgtggagctgggagcaggtcctggcaaggctcttcctgctgtccttgtctaggaaggagaagaggtgcagcaggcactcccggttgagctgggttatgtgcatggtgagcagtggccacatgtcacttcatcctggcccaggtactgcagctccaaatcgtggggattctgtaagagcttgctacctgttgactgaggaggcccacgagttgagaagaactagcaagagtggtacaaaactgcaggtcattgggctggccaccaggtattcccacccaccagaagctggctgttgtactcacccggaaccatggtgcaccaccacagcggcgaggtcatacaggcagctctccgggccactgttctcaggctacagaacaaggaagaaggagcagtggtcaatgacatcagtatctcgatgacctctaccctctccatgtgatgacaatcttactgaagagccattttttcaccatgctaaaaaggccagttgggtccagcagctttgcctctctacccttttatcaccaaagtatactgctgagaaagaatcaaatgaaaagaaaaaagactcaacaagacctcactcatattaactggactctacaagcagtgagcatccagacctgcatttggttacaaaagaagccttcaagctattttcatcagcttcctaatcaagttaaaaaataaaccacaaaactgagaaaa

SEQ ID NO: 65052 - DNA, 1093 bp, Homo sapiens
cttgggacttactggccttccaaaaattaaagaggagaactgataatactgattattcattaattggaggaaggaacattagtattgaaatgccgttaacattttaaaaaataataattattatcatagccttgccctgaaaccctgattattgttagagagttatttccacgaagtgtttgtcagtttgttggacatttgagaccccaggaaatcccctttctcgtaacgatctccgcttggatctgatctcaacagggtgtcgtagtcattcttcagcacaattcttaattggagaccaagaaccctgggcctttagaggtggtctagcaggagagttccaggtatcaatatgaattcacaactgaattgacattttctttgttttatgacaaaccttatgttgcgcatcatatggctggaaggattggtctgccgaaggctttctaagcccaaattcaatttagttacatagctggatttttaaatcaaattttcctcctctttcacagtaatttctgaaggagatgctgccaatcccccccgcgcctgcgaagcgcagcggctctaggtatacacttcacattgtttctttgcaggtcgcacagcattttaatctgcgcccgcaatgcacaatgcgcgcatgcttgtctgccagtggaagctccatgaacaaaagatagtaattatgccaataaatggtgaaagagcttttggatatttatccaattattttataaatataatgtgcttgaaagaattgtccattgctgaaaatatgaacaaaataggaagtttttttgctgctggaatttgttcatggactttctaggtgctctacttttctccccccaacaggtgctctgctgcgcacagcaaactgaagcgcattgctttggggataaagcgtctcctggacagataaccctcttcagaccaaacctctcctcctgacattctgttctgccatcttatcgtagggagatggtctatctaagataggttttaaaaaaaaatagatttgttcataaattgggaataaggttttgttttttgtttttgtttttgtttttactgtaaatttaaatcccca

SEQ ID NO: 65053 - DNA, 2188 bp, Homo sapiens
cttagataacagagttagatccaggtgtgtcctggtgtccttctaggctgagcccctaagacttggtgtgaatggtttgctgctttcctccatacttaattttcctctttgttttcatagataaatatcattcagggaattgtggcagaaatcaacaccaagactggtgaatctgaatgccgctattataaagagcggcttctttacttggaagaaggccagaaagactccctgatcgacagctctcgagtcttgtgttgtcatggtgaactgaagaacaatcggggcgtgaaactgcatgttttcctcttccaagaagtgcttgtgatcactcgagccgtcacccacaatgagcagctttgctaccagctgtaccgtcagccaatccccgtgaaagacctcctgctggaagacctccaggatggagaagtgaggctgggtggctccctgcgaggggcattcagcaacaatgagagaattaaaaacttcttcagagtcagtttcaaaaatggatcccaaagtcagacccactcgctacaagccaatgacactttcaacaaacagcagtggcttaactgtattcgtcaagccaaagaaacagttttgtgtgctgccgggcaagctggggtgcttgactccgagggatcgttcctaaatcccaccaccgggagcagagagctacagggagaaacaaaacttgagcagatggaccaatcggacagtgagtcagactgtagtatggacacgagtgaggtcagcctcgactgtgagcgcatggaacagacagactcttcctgtgggaacagcaggcatggtgaaagtaacgtctgacagaagcatgtgcacttcgggaagcaggcctgcatcttacctgtacagtatttgcattccacagatggaacggtttggagaagcactttttcatacttttgtgaaagtatacatgttggcccagtctctcgtatctgtacctttgtccctagtactgtaactgccaatctgtctgtgtaagctggaatctgtggcaactattaccctgtgttgtatttcccaagtgtctggatggatggagaggtactcaaacaagttactttcagttgtcctgctggattttaaaaaaatagaaaaagaatctcaaaactactgttttacatagattgtttgaagagtccttcctcttgtgcttctgtaccactttcccagctcttagatgtggtagctaaaggcacggaatttagacggccttgtaaatagggcatgaggaactcatctgtgtattgggatggtattagagagagaatcaggaaagaccaactcatgaagtgaacttggtttgatcttactcaactagaaagcttgaaaacatccctggggattctgaaggcttaattttgcaaaggaggatgcattgtctgaactttgcaacttcatccagtgcaagtttgatgcaagaatgtattaggacataaaatagaggctgaccttaaaagggccaggacagaagcggctgccagctctgaatctttaactgaaatgcacatggcaccaggaggtgtctctcatagttggttgctagcctaaaacatcagaatagaacccaaagggcttaggaaggcctgccaggataacaagaaggccctgtattcattgtgtttcatctgcctaggcctactcattattttagagaatgaatgaagcaacaaggaagagagaccatgactctatcgatgacactgtttatagaaacacaggagaggaagaatttggaatgaaaagcacttcgtcagaaccttctgtgggagccattgagagaaaagcatggtccagtgccttctgagaaaggccagagctttgggctttcctgctctgcttttgggtcgtcaatttgccatctctggttctgtgctataatcagaattgtaattatgttctccagaggccaatttcattaactctgattaattagaatcagctagccagattagtaacctctttgtccagccttgatttacagtgcagggtaaagtgcagaccttaaaaacagctaagtacctagaagagctccctgcaagtgtaaatattaaggatgacctgtgcaaaattatacccacaccagcactagtggtaattattctaaattattgccaaaaagttttttttaatctgtctttcaagtttacagaaaaga

SEQ ID NO: 65054 - DNA, 1918 bp, Homo sapiens
  misc_feature (1)...(1918): n = a,t,c or g
aattcggcatgttgagagaggaaagaagctgggaccaaagctctgcagagaacccaggctgagatccaggaaatgaaggaggctctgagacccctgcaagcagaggcccggcagctccgcctgcaaaacaggaacctggaggaccagatcgcacttgtgaggcaaaaacgagatgaagaggtgcagcagtacagggaacagctggaggaaatggaagaacgccagaggcagttaagaaatggggtgcaactccagcaacagaagaacaaagagatggaacagctaaggctcagtcttgctgaagagctctctacttataaggctatgctactacccaagagcctggaacaggctgatgctcccacttctcaggcaggtggaatggagacacagtctcaaggggctgtttagaaatatatggccaaatctgtaacccggaaacagcaaaaaacttcttagcaaaggatcactaagtaccctttggatgtactcttccaaccagacaagagtgccagaaacttggcaagcaattcatcctgtggaagttgcaaatactggctgacctgcttaaaaagattctagagttggccggaggcagaacatgtcaactctttgctggattctatttcatctgctgttgatactgatctcaatgcaccaaggaaaggaaagatgagcctcctgtcttccagcaacaaccctcacatatgcactgagtaaaggatgaatgtatggacacatctgggagtattttaaagaatgtatcttgccttgtgttgacccaaaccaaaaacatttttgaggggcacatgtggggtcaaaaagatagccaatttccattacatgggtttacaatttccattcttttgtgccacgagtgttagaatttaaatgaatacttttacaaagtctactttttgttcaaggatatgctgacccatatagtttactcttaaaattgtgtcaaggtatttctcactatactctaaaacaactagacttgaaaagaaaccatttgagatttgaatctaatggttaacgctattcagattttcccaaagatcttacctcatgaaagtagttctgggtcagaatgatctactcagttaaaaaacaacaacaacaaaaaactaagcgattgggaaaaaacaggaattttatctggttattgcatctggtgatagaggccttcaaagcctattatttctaacctaagtaaaggccccagtgaaaaacatactggggaaataaaacctctgagaaaaggttcaagcaccttttccaaatttaaatcttgccttaaattctctctaccacactgcctttgacactcttggaagtccatgtagttctctacagacagacttcaaagaaacgttaccttatcaaagactaatctgtgccacctctgattcagtgttttatgtctttcactttccctgggaaggagtaaagttcttttctacagctctgggactattacatttaattctgctcttgatagtcaaagaccatggacaacaactgtcatctgaaggactcttctagaagccagagactggtgtttgatggatgttttatactaaataaaacccatcagcatggggttatgtagaaaagcaatttattccattttaagcacttacacagttagtcatggagagtaacaggcctgctggtgaaacaggtcacccaaaatggagatgggcatcaaactagtgggtccagggacctaactcctaaaaaaaaaaaagcaactcttatcaaggattaatttaatttttaaaacaaatacaagttattgattcactcttctcaacttgacagtctacctggtggtattaactgtcagggtaaaaacatacatcttttttttttnaaaccanactgtgggtgggtgcccaagttaaaaaaaaaa

SEQ ID NO: 65055 - DNA, 1846 bp, Homo sapiens
ggcacgagccccagccagggctgtggctgaagaggctctgggtgctcttggaggtggctgtgcatgtggtcgtgggtaaagtgcttctgatattgtttccagacagagtcaagcggaacatcctggccatgggcgagaagacgggtatgaccaggaacccccatttcagccacgacaactggataccaacctttttcagcacccagtatttctggttcgtcttgaaggtccgttggcagcgactagaggacacgactgagctagggggtctggccccaaactgcccggtggtccgcctctcaggacagaggtgcaacatttgggagtttatgcaaggtaataggccactggtgctgaattttggaagttgtacctgaccttcatttatgttcaaatttgaccagttcaagaggcttattgaagactttagttccatagcagattttcttgtcatttacattgaagaagcacatgcatcagatggctgggcttttaagaacaacatggacatcagaaatcaccagaaccttcaggatcgcctgcaggcagcccatctactgctggccaggagcccccagtgccctgtggtggtggacaccatgcagaaccagagcagccagctctacgcagcactgcctgagaggctctacataatccaggagggcaggatcctctacaagggtaaatctggcccttggaactacaacccagaggaagttcgtgctgttctggaaaagctccacagttaatctggacagatacctcaattctaggtgaccaacgggagggcttctcaaggcttagctctccctgagacccagctggcttttacccttgacctgtgtccctagctgaatcactagctcagatttttctgatctaagcaaacaactcccagctgaggaatgcaggccacagcacccaatcaagacaaattgttattatcagaaaatgaagcaacacttgagctgttcaggccagttccctgttgaagaaacagttccctgttgaagaaagtagagcctgacactgctcccactttggagaccacattccctgcacacggtctttgagagagcagttgcacactacaggcacacttctgaggtacggtatctctctccagccactctgataccaagtaattcaagctggcattccttctattagggaaattcattttacccaatttgcatttatggaattgatcatttaagacactaaattagtttttagaaccaattatgggaagaattccagttgttaggaagagatgaggagttggaagaggagggattagaaacaggaggaggcagtcatcctctccttgccaaaagatttaaacctgtccacattggtgggtgatgatgggtgagtttccatggtaacacatccctaattttaccagggaagaggagagtactcactttaccatctttgaatatatttcatagaaatctagctctctgtaccctgaaatcttccactagcctcacttttcaacagagtcatctagaagggagggttggcttcccaaaagcataaccttgaccaaaccaaacaataggcaccagcaatgctgtcattcagttatgcagaagctcatttgtgaaattctgtttctctgatttcttcgcaagtctcttaatggtcatttgtgttagattacatcaaactgatggatagccattggtattcatctattttaactctgtgtctttacatatttgtttatgatggccacagcctaaagtacacacggctgtgacttgattcaaaagaaaatgttataagatgcagtaaactaataacagaattattaaaatatatcaggctaaaaaaaaaa

SEQ ID NO: 65056 - DNA, 1762 bp, Homo sapiens
ggaagcaattgactgttacacaaaaggcatggatgccgatccatataatcccgtgttgccaacgaacagagcgtcagcatattttagactgaaaaaatttgctgttgctgagtctgattgtaatttagcagttgccttgaatagaagctatacaaaggcttattccagacgaggtgctgctcgattcgctttgcaaaaattttaagaggccaaaaaagattatgaaagagtattagaactagaaccaaataactttgaagcaacaaatgaactcaggaaaatcagtcaggctttagcatccaaagaaaactcatatccaaaggaagctgacatagtgattaagtcaacagaaggagagcgaaagcaaattgaagcacaacagaataagcagcaggccatttcagagaaagatcgggggaatggatttttcaaagaggggaaatatgaaagagcaattgaatgctatactcgagggatagcagcagatggtgctaatgcccttcttccagctaacagagctatggcctatctgaagattcagaaatatgaagaagctgaaaaagactgcacacaagccattttattagatggctcatattctaaagcttttgccagaagaggaactgcaagaacatttttgggaaagctaaatgaggcaaaacaagattttgaaactgttttacttctggaacctggaaataagcaagcagtaactgaactctccaaaattaaaaaggaattaattgagaaaggacactgggatgatgtctttcttgattccacacaaagacaaaatgtggtaaaacccattgataatccaccgcatcctggatcaactaaaccactcaagaaggttattattgaagaaactggtaatttgatacagactattgatgtgccagatagcactactgctgctgctccagagaataatcctattaatctagcaaatgtaatagcagccacaggcaccacaagtaagaagaattcaagccaagatgacctttttcccacaagtgatactccaagagcaaaagtattgaaaatagaagaagtcagtgatacttcatccctgcaacctcaagccagtttgaagcaggatgtatgtcagtcttacagcgagaaaatgcccatagagatagaacaaaaacctgctcagtttgccacaactgttcttcctccaattcctgcaaactcgttccagctcgaatctgatttcagacaattgaaaagttctccagatatgttgtatcagtatttaaagcaaattgaaccatctttgtatcctaagttgtttcagaaaaatctggatccagatgtattcaaccagatcgttaaaattctgcatgacttttacattgagaaagaaaagccattactcatctttgaaatcttacaaagactttctgaactaaaaaggtttgatatggcagtgatgtttatgtcagaaacagagaaaaagattgcacgtgcattatttaatcacatagacaagtcaggattgaaggatagttctgtcgaagaactcaagaaaagatacggtggttgatttccatttttgctgaaataattgtttttgactttcatatgtaaatttttttctactgaaagtgttttgctttttaagaaaatgaaattatatagcaggaaaggactatctttgaacataagttaattaactataaggtgaattgtgatttaactagtgagaattgaattccacgtgaactctgtttttctgaaaataataatccccaatgag

SEQ ID NO: 65057 - DNA, 1428 bp, Homo sapiens
tttttttttttttttttttaccggtggagctgtttaagccaaggagttgtggagatctctgtgatgatccaaaatctggactaatataaaatcaactctgatgctaattaaatctgacttataacttgtctgctaaaagaaattataacaggaaactttggtgactggtaaggaatgttgaaaagggaaaatcagaaggaaaaacctggttcataagaaggaaggaaatattggtccaagcacgtcaagggctctaagtaaaaaccgatggcactacaattccacataatccattacatttggaaaaagaagctcctggtagacacagggcctctttgggatattgttctttgttctgattctgtgctcaccaggaaacaaatttcatctccgtagggggcccgtccttcagtaggaatggccctgctcctaggttcttggctcacttgccaagactacaatagcactcgcgtttatcagttatgcttgtgtgaagctggttattgcaattcattgttctcaaaatactttcatgaaaagcctgacctgagaaaaagccttctctgtaatcatattaattagaacataaatgtctactttgccataattatacaaagagcccaaatgggcaattaactccagttggttgcttctctctgagccttacttgccagctcttattaccgcattccagagagagtcaacctggatggagtttgtcccctaaataaatgtagcgataaagaaaagggtgctccaaatcagtttcatcagaatgataaggtacagtactgcagccatgtctgcaatagcacttcaattttacttttttttcccctagcatgtccttaagcattttctccccagcttttcacaatctttcttataaggctgtaatgtcttacatccttaataggcatgattagatttctcccaaattttccaaattaactttctttcaatgtaaccaaaacaaaaccatggcatacagtaaactaaaagggtagacaggagagaaaggttgctgcaagtacagaaaatttagaaatcagcctttaccagttacatctgagacaaggtaaactttccaacacattggaatcatcagaagggctttaaaaaatacaactgccagccgggcatggtggctcatacctgtaatcctagcactttgggaggccaaggcgggcagattgcctgagctcaggagtttgagaccagcctgggcaacacagtgaaaccctgtctctactaaaaaatacaaaaaattagctgggcgcggcagtgtgtgcctgtagttccagctactcgggaggctgaggcaggagaattgctttaaccccggaggcaaaggtttcaattaacccaaattgggcccctgcactccagcctgggggaaggagtgagattccgtttccaaaaaaaaaa

SEQ ID NO: 65058 - DNA, 983 bp, Homo sapiens
cgtcagtggcgtgatctcggttcactgcaagctccgcgtccggggttcacgccattctcctgcctcagcctcccgggtggctgggactacaggcacccaccaccacgcccggctagtttttggtgtttttagtagagacggggtttcactgtgttagccaggatggtctcgatctcctgacctcatgatccgcccaccttggcctcccaaagtgctgggattacaggcatgagccaccgtgcccagccgcgtgtggttttcaattgttaccagcaatcatgacctttcatggactccacagcattagaagaacaacgtttatggccttcaagaactttcagggtgaagctatttctctaggatcagcttttcatgtggcagtagccttgggcctgtcacagccctgtatcttatcttctcaccaaccctggtttagttttcaacagacagaaatttgagccagaagaaatggatgtcactacacagttcacccctgacatctgtgatagtgtatgttatcactgacatgttctcattcaaactatgttataagagcaaggagaaagaagtaagaaaaatttgctatcatgtagaaaattctggggaacctcaaataactcactttatatttagcaggagtttatgcttcagagatcatctgtccctgcaatagacattttatcatggtaagggtgtggtcagcaatagaaaactatgatctcagcagaagtccctctaccaccccatagcttagtaattttcttaccaacagctagctgaggtagtgtgcatcccagacgctccgcaattggggaaaggtcttttagcttgttttgctgttttctcccttcttcacttacaattctttctttcaaccactggtagcactggggaaaagcataacattgaaatgttaatgtctggtaaagatctgatgtcaaagaatggtaattcaataaaatatgtgaacctcaaaaaaaaaa

SEQ ID NO: 65059 - DNA, 3603 bp, Homo sapiens
ttatgagaatggtgaagaaattgtccattgcgaattagctgcctataggcgaaactctgggctgctggaatgtgatttgttcagataaaactggaacactgacgaagaatgaaatgactgttactcacatatttacttcagatggtctgcatgctgaggttactggagttggctataatcaatttggggaagtgattgttgatggtgatgttgttcatggattctataacccagctgttagcagaattgttgaggcgggctgtgtgtgcaatgatgctgtaattagaaacaatactctaatggggaagccaacagaaggggccttaattgctcttgcaatgaagatgggtcttgatggacttcaacaagactacatcagaaaagctgaatacccttttagctctgagcaaaagtggatggctgttaagtgtgtacaccgaacacagcaggacagaccagagatttgttttatgaaaggtgcttacgaacaagtaattaagtactgtactacataccagagcaaagggcagaccttgacacttactcagcagcagagagatgtgtaccaacaagagaaggcacgcatgggctcagcgggactcagagttcttgctttggcttctggtcctgaactgggacagctgacatttcttggcttggtgggaatcattgatccacctagaactggtgtgaaagaagctgttacaacactcattgcctcaggagtatcaataaaaatgattactggagattcacaggagactgcagttgcaatcgccagtcgtctgggattgtattccaaaacttcccagtcagtctcaggagaagaaatagatgcaatggatgttcagcagctttcacaaatagtaccaaaggttgcagtattttacagagctagcccaaggcacaagatgaaaattattaagtcgctacagaagaacggttcagttgtagccatgacaggagatggagtaaatgatgcagttgctctgaaggctgcagacattggagttgcgatgggccagactggtacagatgtttgcaaagaggcagcagacatgatcctagtggatgatgattttcaaaccataatgtctgcaatcgaagagggtaaagggatttataataacattaaaaatttcgttagattccagctgagcacgagtatagcagcattaactttaatctcattggctacattaatgaactttcctaatcctctcaatgccatgcagattttgtggatcaatattattatggatggacccccagctcagagccttggagtagaaccagtggataaagatgtcattcgtaaacctcctcgcaactggaaagacagcattttgactaaaaacttgatacttaaaatacttgtttcatcaataatcattgtttgtgggactttgtttgtcttctggcgtgagctacgagacaatgtgattacacctcgagacacaacaatgaccttcacatgctttgtgttttttgacatgttcaatgcactaagttccagatcccagaccaagtctgtgtttgagattggactctgcagtaatagaatgttttgctatgcagttcttggatccatcatgggacaattactagttatttactttcctccgcttcagaaggtttttcagactgagagcctaagcatactggatctgttgtttcttttgggtctcacctcatcagtgtgcatagtggcagaaattataaagaaggttgaaaggagcagggaaaagatccagaagcatgttagttcgacatcatcatcttttcttgaagtatgatgcatattgcattattttatttgcaaactaggaattgcagtctgaggatcatttagaagggcaagttcaagaggatatgaagatttgagaactttttaactattcattgactaaaaatgaacattaatgttaaagacttaagactttaacctgctggcagtcccaaatgaaattatgcaactttgatatcatattccttgatttaaattggcttttgtgattgagtgaaactttataaagcatatggtcagttatttaattaaaaaggcaaaacctgaaccaccttctgcacttaaagaagtctaacagtacaaatacactatctatcttagatagatatatttttttttatttttaaatattgtactatttatggtggtggggctttcttactaatacacaaataaatttaatcatttcaaaggcattctatttggtttagaagttgattcccaggagtgccatatttcagctactgtatttcctttttcttgtaatgtaagcagctcagataccatgtgctatcatttttgtatcaagttttttgcacaggatgtgaccactgtcagatcactgttcttttctttctttttgtgattgaaaagcctatactacaatttgaagtaaatttttgtttttcttagtaagtgtaaatggttgctttatttttattttaaaaaggtatgtctttggtttggcagaattcatgcagggctatcaagtggtgttctagggtaacagtgtccataattaacgcttagtcatagagtcaaaaacatttaagactgattgggttgaagtttataataaattatattaacatgtcttcctttttgaggtaaagatatatactttgtcaaatatcattttgtcatcctctaaatataaatccaaatacctcagctaagtaattctattttattatttttactgttatgtatgtttttaatcatatttcttaggaagtataggctactggacttagaataaaaagtccccaaacccaaacaaatggtttatgaaccagagtatatgtggaagattctttgctggtcttgctctgtgtgcatctgaagcttctttggcctagattttagcacaaacctgagtatatctcttctactttcatcatgtgttctgtaccttctttttgtttcattgggcatgctagggaaataggtggattttgtgtgtaatgccatcagtttttatgaaagcttgatgaggtataggtcatttgttttgagtatgtgggccagaaatttaaaattagaaatttgtttttctgttgagtatataaacaaaaattggtcccaattctaacaggtttaatccttcttgaagccaataagttttatcttttataatctgtcaggatgaaccactccttagcttttatccaatattaaactgcaagtgttagcactgaaatattgtcattgatagggaaaatatctattctttgagtcattgttactgaggcagttgagtgtaaggagctggctgcagtttattctacttaaccctttaaggctgaattgtcaaatgtacattgttccatgtcgttagatggaacatggaagccattgtctaatcaactctatcattagtgacttgatgtctcataccttaattttgtaatgatttttattctctgttacaaagacttgaaatacgtattaaatgcacgttaatgttttgctttgcattttaggttcaccttatgacttgattgaaataaatgtgcctatacattcatttgctttgtactataaaaataaaaatgatttcttaagttaaaaaaaaa

SEQ ID NO: 65060 - DNA, 2901 bp, Homo sapiens
acaggcatacagcagaatccagacagagtatatagtagcgaaaaagatgggagaatatgaagaacaaagtctattttaacattaattatggctataataacccttatgaggaaatactggtgagcaggataaagtgatattgaaaagaaaaaaaggaaaactcctcaaaacacaataaagcatattctaacaggtttttgaaaaagttgcaagccttttaattcattgacctcttttgactgattggaatttttaccattctgtacactctgaattataactaaacaactacatgttactgacaaatttgtgattctttgagtctaaacaacacagaaactagaagatccctttcctagatttatatacttgattttcttataaaaataacttcagttattatgtcaatatttatctgaaaaaggcagccctctgacagtaaactagtaactggaataactacagtatcattataagctacagtaaaacaacctgtaaagtaatttttcctatttgaataataaatagactggacaggagtgaaaaaccaaaactacgaaagaaaaacccaatgtaaataaaggatacaggtcaaaacaaagttcagaaggcaaatatgtaaatattagatgcctcaaaaatcaactatcagtgggaaaatttctatgaaagcaatttcagaaaatacatgaacacatatatctttaaaatatagaactctaaatacttgataacatatttaggatactctacaatgcccagttaattgctataatttttttccctcaggttttcctggatgatacggcaaactacagaatttgtgcacttactgttgctcaaatttgtgtacttactgtgtgcacatatactgctgcactgtttctcggctgtgaaaaattaaaagcattttttcaacctttgagaaggaaagaaaacaatgaagaatctcctcataataatacagcataacagggtttgtttactgtgccacatcatgggtgtttttaaaacgaaatataaatatatggttagggatagcatttttaggagaacaagtgaccaaaaactaagttacctcttttcaggtcagccaaaaaacgtgaagggaaagtggactttatacaacttagacatttatgtagatagcacagcagactcatgttcaagccagccacctgaaacattataagtccgtcgagggggacagcaatctatggtccatggactgaatccagcctacttttgtatggctctgagctaagaatcgttttaatattttttaaaggttgttaaaagcaaataacaaagaatacatgatgactctattcttgttctcatgtgtgaaccatatattatagcctgcaaagtctaaaatatttataaaccggccctttacagaaaaagtttgcagacccttcttttacaccagtgctgtagataattctggcagtacaactgcaagtctaagataatgttcattcattcccatcataaatgtaacattctaaataggtgtcttctgatgtcatctgtcagaatttcttttaaactttttcttcatcttcaacattatcaaagttcatccttattcctcttgccttgatttcggagagtttccaatttttcacttattaaggcagcgattgcttttgcatctctggtatttatctgctcttcttgaaaatttctctttgctctttcgtagaaataaaacttaacagttggataggccctgatcccagctttctggcatgtctgagcataagcctgacagtctacttttccagctttcacttttcctttaatcatcctagccaagagctcaaattctggagcaaaattctggcaaggtccacaccaaggagcatagaaatcaatcacccaatgatttttcccttgtagaactttttcactgaaagtctgaggtgttagatctgtggatacttgaggtaaaaatcctagaccccagattctcagggaataagcatccctattccaaccattgtaactgtgatactgataagctttatttgattttgggggaaaaaatcttatctcagggtatctttgaacgttttcctgggcacaaaaagaatgatactgttggcaatctatactgcccacgttgatcagtccagttaatgtccgggccattcttttccattctggcattaagacttggcaaggatgacaccacggagaatagaaatcaaccatccagacttcgttgtgttttctttgtgtaactagttcgttgaaggtggtgggtgtaagggagaccactgaaggattcataagatcctctatgaactccaagatttgttcagcagagtgatgtccttcatactcatgaatgttggactggttgaataccactgttgttggataagcctgaatgttatacatgttacagagtccctcatgaactgtacaatctagtgtaccaaacttaagctgaccataaagaagatttgatgctcttcgtaactctggtagtaaagctcgacatggtggacaccagggggcaaagaaatcaacaagccatggttctttgtcattggcaggaaaattttgaggtccaagcgtggtaacatgagaattcacactttctttggcaaaggcaagtatatcatatagaatcttctttccatgatgaatttcatattctttggttccttgtcctttaaatactgctagagacggctgaaaaacatacagattactacagatgtctggtgcagaggaacagtcaaacctgccaacctaaaggagaaaaaggtcaaatttgataaaaacactgtcttacccatttgatttgtaaatattcatgataatccaaaaatggcactgccctaatgacacagtttttaaacagaagctaataggctacgaaaataa

SEQ ID NO: 65061 - DNA, 930 bp, Homo sapiens
ggacgtgctgccgagtagtcccggtatagcgaagcagcgatggcggagagtccgactgaggaggcggcaacggcgggcgccggggcggcgggccccggggcgagcagcgttgctggtgttgttggcgttagcggcagcggcggcgggttcgggccgcctttcctgccggatgtgtgggcggcggcggcggcagcgggcggggccgggggcccggggagcggcctggctacgctgcccgggctcccgccctcagccgctgtccacggggccgcgctgcttatccactgagaccccacgctcagctccgactgggacggcgagcgcaccgcgccgcagtgtctactccggatcaagcgggatatcatgtccatttataaggagcctcctccaggaatgttcgttgtacctgatactgttgacatgactaagattcatgcattgatcacaggcccatttgacactccttatgaagggggtttcttcctgttcgtgtttcggcgtccgcccgactatcccatccacccacctcgggtcaaactgatgacaacgggcaataacacagtgagggttaacccccacttctaccgcaatgggaaagtctgcttgagtattctagggtaagaggagacttttaagtagccaagtcggttgttagcagataattactctaggtcagcctttatcaaccggagtccctcatctgaactacagaacacagaaaatgattgagtgactcttctcaaatctcctcaggatggtatgtgactagtatcattctagatgcagaggggagaagttaatttattacagtggtaacctttgagaagtggttctcttaagagtgtggccctgagcatctgggaacttgtagccgagcagtttctggggccctatcttagacctacaaaagaaactcatggggttggggcc

SEQ ID NO: 65062 - DNA, 2722 bp, Homo sapiens
  misc_feature (1)...(2722): n = a,t,c or g
ttttttttttttaatatcttagaattttcctttactccaaaaaaccccatatatacatgtttctcctttataagcttagagattgctttggtggtcaagtgcagggcggctgggggaggtaagaccttcaggaaggccatatcccggacaagacccagaagggaagcccccagagccaagggtaggagggccccacccgggtctcagccactcacttctccagggcggatccgagacactcacaggcctcagggaggggccaggtgctgctcctggtcattgcttcccccacaaggtttgcatgaggagcagagacagtccagtctcctgaacacccacagggcacagagcccagtgcagggggcagacaccaccgcagctcctgggaccaagaggaagctcccagaggggggcccaggaacgctggggtgggtggacagggctgggtaggggttccttctgggccaaacccccagagcagcagagcaccccagtccaaggaagctcttctcagggacccaaggctccagagccaggaaaaagggaggggcggggcgggagcctgcatccccagtgcccatcagctctgggggaaacctccgtctcccgtccctatggtgaccacagcagcagagggggatcctccatgccccaggcaggctggcatcagggccacacaggggccaggagcaggggtctcggagtccacagctcccggccccagtggtgggctcagggctcctgggcgccatgggtctcaccacagcctcgccagggaacaggaccatagggagtccttctccccatctctagccacccacaggcccagcagagcacacagccccaccctcgcacaggcacctgtggtctccaagtaaccaagcccaggccccaggggccactgcagacagcagctgggatctgcagagggatctcagcagcgagcaggcagctggcgaggagaggtgcgtgtgagggaggggtggccctctcctcagtaggaggaagtaagagggtatctaggccaatttattcagctggaaatcaatctgtccagggctggaccaggcgcctccccctcgatacagctcctggctgaagaggtcatcagagcagcagctgtccccaggccagtgtcacgtcactgcgtacagttcctcccgatcgttcttgcagatctgatagtggcaggggaatttctgcgagcaggcccagggctcggcgggctggtcaggtggcggcagcagcaaggctgcgctcccggccagcaggatgtgccagatgctgtgggtgtagtagtagttgtcgctagtcatcatggaggtgtagatggcgatgcccacagaggccatagagacgccgggcaggaggtagaaggcccagcgctgccacgaggtggggtagcactggcgccggtgcccgcagcggtaagcccacatggaggccatgatcacgaaggcaaagaggcagggccccagcatgttccacatgcccctgcggtccagctgcaaggacatggcgatgaccagtgtacccagaagaaacagcacgtatttcaggactgtcttgagccgtgccatgcacaggatggtgacccagatggccgccccggagcccaagaagtcgcagtactgcagcgtgtcgtagctgaggatgcacagcaccgcctccccgggctggtcgcaggcgtggtagaacgtggagaagaacatggtgtaggcgtagacggaggcctccaccaggaagaatcgccgcactgagacggcgatgggggccaggaacatgaggttgctgagcgtgagcagcagtgtggccgccctctgctgggccaccgtctgggctgtgctgttgtccgtgcagctccacccacgccagcctgccttgcagctgcagctggcatacaggtagctgtgtctgcggagcaggaggcactggccatagggtccacaatcgttcaaacagggcaccaggtacaaggtggtctccacgtggaccacagcctgctcacagtcctcagcattctcagggcacatgagctgcagggagaggtaccagttgtctgtctctgggtaggggatgatgaggttggccctgcgagaccaggcgctcagagacaaagggtagccctggaagaaggctgtggtgcagttgagcgaagtattgaagccaaggaagggcgaggcagcattcacgcaggccactacgacggtctcgttccgcatctctgtcttgttggcccgcagggagatggtgagggaacccccgctgtccatgccggtgttcaggcgcagccgcatcacggagggcgtgtccgaacacaccctcaccgagaccctgtccaggggctggaagtgcaccgacaccacgtccatgtcctcccgcgtgactgggtagtttgtgaggcagaaggggctgcggtccaccctgccactcctgcccaggtcctggtggtcggggctcggggacagcagaccagaggaggcattgaagctctggttttggctgctctgcagaaggggctggatggtcacgctccgtggcctgcaagctgtgagggcagctacagcactgaaagccactgtcccgaggggccccaccaggctctcagctgtcacttgcagccacccggacgcgtgggcgcacgcgtgggtcttcccnnattncgnngntttcgaaaggcntcagtntnngnnnntcgagtggattcaggtaaaacccccga

SEQ ID NO: 65063 - DNA, 1037 bp, Homo sapiens
caaaaaaaaatattaacttgccagcccccggcccttaaatttgatccccttaaacggcccccccctttttttttttttggccgtttccacacctgccctttattggtctcttctagcagagtggctccaggcccttcacgcctctcagacaccacccatgagggtttaggaaggtgccatcattctgtgaaggcccagagcttacccaagtcttggagcccaagttgaatcaccaaccagagggttgggagaggaaaaggaaacaggcagaggggaaaggcaaggctctgcagtgaaggggactgatatcaagggaatgctgaggtccagcagtgtctcctgaaggcatgctgcatcctaaggctcctcaggactggatggagtaggagatctgtgtgttgagcagttcacatctatatggcaactttaaggaggcgcttgatgtcaggctcaatgttgatggttgggaaggtgcggctgtagcgtcggaagggctctccctccggccctatgaggaacttctcaaagttccaggccacatctgagcggcgcacagggctccaaatgatgagcttgggatcggtcatgagggaaaatgggtcatcataagggtaggggagcttgtccttcaggtaggcgaagacaggatgctcgttctgcccattcacctcacatttttggacaagggtgaaggtgggctggtatccacccccaggacggacatacttgagactgttcaggatctcctcattctgacagttctcctgatgtccaaattggttgcaagggaagccaaggaccaccaggcgcctgggaaagcggcattgcagctcgttgagctgggtgaagtcccgggtggttgtgcctcagagcgaagccacattctcaatcagcacggccctgccccggaacgtattgaaatctaccttctccccatccaggctgatggcactgaggtcatagaaggacttggcaatgaaagccatggtgaagcgcagagtgagccccgcagagaggcctgagcccacttatgagcg

SEQ ID NO: 65064 - DNA, 406 bp, Homo sapiens
  misc_feature (1)...(406): n = a,t,c or g
gctgcgagaagacgacagaaggggattatggtgtggaggaagaggaggaggaagaataaggtgatggtgaggaataggatggagatgaagatgaggaagctgagtcagctacgggcaagcgggcacctgaagatgatgaggatgacgatgtcgataccaagaagcacaagaccgacgaggatgactagacagcaaaaaaggaaaagttaaactnnnnnnnnnngggcggccgggacctattcaccttccacttccggggtaaaaatctaaactgggtcaccttcaagaaaagaggcccgcccgcccaccggggccagagccacccgaaaaagacccgcgcttttcaccccccaccctaaaccatgagaatttgcaacaggggaggaaagaagagcccaaacttccg

SEQ ID NO: 65065 - DNA, 1885 bp, Homo sapiens
cgccccggagcaggcagagtgcgtggagctgctgctggccctgggcgagcctgcggaggagctgtgcgaggagttcctggcgcacgcccgcggccggctggagaaggagctgagaaacctggaggccgagctggggccctcacctccggctcccgacgtgttagagttcaccgaccatggaggcagtggcttcgtgggcggcctctgccaggtggcggcggcctaccaggagctgtttgcggcccagggcccagcaggtgccgagaagctggcggccttcgcccggcagctgggcagccgctattttgcgctggtggagcggcggctggcgcaggagcagggtggtggtgacaactcactgctggtgcgggcgctggaccgcttccaccggcgcttgcgggctcccggggccctgctggccgctgccgggctcgcagacgctgccacggagatcgtggaacgagtggcccgcgagcgcctgggccaccacctgcagggtctccgggcggccttcctgggctgcctgacagacgtccgccaggcgctggcagcacctcgcgtggctgggaaggagggccctggcctggccgagttgctggccaatgtggccagctccatcctgagccacattaaggcctctctggcagcagtgcaccttttcaccgccaaagaggtgtccttctccaacaagccctacttccggggtgagttctgcagtcagggtgtccgtgagggcctcatcgtgggcttcgtccactctatgtgccagacggctcagagcttctgcgacagccctggggagaaggggggtgccacaccacctgccctgctcctgctgctctcccgcctctgcctggactacgagacggccaccatctcctacatcctcactctcactgatgaacagtttctggtgcaggatcagttcccagtgacgcccgtgagcacgctgtgtgcagaggccagggaaacggcgcggcggctgctgacccactacgtgaaggtgcagggcctggtcatatcacagatgctgcgcaagagcgtggagactcgcgactggctcagcactctggagccccggaatgtgcgggccgtcatgaagcgggtggtggaggataccaccgccatcgacgtgcaggtggggctcctgtacgaagagggtgttcgcaaggcccagagcagcgactccagcaagaggactttctccgtgtacagcagctctcggcagcagggccgctacgcccccagctatacccccagtgccccgatggacaccaacctcttgagcaatatccagaagctattctctgaacgtattgatgtgttcagccctgtggagttcaacaaggtgtcggtgctgaccggcatcatcaagatcagcctgaagacgctgctggagtgtgtgcggctgcgcacctttgggcgcttcgggctgcagcaggtgcaagtggactgccactttctgcagctctacctgtggcgttttgtggccgacgaagaactcgtgcacttgctgctggacgaagtggtggcctctgctgccctgcgctgcccagaccctgtgcccatggagcccagtgtggttgaggtcatctgcgagcgcggctaggcgcagccgctgccatgcaccggtctgtccctgcaccccatggcacccaggatctggtctcggtggtccttccccgcaggcaggtgtcaggaccggcctaataaacatgtgtggcctcctcctctcgcttgctgggcgggcctttccgggagcggggttttgaagctgaggcttctgaggcgcccgcgtcgggtccgcccccgagcgccgattggctggtgtgctgggcccagcatgggcagggggcggttccacttaaaaaccctgggacgaaaa

SEQ ID NO: 65066 - DNA, 567 bp, Homo sapiens
gaccgcactggaaattccgggccgacgtctgcgagaagacgacagaagggcatgcccagcagcctggcccaccgcatcgctgcccagaccctgctggggacggccaagatgctgctgcacgagggccaacacccagcccagctgcgctcagacgtgtgcaccccgggtggcaccaccatctatggactccacgccctggagcagggcgggctgcgagcagccaccatgagcgccgtggaggctgccacctgccgggccaaggagctcagcagaaagtaggctgggctctggccatcctttcctgcctctgtgcccctgcctctccctgtgtcccttcccctgaggactgcggctccctccctcctgcatgagggtctcctactgctccttctccccttgcacagggaaatgcagggggcaggacttgggaggttccagcaggcgggggagccccgaccagtggggacactcctccctccccagtgagcagaagggcaccgtggtggtggctctgccccttgctgcagtgagcccaccttgctgcaacattggttctgaggggcccaa

SEQ ID NO: 65067 - DNA, 1653 bp, Homo sapiens
gcggccgccgcctccgctctgagccccgccccgctcggccgccgattgctcgggcctggccgccagcgccaggggccgatggccgagcgcgtcgcactcgcgtccctgcgccgtgcctgcctcgcgctccctgttacggcgttcgtccccgggcctggcgcccgcgtccggcccggctccgcggcggcctggtccgatggctcctcagcggagggccgcaaccaaggcgcccgagggcaacggagcggccgagcgccggaaccggagcagcaccaagaaggaccgagccccgcgggaggtgcagaggctgtggcagaggccgtggctaaggaccgcgggcctgggggctggctttgtgctcaccgcactcctgctctggagcagcttgggggccgacgacggggtcgcagaggtcctggcccgccgtggcgaggtcgtggcagggagattcatcgaggtgccctgctctgaggactacgacagtcaccgcaggttcgaaggctgcactccccgaaagtgcggcagaggtgtcaccgatgtcgtcatcaccagggaggaagcggagcggattcgcagcgtagctgaaaaggggctctccctgggaggatctgacggaggggcatccattctggacttgcactcaggggccctgtctgtcgggaagcactttgtgaacctgtacagatacttcggggataaaatacagaacatcttctcagaggaggacttccggttataccgggaggtgcggcagaaggtccagctcaccattgctgaggcttttggcatcagcgcatcctcgctgcatctgaccaagcccaccttcttctcccgcataaacagcacggaagcgcggacggcgcacgacgagtactggcatgcgcacgtggacaaggtgacctacggctccttcgactacacctcgctgctgtacctctccaactacctggaggacttcggcggagggcggttcatgttcatggaggagggtgccaacaagacggtggagccgagagctggatgtttttgtttccggatgatgtcttgtgggttccaagaagttaatggaccgagagccagtgaagctgctggtgcgaaggctggagtcaggtgtcctccggggactcaccacccgtccgagaggggagagacacatgcgattctggaagctgagagcattgcttattgttgattccttggttgccgtgctgagtcctgctttaaggaagcaggtcgcgtctccttcttcacctcggggtccgagaacctacaccgcgtggagaaggtccactggggcacccgttacgccattaccatcgccttcagctgcaaccccgaccatggcatcgaggacccagcgttcccgtagccagcagccgggccaaggtaacttcaggagggcccgtgtggaggcagccgcgccagtcgtgcacccacccccacgtccacccgctcctgttgcacagagtgccttaggaattctctgattttgatttgctgacgtgttaatcttttcatctgtgagtaaatgaagggaaccagcttttcacttctccagcatcatgtgtgcttgggctgtaggcctgggagcctgaggtggaggccaggaaagggacccagcaggacggggcacaagtccccatctgtgaatgg

SEQ ID NO: 65068 - DNA, 970 bp, Homo sapiens
tttttttgatttataaacatttttaatgactgtgttaaaaaaccatcatacaaaaagaaaagaaagttgttttcaacttaaaaaaaatccttatataatgtaccactcatctgggatatgcttctgggagggggacactccctgcttgggctgcagcagaaggcagtggggagaaagtcttaaagttctgggagtcaggctagcccctcctgcaggtgtcctcattgccacttcttggtccctggggtcaagggttaaaggtgccaaaagacccactgatcgaacctgagactgttgagatgtcctgttcccaacagagagtatctgaactccagaaacttccctctcaggcctccactcccccctcctttgtactgtgcatcctactctgacttccgtggctggggcagatcaaatgtacattctcagtgtcccctggtaacaacctctcccttgcctctgatttgcgaggcacagacaaagctgacaaggccttcttccaggaggctgctctgctttctcctctcctaccccagcttttggctcctggcttctctggaaagccacaggactccaccagcttctctctgccaacagttcagtcttcagggctggagctgcagggtctgcggaattcctgtccatactcatgtatccacttgttggccacccacttatctcccaccaggacaggacagccagcatgaagtgtgtcactgtccccttcaccactcctgtgcaggttccaccaaaacagtgctgcattcctaaccacaggcacgctgaggttggcatagatgaaggctgtggctcctccagcttccaccgagctcagatagatcataaatgttgcaactcggtttcctgacttcattctgtagagggggctgcttggtgacgtagcatggtcaaagtgaggctcatagtgtcctccgatgccatacccttctgtcgtcttctcgcagccgta

SEQ ID NO: 65069 - DNA, 1850 bp, Homo sapiens
accacttgcttttgccaatacaacaaaatatctgtaaattatgtagtgctcaataaagtgaatgtaagtttataattgaaacttcattcacacaaaaaaatggtcttttactagcaaaactgaatattacagcttttcaactatattctaaataaaaataattaaaaatcaattcaaaaaattcagaataagtgctttatttttttaaatctcacaaaaactgaaactaccatttacatcagttgtaatagcaataaaaattagaaatcaatttgctataactcttgaaaacatttataaaaacaaaattaaccaaaaaataaacaaaaaggtaaaactaagtattcattttaaattaaagataatctgactccttatgacatacccacttgcagatgtataaatagcagatgcattcaaaacagtgcaagatttaattaatttaggacaatattccaatcaatcccaatgcaggttttaaattactcgtgcacgtttatatagaatcataaaaataaacctctaatatgtaatcagcttatagccaattcagaaaactccacaccaatacaacaactgtggaaatcatgagatatgactggggggagaaaagcaaaacctagcatcaaaagtgcatatactcattgtaactacaatcttactatatattcctacttttgttttaaaaaaagttttctttaaactatatgtctcaaagggatactaaaggtataatttcatattcttttttgaatttaaaaaacatatacgtaatcctcctttgttttggtaagttcaaatatgaattgacagtggggtaattggattgtggattctttaagaaagctctaagaagagaatacaacatactatatcttctttaagaagtatgagctgaaatgttaggcattccttgtattgttttttaaatatatttaaggaatgctgtttttgtaaaaccatggctttgaaaaagaaatctgagatcaaaatacattactagaagatctctataaaaggtcaccaagactatccttgtttgtgaaatcagggaaaacatttttagaatttatcttgttagaaaaaatgctaccacttttcattctttttcttctttcttattatcacaattaaacaccaaaagattttccccaaataaatactgatgtaaatgttgacttcaaggacaaagaactttcataagagtctatttctcaggcatttcaccatttcttgagaccacaggacacaggcagcactgtttaatgtgaattgtcactggactccggtgaaatattccttctgggagagtttattggtacctgaagctcactggtagatgtaggtttagcagcatttggtggctttgtagaggaattaggtggaagtctatgacgattactctcctcaccagaagtagaggaatgtctttttcttccaaattcatcactaatagggggatcaacacggaagtcttctaacctcttaaaactacagaggtattcctgaagttttgggtcaatagactgtgtcttagattgagaatatttcaaataagcccaaaacttttctagtccatacagctgaccagattcgtagtcttttttggtttcttcttggaaatcctgaaaaatttctcgcctgaattttttttccagtccataactataaaacctgaacagacattctaacccatacctgtaattttcttttgcatcttcccaagcaagttgtctaaattcctcatacatttttttattgaagtgatctctgaggaaaaaggaccagaaacgaaagagggtattcatttcttgggactgaccaattcccaagcgttttccctcgtgccg

SEQ ID NO: 65070 - DNA, 1790 bp, Homo sapiens
  misc_feature (1)...(1790): n = a,t,c or g
ttttggtatctgcacacaaatgtggtgcatgacagtaactgatgatgtagacacatgggccctttgggagctgatatttttttcaaccctgctctgcctgttggctagtagacacacgagtcaaatctttctacctaagggcatagttgggttcttggaataagtgacacataggagaagtcggatctgagctcttttgtcacacaagtgctaacgaacagaaaatgagccacgacagttaaacactgaatggatcgcaatgtgcttttcccttggtttcccataaaaacgaaaatgaaacaccttgtgcaaaaaaataggatacgcttttactggttggtttaatgagagagaaccacttttggccattatcaccttacgttactacaaatcctgaaaggaaagcagctttgagtcttgggctcggctgaaccccctgcatggaccggggctaacagtaccctctatgactcccacaggtctctctttgtgtccagatggatggcgactgtgagtcagcaacgccagccaagacttcctcgcctttaccgtggcattggggcagtttttcaggctctctacggagagagaagtgggccagtaagggagagggctagagagaggacaccagtttacatagggttgactttcacttgtgtgtagtagcagttcagaatttaaaagaaatttccttgcagaaagaatgtcttcctcttggcccctcttaattttttatgtttttatttatttttaatctttggcagcatagaactgattgtggtcctccgatgcatttctggtgtcgagaacttcctttctcaacctccccttcccccatagccatccccacaagctgtcccatcaaggaatatttcaggtgtaaactgaatatgccacgaggcctcctcttcatgaagtgcttggttggcctacgtatgggtggcaggctggacacagctgaatcgtctttctgggtcaccctgtaacccaagtcccctttcccgttctctcccaacgctacttatccgcaggaattggatgccggctggcccccctgatggttcctggcctaggggctgtcatggcagagggaagccaccaaggtgccattgaggattggtgtctggctctctatgggcaagagcgccaggggacacacagtgggaccggaaccttccagaatgtctcctcagtcaggttttcaagggggagggaatgcggagacaggagaaaaaaagtgctgagggccaaagctggtgcagggtgacggtgcgtctgggtaaggcaaatgagaggcagtgaggtgatctcagaatggcgttgaggcggtcagattaggccgggctggctcacacgagggtcccgggcttggctttttcctgcccgtaccactggacatcagctagttctggatagagggaggaatccaggaaacagctatcattgtagctcccagtctgccaggttaggatgtggtgggggctgcttgggggggtggctccaatttcacttgacggtgtcgagcttctctggctttgaggtaaggcagctgacgtggccttgcacatctggggcatcctggtgaccctgctgtgcgccacgaaggtgctctgggaggaggtgctgtactgcgagccgctgtccgaggaggtggagctggtgtgcgacaggcggctgtgctccttgtgcgaggcggtggaacgctggtaccactggcgcagctcgtctgagacggcggctcgtgccgaattcctgcagcgctggtcaatgcnngtcaatncncggtccct

SEQ ID NO: 65071 - DNA, 641 bp, Homo sapiens
ttttttttttttgtgtcccagccccactttattttcgaatttaaaactcagggtcaattcctggggttcccaggcaaccctccctcgagcccactcactaggggccagccctagatcttgaaggccaaggtgagtccatcgcccaggggcaggaggctgatgtagaccctgacgtcccgccggatgcgttcgtttaggtttcgcacacactcggccgccacgtcccctttcggaggttgcagcaccttcccgcgccacaggactctgaggacggcgaggatgcctccgggtcgcagcagctgcaggcagcgctcgtagtaggcggagcagttctccttgtccgcatccaccacggccacgtcgaaggtgccggcctcgcccgccgccagcagctcgtccagggtctccaaggcggctttcagccggagggtcgattcttgtgctccgcctcggcctgcggagggagcgggtcagccgttgcgcccccgcctggggctgcagagctaggcgcgggcgctcacctgcctccacaggggccgtcccagctccgggggctgcgcgtccacctcgcaggtcaccacgcgcccgtccgcgggcagcgccagggcccaggccaaggcagaatagcccgtgaagtgccc

SEQ ID NO: 65072 - DNA, 896 bp, Homo sapiens
actcagccaaaaaaaaataatgaaatcttatcttttgcaacaacatggatggacctgggaggccccattaagtgaagttaatgatacagaaagtccaaaaacccacatgttcctccataagtgggagataaaccaatgtgtaccacctggacgtggagagccagaatccatagaccactagagccttcaaaggtggggagtggggtgagagatggggaaagtatttactagggtacaatgtatactatttgggtgagggtatactaagcccagatttcaccactatgcaatatatccctgtaataaaagtgacataaatccataaaaattacaaaaagttgctcaaaaaagattggtagtcagaagctgaattctagatgtgctttttcaactatctcattttgtaaatgtagtgtatgaatctcaaaatttaacaatagacaatttttaaaataccaaactgccaaaattaaaagaaaccgtctttttaaatatccaagttttttggccaacttggctctactacttgattttcaaagggattagtggttactcatccacagtttaattgttttgtcattttctaatgctgctgatgcgatgaggttttctgtaggatgacaagctgctgagatcacaacatctgtatggccttgtaatttctgcacaatctctttagtctgaaggttccaaatgtaaaccaggttatcctcggaaccagacacaatccactttccaccagtaactgaaaaattggcaaatatgcaatatttctcattcttatgaccagtgtatgttttcaggcacctgcctctgctataatcccatagtttaagagtgttgtccaaagttgcagtgagaatggaatgccctcaaatggatatggtctcatgggg

SEQ ID NO: 65073 - DNA, 1121 bp, Homo sapiens
tcgggtgcagaccaccagatcacacagtgggaccttggcaagtggagcgggaccctgaggcgggcgacgtggaggccgaccccggactggccgacctcccgcagcagctgctgttcgtgcaccagggcgagaccgagctgaaggagctgcactggcacccgcagtgcccagggctcctggtcagcacggcgctgtcaggcttcaccatcttccgcaccatcagcgtctgaggcgtcccactggctctgatcttgcttcctgcttggaaactgaagtcgaattgggctcccctggaaggggttcattcaggtctgttgactgagactggccggcctgtgggctgccgtgatggattctgtttgacgtattgttctctagaaggcctggctctgatccagtgacccctctcaccaaagaactcggtttaaccagggctctgtaagaccactcccacccagagacttgtgtggcctggtgtggcctgtgtgtcggattccttcctgtcagctgtgacccatttgacctgtgtccccagaacccagttttttgtttgtttgtttgagacggagtcttggtctgtcgcccaggctggagtgcagtagcacgatcttggctcactgcaacctccgcctcctgggttaaagtgattctctcagctcagtctcccaggtagctgggattacaggcatgtgccaccacaccccgttaatttttgtatttttagtagagacggggtttcaccatgttggccaggctggtctcaaattcttgatctcaagtgatctgtccgccccggcctcccagagtgctgggttgggattacaggcgtgagccaccgcgtccggctcaggacccagttttggctgctggttcccagcaggggactcgggggatatacagtggctgcaccaaattggaggtgtgggttcctccaacacaatttgcttctgcccgttgtcttcctgccagctgggtttggccaggatttctccgtgtgggggctacatgcgaccctctcccctcctccctgactttagaggctggtgctgtgtcgggaggaaggtcagggctcctgagcagcaataaaggaccaggaagaggcctgaggtgtaaaaaaaaaa

SEQ ID NO: 65074 - DNA, 1245 bp, Homo sapiens
caagcagtgtaaattaaaaaactacattgagatacatcatagtgaatatgcaaaacatcaataataaaaagaaaaaccttaaaggcagctttaacagtatactgaatgaccaatatactcagcagccacagaacctctattcttttaaagcatccatgggacatttatagaaattgactatgcactggactataagcatatgcaataaaatttcaaatgactgaaaccatatgagtatattcttttgccacaacacaattaggctagaaatgaacaacaaaaagataacaggaaaatctctatatatcagaaattaagagatgcacttatttattttttgttttttgggagggagtctcactctatcacccgtgcagtggcacgatcttggctcactgcaacctctgcctcttgggttcaagtgattctcctgtatcagcctcccaaggagctaggattacaggcgtgtgccaccatacccagctaatttttgtatttttattagagatgggatttcaccatgttggccatgctggtctcaaactcctgacctcaaatgatctgccagcctcagcctcccaaaatgctgggattacagatgaagagatacacttctaagtaatctatatgtcaagtaagacaaaatgaaattagaaaatatttttaagtcaatgatattaaaccatactacacatcaaaacttgtgggatgcacttaaagcagcatgtagagggagattatattcataaatgcttatggtagaaaagaaggaagtctgtacattatgtagctatgcacccatctaaagaagttaggaaaatgacatcaagtagaacatcaaaagaaagaaggaaaggataacttaaaacagaaatgaatgaaataaaaccagaatagaagagacgatctacaaatccaaaagttggtttgttgaaaatactagtagagctgacatacctgtggtgagactgatggaaataatgcagttacaactaaccaatatcataattggaaaggaaatcactataggtgctgtaaaaattaaaaagataatagaatattatgaacaattttctgccaatattattgaaagtttagataaaatggaaaattcatttaaaaatataatttgacagtattatgttatgtgaatactataatgataatcctgtaatcattaaatgaaccagtagtttaaaatttttccatatagggaaggtcagggccagatgtgttcaatggttg

SEQ ID NO: 65075 - DNA, 1481 bp, Homo sapiens
  misc_feature (1)...(1481): n = a,t,c or g
acgcaccaaatagagttttttttcctcttttaaaaactctatttggtgcgtgcccacggtgctgcgtcccgtcagacatacctgtatagatctctctatttatatatatatatatatatataaaaggttctttagcagttaaatagattccaatatgaacgtctcccaggacaaagctgcgtctcgcctctgggtcacacgcatctgtgcggctggggtgtatgtgccgcgtcacagcaggtaccatataaatacgttgatttgaacgcagtttccctgtgggtggtaaaaacacattcctgacaagtgacaaagcagaagagtccggcagctgcagcgccctcactcggctgggacctcgtacttgaagatgacgctgaagagccggccgcccagccgctcggccagccacgcgttcttgatgacggccagcttgaggctctcgcagcgcagggctgcgtggtagtttgtgtggacagcacggcccatgccctcgatgaccaccagatccgcgccacgctcccgcaccagtgcggccagccccttatccaggcggctgaggtcgaggcacggggagctggagcccgtctgcaccagcagcagcctctcttcccggagcgcagagtgcacgacagggtccatgcccgcaatacgctctgccacgatgagggactcgctgtgggtcacgtcgttcagggcggggcctgagttgcacgccaggatgacctctgtccctctaaggagtagctccctgacaaaggggaagactcccaaaatgatgtctattccactgttatctgcgaaaattaaggcacatttatgagggggcccctttaatctctgaagccactcgctgtaggaatccacgagccagggtctttcttgtaacttcctctttgcttcttcaaacccaaagtaggggtcggattcaaggacagcagacacggctttggccccccagtcgaagacattccccgccaggaggcctttcaccagcgccagctgccgttcctcccagcccagcgcgtccagggagcgcacgaccccggggaagcacctcagcgccacgccattctcccgctgcttcactttggagtagggatccgggaagttgaactcgttcagacagtgctccctggtgtccagcaggctgcgcacggtcagggtcccataggcgaagggctgctgcctcagggtctgaagcttgttccagtacttctgccggaacttctccatcctatcgcctgcattcacacagtgtggttggattgcctctgcgcgttacaaaaccccgttcagggcgtcctcaaaccaggtcaggcagtattttcgggacagagagtcatcggataggtgccccgtgtagggcacgtaggagggtgggtacaggattagcgccaggtctatcagtggcatctccagccggtccgaattccagcacatggactatgttatcaaaannaggttatctaatttttttt

SEQ ID NO: 65076 - DNA, 1665 bp, Homo sapiens
atcgagacccctgtcgagtgtgcgggaattccaggtcatattgttcacagagatgattataaaatgctttttatgacttacaaaagaaagcttagaatattcgttagaaatgccttatcactgaacacttagcgtttttctgtttcttgattctaaaacagtgatgacgctgatcatggcattaatgaagtgctgatctactatattttttagtttaatatgcctgtttattcggttaacagtataaagtaatcattctgatctggcctctttttgttttttttcccattccctccatttttgccgcttccgctttgcaaacatcagatccgagatgagtggggcaatcagatctggatctgccctgggtgtaacaagcctgacgatgggagtcccatgattgggtgtgacgactgcgatgactggtaccactggccctgtgttggaatcatgactgcacccccagaagagatgcagtggttctgccccaagtgtgcgaacaagaagaaggacaaaaagcacaagaagaggaagcatcgagcccactgacgactcccgaggggctggaccaagcggggtcagcccgggcttcttccctggcgcctctggaagggagctggtgcaagtctgccgtcacatccacccccagatgcctgtggataaagaacccaggaggactgaggctggaacacaccgcgcacctggattgttcactcccgagccgccttggcctgtggctccgtggcagtgcgacagaaggaaactcaagcagaggcgtggcctgggggctgcccctcctccacttctctaataccagtgacaagtattattaataaagagcgtacatcttcccttttgatttcctttattctctccagggccttttcattgaggtattagatgagaagataatgtacaaactgcctcaactgtaatttaaggatgatagagtctgtatacagttttcagcccctttccctctatagtaagataatcagaataacataaaagaaaactccagttggagtaccggtaaatatttttgtgataagaatatatgaagcttccctccttcccccgtttttagtactaacatgtaaaatgttcaggcttttgtgaaataccttatattttttaagaaaaaggtttctatcatgtcctgtttgcttttgtgcaaattatttttgtttaatgtattttatatcttcgttgcattctaattttgcccttctttaaactgctggagtctcttctcactgcttgtacatttcatcaacttgtataaaaactcttcagactaaaagattgcccctaatgtaaataataaatatttatgaagtagttattttttaaatttttatcgtgtttaattctggctttctctgaaatccactgtgatttcagccaggtctgtaatgacgctggacagaaacaaggctagagaaaaagccatcgttcaaagaaatttcccttgagctcagcctgcgcagtgcccggaaacatggtggggaaagggcccgagcagttggaaggaaaacaaggcaatttaaatttagagtttatgacttgaagttgttttgtttgttgtctattttgtttttgtaaatttctttgacagacttttactaaaaggacatgtagtttccatgaaagccaaaaaaaaaa

SEQ ID NO: 65077 - DNA, 2478 bp, Homo sapiens
cttgaagaagaacctggctgacgaggatgctgtgtcttgcctggtgctgggcaccgagaacaaggagctcctggtgcttgaccccgaggccttcaccattttagccaaggatgcagtgaccagcctttgctttggccggtacgggcgggaggacaacaccctcatcatgaccactcgaggtggtggcctgatcatcaagatcctgaagcgtacagcagtgtttgtagagggaggaagtgaggtgggtcccccaccagcccaggccatgaaactcaatgtgccccgaaagacccggctttacgtggatcagacactgcgagagcgggaggctggcaccgccatgcaccgggccttccagacagacctatacctgctgcgcctacgtgctgcccgcgcctacctgcaggcccttgagtccagcctgagccccctgtccacgacagcccgagagccactcaagctgcacgccgtggttcagggccttggccccacctttaagctcacacttcacctgcagaacacctcaacaacccgtcctgtcctggggctgctggtctgcttcctgtacaacgaggcgctctattccctgccccgggccttcttcaaggtacccttgctggtgccagggctcaactaccccctggagacctttgtggagagtctcagtaacaagggcatctcagacatcatcaaggtgctggtgcttcgagaaggccaaagtgcacccctgctgagtgcccacgtcaacatgcctgggagcgaggggctggcggccgcctgagacctgagctgctgtgaaagcccctgcacaatcagccagggagaactgggcgggtttagtggccccaggcccactcctcatgcagcagtgtgctggggcgacagctcgtctcccctctcttaagcacccgcttcctcaccacccccactgttgggcctatagtagcaggttagtgagtacctagggcggctcaactcctcccacagcaccaacccagcatggtcccactgaagtcctactacgccctcccctccccagccttttccagaaaccatactgggctcagatcagagctccgaagcggtcaaagtgagctgagcaggacaggcccagcctttctccactgccacgtccctcatgcacatcactcatctcctgctgcaggccaaggccaaaattgggctagtcctggccagggaaatcagaagctcttcttgggtgagattgagcctcctgttgctccctggagttccggaggctgggctgcagcccactcagcttgcgggcaaaatacgtgctctcctctctccttgtcagctgagcaaacccagggaatagccctcctctccccaggaaacttctctgaaatcttagacttagccagtcttaggcctacgatgccacacaaaggttgttcagggagaagggggtgcaggaggcagagggtgccccgcagggagctggtggctccagccccactagagctcctaaagatcacacagcagctgctcctgacagggatgctcatgcccagaaagcaagcccaggagaggaaggcagagtgtgacagagcagagccagggccaggcgcaccaggagaggcgtttctggggctccagagaagtgccacgggaggcagaagtccagaactgcccatatagatgcccttctacatcctggagcccaaatcagtcatgtgggtgggaagttcccagggcagtggtcacatcgtgagaattagcaggaaaggcggggcctttcttgtcatagctatttctgaggatgaaatgggagacatatgcccagcacctgatgtaagtttatataatgtaatattatgtacctaccactaagaaatacatgaaccgtgccatgaggacagtaagtgttcataaagcaacatgaagcaagaaacagtgcagggtgcccagtgcacacactagagagaaattgtgaacattaaggacaaggagaattggtgtctttctaaaacatacttatttaaaaacacatacccacttactaatgtggaattacacagtttgtaacaagaaaacagtctctcccattctctagtactgctcccctacccagcagtcacttccagttcattcagctatttttaaaatgtgcttatatgactcttgcttgatatatcaatcttagacattacctgttgactccctgttgtcatacatgaggctttagctctcttttgtcagcaaccctcccccatccctagttattaggttaaaaaatactcagattactatttctattactatgtgaaagttaactgcggagccaagagttggactataattaaattaccttccttgtactttctttttaatggaggtaatgagttgccctgagtttctcatttactttgttttctgatggactgattgctaattcttcccccaccatctgacagctcctcttttttctagacagcttccttcatcccctgcttt

SEQ ID NO: 65078 - DNA, 1858 bp, Homo sapiens
tttgtagacttattgacgaccctagtcagtgtggtggaattcctggaagttgatggtagaagaatccgatttactgggtcagctgaagatcattaaagacttttaccttctgggacgtggagaactgtttcaggccttcattgacacagctcaacacatgttgaaaacaccacccactgcagtaactgagcatgatgtgaatgtggcctttcaacagtcagcacacaaggtattgctagatgatgacaaccttctccctctgttgcacttgacaatcgagtatcacggaaaggagcacaaagatgctactcaggcaagagaagggccttctcgggaaacttctccccgggaagcccctgcatctggctgggcagccctaggtctttcctacaaagtacagtggccactacatattctcttcaccccagctgtcctggaaaagtacaatgttgtttttaagtacttactgagtgtgcgccgggtgcaagctgagctgcagcactgctgggccctacaaatgcagcgcaagcacctcaagtcgaaccagactgatgcaatcaagtggcgcctaagaaatcacatggcatttttggtggataatcttcagtactatctccaggtagatgtgttggagtctcagttctcccagctgcttcatcagatcaattctacccgagactttgaaagcatccgattggctcatgaccacttcctgagcaatttgctggctcaatcctttatcctattgaaacctgtgtttcactgcctgaatgaaatcctagatctctgtcacagtttttgttcgctggtcagtcagaacctaggcccactggatgagcgtggagccgcccagctgagcattctcgtgaagggctttagccgccagtcttcactcctgttcaagattctctccagtgttcggaatcatcagatcaactcagatttggctcaactactgttacgactagattataacaaatactatacccaggctggtggaactctgggcagtttcgggatgtgaaaatttctggctcataaattgaaataacagccacgttcccaaggttgtaacagaagattcaaaacatcccattctagccacacacaaataaatatctgcggcttagtgataggactctaccttttctcctagaagcagttactgaacatccaggagtacaactccttcccatcattcccatgtggaagggtctctcccatcaaggagaacatgtggcatctctgatcctttacattgagaacatttgttggatatgttcatttattcaatagtcatttattgagcacctactacgtaccttggtactgttcaagctgtgggagatacagcggtaaacaaacaatatagagcagaaagttaaatattttatggttcatatgtgaaaaagtaattatgtttataaatagactaactgctggatgttaccaccaagtaagaaagcaacaggtaagataggctttctctctccctataccaagtaatttatacctacacagattgggcaattctagctaatgaaaatatacttaaaagtatttcttaggccgggcatggtggctcacacctgtaatcccagcactttgggaggccgaggcgggcggatcacctgaagtcaggagtttgagaccagcctgacccaacatgatgaaacctcgattctactaaaaatacaaaaattagcccaggtgtggtggcatgtgcctgtaatcccagctactcaggaggctgagacaggagaattgcttgaacctgggaagcagacgctgcagtgagctgagattgtgccattgcattccagcctgggcaacaagagcgaaattccgtctcaattag

SEQ ID NO: 65079 - DNA, 551 bp, Homo sapiens
  misc_feature (1)...(551): n = a,t,c or g
gcttgggctgtcctctgatgccatgttgtcagcccagacaggcagtgtgatcagggctcctggcagagggtctcttgagacacagccactgcccctgcttggtggtcgtgacttgggacgcagcctgcctgtgactggagctgggggtgacgggtaagatgagtggagatgttgggccagtggggcctgattcccagactggaccaaaccccaggggctgtcctccaatccggaccatcttccagagctctccggatgcgcttgtgaacagcaagttactaggaaacctctgctgcgtctgcacgtccatcaccagggagatgtagccctcgatgagggagaaggagaagaagcggatgtggccgcagtcatccccagtggccatggggtccttcactccattggagtagaacatgacatccatgaggagtgtggcaacagcaggcagcgtgtcagggtccaggctggtgacacagaacctgttgctcgggctggccgaattccaccacntggactaaggtctactatnaggggcctcaattggacgtgcc

SEQ ID NO: 65080 - DNA, 1216 bp, Homo sapiens
tgcagtggcgcgatctcagctcactgcaacccccatctccgaggttcaagtaattctcctgcctcagcttcccaagtagctgggattacaggcacgcaccaccatgtgtggctaattcttttatttttagtagagacagggttttgccatgttggccaggatggtcttgaactcctgacctcaggtgatccaaccacctcggcctcccaaagtgctgggattacaggcgtgagccaccatgcctggccctgagagccctttctatgcagcaaatacttgcctaagattcttctggggctcctcagtgccctcaggatcaagttggtgctcctctgtggcatatgaggccctaagaggcctggccccttacctgcttctctaaattgggctcctgcctctcagtcccctcagcccctccagtctggccaggcttagcacttgcacttcccggaatggctatagacattattccgctatgcctcactaattcctacttaactgacagctctgtcaggtcatcaccacttttatgacctttctcggaccccataggctggatcagatgcctcctgaagaattacagacttcttcctctagacttggaggtgagggaccctctctggaatagagaaggtgttgggagtgtttgttgaatgaaagagtgaatgaatgaagtccttcagtaaggatccctaagcagttactgtgtgcccaatgtgatgccaggtgctgtgcaagctgagcctgggtagggatggggaggagtcctggggaggctgggaccagaactagggatatggactcaccttccacttgctcttggcaaagttcttcttgatctgctcactcaccgactggtggatattcttatctagagctgtatctcctgcaatcctaggatggggttatgtggtgggttgcctatgagggcagaagcagacctgagggccccaaatcccgccccagctcacaggttgtgtgaattctcaccatgggtgctgcaaggcctgctcacaggtgaatcttttctctgggtccttctccatcaagtgccggatgaaatctttggctaaacccccaagacaaaagcaaagataatgacagcatggtactgcctgtgtactccccaagagcatacccactccctcaggtctggcctggcatcaagacaaagaggccaaatcagtccatgccccaccccacccaacctatgctc

SEQ ID NO: 65081 - DNA, 793 bp, Homo sapiens
ttttttttttttaataattaatttctttaaaaacaaagctttgggcattagcaattttatgaaaaaataaaatgtactaaaaataaatgcttgtgtggcatgattggtaaatgatgcacaaaaataggttcttttttccttcaaggcaaaatcagtcagaaagcaggttttttcttcttcaaaaccattctacctcattagcattcaagctagctgtggctctgatgatcatgtagcagagtgtgagggcactgaggaggccaaaactggcaataataaaccattcttttgttactgcaatgttgatttctcctgttctcggagtgagctccccatcctgaggaagaggtgagatccccgaagttcgaagtggctcaaggccaagggagttgtcgccggcgaggtcgccgagggctgatcttcggttaacagcttgggttctggtgagcctttccatatcgaatgctacgttatcagtacatggcaaattcggcacaattcccagggccttcaatatattaagtttgcacataggacaggtacaatgttcactaagccagggatccacgcaggatttgtggaaaacatgcttgcagggagaaattccgacgacatcattctgctatagcctctctatgcagactgcacaatgatcaaagtctgggtcagtttccttgtcacccttctttactgtcctggttgtcaatttactgatggctttcttggctgcatctccgagacgacgctggttcctgtcgcgtgcatttgggtacctgatccttctgatgacgta

SEQ ID NO: 65082 - DNA, 1869 bp, Homo sapiens
tctctagcccagcgtggtggaattcgtacctatgagaacaatttttcattcgtagtttgccagacatatcaagaaatctgaaggccagaaaattcctaaagtggagttgcaaatatcaatttatggagtaaaaattctagaacccaaaacaaaggaagttcaacacaattgccagcttcatagaatatctttttgtgcagatgataaaactgacaagaggatattcactttcatatgcaaagattctgagtcaaataaacatttgtgctatgtatttgacagcgaaaagtgtgctgaagagatcactttaacaattggccaagcatttgacctggcatacaggaaatttctagaatcaggaggaaaagatgttgaaacaagaaaacagatcgcagggttacaaaaaagaatccaagacttagaaacagaaaatatggaacttaaaaataaagtacaagatttggaaaaccaactgagaataactcaagtatcagcacctccagcaggcagtatgacacctaagtcgccctccactgacatctttgatatgattccattttctccaatatcacaccagtcttcgatgcctactcgcaatggcacacagccacctccagtacctagtagatctactgagattaaacgggacctgtttggagcagaaccttttgacccatttaactgtggagcagcagatttccctccagatattcaatcaaaattagatgagatgcaggaggggttcaaaatgggactaactcttgaaggcacagtattttgtctcgacccgttagacagtaggtgctgacatcaagaacaagaaatcctgattcatgttaaatgtgtttgtatacacatgtcatttattattattactttaagataggtattattcatgtgtcaatgtttttgaatattttaatattttgaaaattttctcagttaaatttcctcaccttcactattgatctgtaatttttattttaaaaacagcttactgtaaagtagatcatacttttatgttcctttctgtttctactgtagatgaatttgtaattgaaagacatattatacaaatacctgccttgtgtctgagttctatttagttagcatcttgaaatttgtattcattttccagatggctagtttattaatgatttcccaaaagccataccttaaagataactttttaaattctgaagagacatgccaatgtcaaactaaacatgttctgtttttaaaccaacaaacatgttactattcattggacagatatcattttatgtataaatactgttcacatcactgggaaaatgtaaactttaaacataatgccacaaggtcactaatttctagcaggtaaaattataaggatataaattccaataataaaccaaatgtatttagagtatttattagtaaatgcaaggtgatgttagttatgatcagttatactctaaatatttaatttgttttataaaggtagtgaaaaaatgaaaatttgctatttattaaaaaacattaaatttcattccaaatgagataagtgatattactataacatctaagcatcatctgatttgatattccctaaaaaacatttggaatatatgctatctatagattcagtatctactacccatatttactttaccaaatatatttctcctcactgcataaggactactcttctcatattttcttctttgatgaagatatttttcaccaaagtttattttgtgatgccctcttggttttgatactttaaaatctgtggcacccgttctacatgaattatcaatatttggtaaattcaatctgtatttggttttggttaaaagtcaaaaatctcattttccaaaaaaaaaa

SEQ ID NO: 65083 - DNA, 6147 bp, Homo sapiens
gggtctgatgggcgagaagttggcctgcgtgaatgagcaaacaaatctgtgacccaccgtcggtcatggagtgggagaattcagtctcagggtgaaatgatgtgccaaggtcccaaggctgggagaacgtggcacttgggtgtgagccctggctgtccacagagttcgtgtcttctgccctaaccttctgccctcgcacaggtcaggattttactggaatggcgtggctgtcttccccaagcctcccccagatggggtgtaccccaacatgagtgagcctgtcaccccagccaacatcaacctctatgccgaggccctggtggccaacgtgaagcagagggccgcctggttccggacaccgcacgtcctctggccctggggatgtgacaagcagttcttcaatgcctcggtgcagtttgccaacatggacccgctgctggaccacatcaacagccatgctgccgagctcggtgtctcggtgcagtatgccacgctgggcgactacttccgtgccctgcacgctctcaatgtcacctggcgtgtccgcgaccaccacgacttcctgccctattccacagaaccattccaggcctggacgggcttctacacgtcccgcagctcactgaaggggctggcccggcgagccagcgccttgttgtatgccggggagtccatgttcacacgctacctgtggccggccccccgtgggcatctggaccccacctgggccctgcagcagctccagcagcttcgctgggccgtctccgaggtccagcaccatgatgccatcactgggactgagtcccccaaggtgagagacatgtacgcaacgcacctggcctcggggatgctgggcgtgcgcaagctgatggcctccatcgtcctagatgagctccagccccaggcacccatggcggccagctccgatgcaggacctgcaggacattttgcctcggtctacaacccgctggcctggacggtcaccaccatcgtcaccctgactgttggtttccctggagtccgcgtcacagatgaggcgggccacccagtgccctcgcagatccagaactcaacagagaccccatctgcgtatgacctgcttattctgaccacaatcccaggcctcagttaccggcactacagcatcagacccactgcaggggcccaagagggcacccaggagccggctgccactgtggcgagcacccttcaatttggccgcaggctgaggagacgcaccagccatgcgggcaggtacttggtgcctgtggcaaacgactgctacattgtgctgctcgaccaggataccaacctgatgcacagcatctgggagagacagagtaaccgaacggtgcgcgtgacccaggaattcctggagtaccacgtcaacggggatgtgaaacagggccccatttccgataactacctgttcacaccgggcaaggccgcggtgcctgcgtgggaagctgtggaaatggagattgtggcgggacagcttgtgactgagatccggcagtacttctacaggaacatgacagcacagaattacacgtatgcaatccgctcccggctcacccatgtgccgcagggccatgacggggagctgctctgccaccggatagagcaggagtaccaagccggccccctggagctgaaccgtgaggctgtcctgaggaccagcaccaacctaaacagccagcaggtcatctactcagacaacaacggctaccagatgcagcggaggccctacgtttcctatgtgaacaacagcatcgcccggaattactaccccatggttcagtcggccttcatggaggatggcaaaagcaggcttgtgttgctgtcggagcgggcacatggcatctccagccaagggaatgggcaggtggaggtcatgctccaccggcggctgtggaacaacttcgactgggacctgggctacaacctcacgctgaacgacacctcagtcgtccacccagtgctctggcttctgctgggatcctggtccctcaccactgccctgcgccagaggagcgcactggcgctgcagcacaggcccgtggtgctgttcggagacctcgctgggactgcgccgaagctcccaggaccccagcagcaagaggccgtgacgctgcccccgaatcttcacctgcagatcctgagcatccctggctggcgctacagctccaaccacacggagcactctcagaatctccggaaaggccatcgaggggaagcccaggctgacctccgccgtgtcctgctgcggctctaccacctgtatgaagtgggcgaggacccagtcctgtctcagccagtaacagtgaatctggaggtgaacttccccacccccatccagaccataagccagggaagcaaaccctagatgaagccccaagaaactgccttggcaaagagatccacgagggcttcctcccaaatggacgctggtatgggccccaccccgcccttcttcatggtcttctgggtttgtcaggtattacaactggcctggttttttagggttttttgtgtatatgtgagacaggatctcactctgttgcccagtctggggtgcagtggcacaatctcagctcactgcaacctctgcctccctggctcaagtgatcctcccacctcaacctcccaagtaactgggatcacaggggcgcgccaccacgatggctaagtttttttttttttttttttgagaccgagtttcgctctcgtcccccaggctggagtgcaatggtgcgctctcagctggctgcaacctccatctcccaggttcaagtgattctcctgcctcagcctcccgagtagctgggattacaggcatgtgccaccacgcccggctaatttttttgtacttttagtagagacagggtttctccatgttggtcaggctggtcacgaacccctgacttcaggtgatccacctgcctcggcctcgcaaagtgctgggattacaggcgtgagccaccaagcctggcctagtttttttatttttagtagagacacggtcttgctgtgttgctcaggctggtctcgaacgtctggcctcaagcaatctgcctgtcttagcctcctgaagtgctgggattacagggcgtgagtgggcctgtattttctttcttatttattctgtgggtaaaacttttaaaacacagacaacatctgtgttaatccaaaaacaaaacaggattccccatagagtttgcttttgaaaggttgacttaggagttcaggacaatccagggtccacacccaggcccctctacgggggcatctccggcaccccatgcctctgggcctcagtttccccccatgtaaaatggggagaggtgagagttctttgcccagaaggttgctgagaggccctggcactaaggggcctcgtgcagtgtcagggcccccaggcctcgtccccttccaggttcccctcttggctgatgttgccctctcagctctactatcaggcgaggcttccgccacctggcctgcccacgctccctccccagaaggcatgacctgagccgcctcatttctttcccagtttgcattctttctatttcatttcctgctcatggagaatttctgtgaatctctgtgtttctgccttgggcctccttcgacatctgagtcttcaggggaatccagagaagccccagtaccttttcgccatgatgtcttactgggccacccacctcctctttcatgatcctcgccagggaggatcctttcctcacggtccctggcctgcctgagagcaggtctaggccatggcgggtaccagtgcccagcacagggccagcctgccctgggaagcaaggaggccggcgtgggacctggaagttggtcatctgatgctcccccgtttcacagatggaagcaccaaggccctgagacaaggagacggttgggatggacaccatgactccctgcccaacgtggacggtggtggggtggaaagaccattgagttaggaacgcagtgagtttggctgcaagtcacaaaacacctaacagatgtgcttagaacagaggacagagtgttttctcaccgaacaggcatgtccgatggaccccaagcgctgtcaccgtgggcccgatcactgtcgtcttcccgccatcgccggcagactggcttttgtcttttgccgtctgcttgtttgcggtcacaagatggcacaggcctccctcatgagcaaatttcaaggcagggtggggctcggcagtagtggccagaaaggccttgccctagcgtggctctctccctccgtcagcacacagaagcttctccaagagccacccccacccctcctgctccacagacttttccagacccctaagggcctcctgcctcccctaggtgtaagggaggctgggacaaggcctattgggaaagggggatggggtaactgtggctggcttcctccctggactgggcacggggccacctgagcaatgtggggagaggagaactccgcggtggggtgggcagctcaaaatgccacacctcccgggctgctcctccagctcggccacctggtaaagcatgcacctcccgcttcagtgtcctcatctgtaaagtacacggccagtcctgtcctcgcagatgtgctgtgagaagcagatgagggagctgtgtcaggcaccaggggaggacctgggctcctgaggacaccgagttcgtggtgtgtctgccctgctgctgtcttggttctctgctcagctctggaacttggtgcagctcactctccctctgctcctctccctgcaggctgtgctgcaggcgctggggtccgtggtggcagtggaggagcgctcgctcacagggacctgggatttgagcatgctgcaccgctggagctggaggacggggcctggccgccacagaggtgacaccacctctccctcgaggccaccaggaggccccatcatcaccgtccacccaaaggaaatccggacgttctttattcactttcaacagcagtgagccctgggcagatgccccgtccccagggcttcccccaggaactccatgtaacagaacagacccaggacagggaaaagcagtgcggagggatgggactggggagtcagctgctcatctgcaggctaatggcaggaaatggtcatatttggggtttttccctaatttttttaaacaaaaattacattacaagatccaggttcttcccccccacactcaatcaagccagccctctcctcttctgtcacgtaaaggatatttggcacactcatgcgtcattcattcacaaaacacaaacccaggactttctgcctaaggcagaacacaagactcacagcagcaccgaagcgcatctgccgtccgggccctgccaggcttgccaggctgccagtggtaactgtggacctactgcgtgccacgtgttttcatagactcatcccatgctggcaacagccctgcaaggggcttggctctgccacagggcaggagaggaagttgtagcgcctagcgagagttccagccccagacgcccacctgtgcctcagggcaccgcctgccgagcagagaaggcacagcagccgtcagagtccatgagaggtgaaaccacacagcagggatgtccaatatcagaactattaatatcaataaaagtataaccttcccaggtctatgcccaagagaattgaaaacatccatccacacaataccctggggtccccgcgttccatagccagcattacctcaaaaagtccaaacgggtaggcaaccaaccccaaatgtcccatccccacagatgaaatttaagaccatgaagtgtgttcctgtcccatacaatggaaatattatttggcccccataaaaaggaaggaaattctgacgcatgccacagcctgagtgaatcctacaaatattacgctaagtgaaagaagccaatcacgagtttatgtgaaatgtccagaataggcaaatctgtgtatcagagacaaagcacattggtggttgccaggtactggaggaagagagaagaggcatgacagctaacagggacgggctttctttggaagatgatgaaattgtggaatgatggttgcacaactttgtgaatatactagaaaccaatgaattaaaaactttggaagatgaaaaaaaaaa

SEQ ID NO: 65084 - DNA, 698 bp, Homo sapiens
tcaagggttcctcacaaatctatagtattcataaaatttgaacattttctcacccagggcccaggaactggaattagaagatcatcaaagcagactggagcagaaactgagagagaaaatgctcaaggaggagagccagaaagatgagaaggatctaaacgaagagcaagaagtattcaccgagctgatgcaagtgattgagcaaagggacaaactcgtcgattccttagaggaacaacgcatcagagaaaaagccgaggaccagcactttgaaagcttcgtattctccagaggctgtcagctgagcaggacttgaggaggcccgtagtccctctccctggctgcacgttgggaccggatcaggccaagtgcaccacacaccctcatgggtctttctgcaggatttatcatccctggaacttaagttataccttactgcattttttaaaattaaaattctcttgcacgcatggcagcttcccaaggttcttccagagattcaaatgaagaaaacccaaagactctttggcaattggcagtcaacttcagccaggctctcagactggaggtgttgttggcagatgaccagcattgttttccctagaaagtgacacaaagacttgactttcctgctacttttatcattttccttcccaattcattgagttacatactttaagatttttgagaagctgcct

SEQ ID NO: 65085 - DNA, 1169 bp, Homo sapiens
ttttttttggtcctgaaaaaaggctttatttgagtctgaacgagaagtaaacatcaagcaaaacagaaagagaggcctgggctgggtgacaggttgcatcttcaagatgggcctcataagagaggcgtgacagtaactgggggctggggcaggtgggacactcaggtcatcaactgtctctccacggcttccttgggttcagccctgtcctctgtcatcctggagctgaacatggagcccatcctggaatgtctcagagatggcatgctcgagattccggaaatggaggcgtaggtgtagtaggattctgaggcaatgaggttgtttatcttccaccggatcatcgtgcagcccttcaccacgaggggccacaggaggcagaaggcgatgtagaagatcaccaggcccacaaacacgctagctgacaccatgatgatgaaaagggcccgcttgggactgagtggcagcccgtggatgtgcagcaggaaggtgagctggtagttgcagtaggtgctcgtgtccactcctctattgctcaccaacaccttgaagaagaattcaggggcaaagatgccttggggaacattgtcatagcatggggcattctccagacagagccactaggtacaaagtcacatctttcatttattcccttctttattcattatccaataaatgcaggttaggccaggcatagtggttcacacctataataccagcactttgggaggccgaggcaggtggatcacttgaggtcaggagttcaagaccagactgaccaatatggtgaaaccccgtctctactaaaaacaaaatacaaaaagtagccgggcgtagtggcacgtgcctgtaattccagctactcaggaggccgaggcaggagaatcacttgaacccaggaggcagaggttgcagtgagctgagattgcaccactgcactccagcctgggtgagagagtgagactccatctcaaaaacaaaatataagaaaacagaagaaaacagtttctggcaaacagtcaatataaaatgagaggaaggaggaggaaatcttatttcctctcatactgcaaactcactcagaattttttagaatcccaataaataagcaaagtctatttcaacttaaacaggtccttcaaactgtgatgtgcctcaaggctcgtgcc

SEQ ID NO: 65086 - DNA, 421 bp, Homo sapiens
ggccgtgatgaagatgccggaggacgagtcgaccccggaaaagaggactgagaaaatcttccgccaaatggacacaaacaacgacggtataataatggcccccagttgctgggagaagtgaggattaaccgagtaagtgaggggaaggctgaagtggtccagctcaaagtccatcctggtggacctcctcgccctgagctcactgccttccctgccttcctcacaacagtattagaggaactccaaggaccctgcacacatccgcccatcccagccctgtcccaccaacagagcctctctttcttgctgggacctatgactcccattctcccaagccttgaggccagcaggctgtctgagctttattttgcaagggaggaacaggcctagagagagaaataagtccctcagccaggagaag

SEQ ID NO: 65087 - DNA, 1275 bp, Homo sapiens
ctctcccaaggggtttaaattgggggccccccgggtttttccccccccccggtgtttaaaccccgcccccggaatttatttttggggcccccttaaaaaaaattttcctttcccccccccgggcgttaaaattggttctttttaaaggcccccccctttttttttttttgctgttaaataactttaatggttgatgtgggagtcacaagggaggtatgtttgctccaagggttcttcagtgccatcctcaaagctggttagtgcagggaggtagggcagagttggttccagttttcttccaggaagggtttagggaggtcccagcgagccccaggaatgagtccctcggtaccatggcaaccacaatttaagaggggcttctgcccacccctgcagcctaccccaggtccagcagaggaacaggaggccagactggccaacttgctatagacagcgccgtatccagagcccaactgcgcatgggtcattttctcttctgggcagatcctatgccagcacctttctctctcacactggtgactggagccaagtgcgaggttggcctttgctgcagaggcctctggtccgtggggatcgctgaggtgggaggggggcaaccgagcgagccctaggggagtggtctggggggacagcatccagggaaaaggttcggggtctcccccagggcagggggtgggtccagtctggggctggggccactgaggcaggcgagcaggggttaggcagggcaggctggtctgtaaacattgccagccagggtgggggtgtctccagccttgcgccctcccgctgggtcaggatgtctgtcaccgctgcgatgtcatccagcggctcaatagccatctcatggtacaaggacccctgctttgccagtgcttggggtggtttccggggagcaggagtttcaattttcatgatttcatcacagcactgcttccattggcctggaagaagagcgctgattaaaagagagagccaggctgccctttctcctgctacattcccttccacataatcttgaaacagaggcctttagtaaaaatgacaaactccagttcttcccaaaggttcaacccagcccccttctctcttactcatgtcaaagaaaagctgccacagagcctccatccagctctgcagtgcttcccgactttctgtctgaagggtgtgtgtcacctcatcatccccatactggttactgatgcttagggtgaagggccgtcctagagcctggtccagctcccctgcccggac

SEQ ID NO: 65088 - DNA, 1130 bp, Homo sapiens
gggcgtgcatgggttctcaggttgctcctctgccctctcctcccacaatgtggggactgcaacaccctgtgtggcacagaaggctgggcccacccccaccaggggatagatccaggattacgtccccagagccagtcaggcccttcagcatgggctgccctcctagagcattcctttgatcctttctggggctggaagaagtaggggttgggcactggctattcaatagggacctctgaggacctctagggtccttagagtccatgattgatatgttccccacagcccagtttgaaggaccggagaagagctgcctgtcacctggccgggaggagaaggggcggctacctccccgactctctgcagggaaccccaagtcagccaaacccctaagcatggagcccagcagccccctgggggagtggacagatccagcactgcctctggaaaaccaggtgtgagtgtctgtgtccagctggggactccctccccactcctcccctcctggcactggcttccctacaggggacacccacaatgggtgggcctggacagcgagggacccagcagagatgccccccttcctctctctcatccttagctggtatcacggggccatcagccgaaccgacgccgagaacctgctccggctgtgcaaagaggccagctacctggtgcgcaacagtgagaccagcaagaatgacttctccctctccctcaagagcagccagggattcatgcacatgaagctgtcccgaaccaaggaacacaaatatgtgctgggccagaacagcccgcccttcagcagcgtccctgaaattgtgcaccactatgccagccgcaagctacccattaagggagccgaacacatgtccctgctctaccctgtggccatccggactctttagatgtgaagccagggcactgtgatagacctgtacccagccctgtgcccatcacctggctgagggctgtggctcttgccagggacgtgatctttcaaacctttcttctcctgggatccagtagaagctggagattccttaatttattctaaagggaaagggctcctggggccttggagtaaggggttgtctggagctgcggaaagaggaatccctggagagaag

SEQ ID NO: 65089 - DNA, 1627 bp, Homo sapiens
ccgcatgctggcctggcacgttctcatggggaaccaggtgatctggaaaagcagagacgtggacctcgtccagtcagcttttgaagtacttcggaccatgcttcccgtgggctgcgtccgcatcatcccatacagcagccagtacgaggaggcctatcggtgcaacttcctggggctcagcccgcacgtgcagatccccccccacgtgctctcctcagagtttgctgtcatcgtggaggtccacgcagccgcacgttccaccctccaccctgtggggtgtgaggatgaccagtctctcagcaagtacgagtttgtggtgaccagtgggagccctgtagctgcagaccgagtgggccccaccatcctgaataagattgaagcggctctgaccaaccagaacctgtttgtggatgtggtggaccagtgcctcgtctgcctcaaggaggagtggatgaacaaagtgaaggtgctttttaagttcaccaaggtggacagtcgaccctaagaggacacacagaagctgctgagcatcctgggtgcgtccgaggaggacaatgtcaagctgctgaagttctggatgactggcctgagcaagacctacaagtcacacctcatgtccacggtccgcagccccacagcctcggagtctcggaactgacccgtcacacacacctgcctaaagacagggatggctgtccacaggatcctccagccccgtgagagggactgtcccttgagtttctcaactgctggaaggagctgcgtcccagcaaggaagggaaaccatcatggctgggctcggccctgtcaggtttggggcctgtgtgcttcccagactctccctccagccgttggaatcgctgaagatggcaatgaaaggcggagggatgatgggctctctctgtgttcaaactccttggagagacgactaggaggacagcttgcctcccaggccccttgtggacttagactcaaaacccgcaggagaaacaggtccgactcagtatgcagtcgcaataacatgtctgctcccgaggttaacattcaagcgtttctactttgaaattcagcaagagtttctgggccttatgtttgagggtaccttttgctgcagttgtgaatattcagtacattgccagctcttggtcactgagtgattgagttagggctccgcaagagactttggggagtgaagtggatctcttcctcatcttctggtcctctgaaatgtgtgttctgaagccatggggctcgtcttctggggtgttcccctgcaggtgctggtgaaggtaacctggggcttaatgatggagtccctgatcatttttgcacaagacaggttgctgaggggtcggcaagcatctgacttgcccaatcccctggatatggtgagccccgccatgcttttattctgtatcgcttttgtctttattgctgctttcaacatttacgtttggttacagttaactattttcggagtgtggtgattgaagacaatttcatcatcccactgtacttttttttttgagactctgtctcaaataaagaaaaaaaaaaagataaaaataatttttaaaaagtaaagataggcctgggcaacagagtgagactctgtctcaaataaaga

SEQ ID NO: 65090 - DNA, 1579 bp, Homo sapiens
agtcacctccagaccccagaagctctccccaacccagccgagttcctctgcaaacaattcaaggggctctgataggtcacacagtgccaccttgtgtgctggaccatatctggagggagaactgagtgagggggcacaggggattgtctccaggtggggcgagcaggggaaggaaaatagtggccacttttacattggtttgggtagtaattattgattcaggaagcaaatacaaaatcctgaatgaaatgacttggaaaaagtaaatagaatcaagatcccaagaggagctgaagataaataaatgggagcaggatgtgggggaatggtcggtaagtgagaaatgctaaaatgatagaataaagcttaaggattgttggaggtagagcaggaactgtgtactgcatagttcccaaatgccctggtgttccaatgggggatggaaactaaaacactggccaggttggatttcatactgtagtcctgccatttttcttcctagagcagagataaaagttggccctgggcgatagctcattctctctgaaaggctgctagttaggcccagcctgtcaccctggatcatgagtgtcgtgtgtattgggacttacggcagggggctgaggcttgcagatgggcaagtggtgagaggccccactgacctcagtctgtttctcactggagcgcaggtttgggagcagcagcaacaccacatccttcggcacgctcgcgagtcagaatgcccccactttcggatcactgtcccaacagacttctggttttgggacccagagtagcggattctctggttttggatcaggcacaggagggttcagctttgggtcaaataactcgtaagtatccccctttttgagtctcaccttaattaaaagcattaaataaggttggaagtgtgtggatcttgctggatttgtgcattttcttttcgttttttcctgtttttagagtttgtcctggaagtgtgggggttcagcagcagggtttgggttttgtggacttgctcttctctgtagcaatatggcaggaggtgccaggcctcgccttcttaagaggcgtggttcaaagagaaaagagcacgcctgccagtgagctgggcctgagggcagcgctgaggagatgctgctcctgacttccctggaggtttctcagaagctgcatgctaacccctgggctctgggccatcaccaggtctcatgtgttgatccaccctctgtgcttctgtgtaaaatttcatggcgttaaaattcagtcttagccaggtgggtggttcacgcctataatcccagcactttgggaggctgaggtgggaggattgcttgagcccaggagtcaagaccagcctgggcaacagagtgagaccccatctctactaaaaattaaaaaaattagccgtgcatgctggcttatgcctgtggtcccagctactccagaagctgaggcgggaggatcacttgagcctgggaggttgaggctgcagtgagccaagatggtaccactaccgtctagcctgggtgacagccagaccctatatcaaaaaaaaaaaaagggggggcccttt

SEQ ID NO: 65091 - DNA, 467 bp, Homo sapiens
cgaggatggtacaggcgaataattagagttgtgtgatgtataggaaaagtagcacgatgcaatgtaggttgttcaaatatatgacaggacgtttaaattaaaaatttttttccccccgccatattttatgtggtagcccggtttttttcccccccccctgtttttaatacccccccggcacaaatttttttttttccaccaaaaaaaaaaattattccccccccggcggggggtaaaagagtttttttttttagggggcccccccccccttttttttttttttttttttttttttttttttttttttttttttttttttttttttttttttttttttttttttttttttttttttttcttttttttggaaaacgtagacttttaataactgcttttatcaccaggttaagccatgcagttacaaagtagttagaaatttctgaagggtgttagagttaaaaaaaaaa

SEQ ID NO: 65092 - DNA, 1599 bp, Homo sapiens
gcggtggaattcgtcattcttaaggactgttctgtccccaaccccagctggaacaaggacctaagactgctctttgaccagtttatgaagaaatgtgaagatggctcctggaaacgtttgccttcatataaacgtacacctactgaatggattcaagacttcaaaacccattttcttgacccaaagcttatgaaagaagaacaaatgtcacaggcccagctcttcaccagaagctttgatgatggcctgggctttgaatacgtgatgttctacaatgacattgagaaaaggatggtttgcttatttcaaggaggcccttacctggaaggaccacctggattcattcatggaggtgccattgcaaccatgattgatgctactgttggtatgtgtgcaatgatggctgggggaatcgtcatgactgccaatctcaacatcaattataaaagacctatccctctttgttctgttgttatgataaatagccaacttgataaagttgaaggaaggaaattttttgtttcctgtaatgttcagagtgttgatgagaagaccctatactcagaggcgacaagcttatttataaagctgaatcctgctaaaagtctgacataaagagctgctggtgaactccatctcattctcgcccctccagaagaagcagttgtcccccaaatactctgctccctcactgctgaatccctgtagggagaagcctgccaacagtgaccttccgaaacagccttctgaatacaaagaggattcagtttccatcttctcaactttttaacacagaaacacttcctgcgagcatatcgacaactctcgggccaggcgctgtggctcacacctataatcccagcactttaggaggccgaggcaggcggattgcctgagctcaggagttcaagatcagtctgggcaacacgatgaaactccgtctctactaaaatacaaaaaattatccaggcatggtggcgtacgcctgtagtcccagctactcaggaggctgaggcaggagaattgcttgaacccaggaggaagaggttgcagtgagccaagatcatgccacatcactccaacctgggcaacagaacaagaacccatctcaaacaaacaaacaaacaaaaaaaaaaaaactcttgtctccttaggatatgttacctgctccactgcagactagagaaataaatgtgtattgaaccttttactgcaaacttgaaaatgctagaaaaccaagcatgaagaataaatacatggcgggaaacacacaggcatgtgcatatgcatatacattgtaagttagtaagttagaaagctagctttgttgtatctgaacacatgaatcttttttggtcagtgtaggaagcacagccagatcctataggaatgaatacctcaaatctgttgtctgagattctagagattaaaccactgtgccatttttaacccaggctgtactattgtttcttaccaacagcataggttttcatcactggaaggagcctgtgttcatttcctagggctgctgtagcaaagtagtacaaactggattgtttaaaccaacaaaaactcattgtctctcagttctggaggcca

SEQ ID NO: 65093 - DNA, 1423 bp, Homo sapiens
atgaaagatttttatttcaaattgcttttccttttattattgtagggcttaaaagacaaccttcttgcttctgggacatccagcctgacagccaccaaacagttgcatcgtccaagaatcacgagaatctgcctcagggacttgatattttgtatggaacaggaacgggagatgaagtattctcgagctctatacctggcccttctgaagtgaccactccactcttccatccagatccttgctatttactgccaaagaagacacaaagcattgttgcactgtcctgaaatttcaatttctggaaaataatcaccaacatgaaagagcattgtttacagttagaaactttattaactcttacctatccatctcatgggactcttacagactcagattcatctttgtcttctgaaaatcagttatgaaatacactttgcacagaattaggcatctgcctatctgtgcattaaattaaagcaagttaaggccctatttgttactacctgcctcatttgccaaattgtagcaggtgaggtgtccttccctaatacagcatgcattgagatgcaggagaaaggaagaggcataagaaaatacaagaatgactatttcattctatattgaacctgtcccaaagtggtaggttttctgggctggaatcagaagttgcttagctaactatgacagtcaccctctgtacgtgacaggccactgtggtgactttggtcggctgagttccagtgttgtcaaaacaagacaaatggggatagattgtgcctggggttgctaattctctgcttcatatcaccatatgccgtttctggtaccaagtgaggggacatgcttgtcagggaaaccttaaaattgaatctactgatatatcttgttgaaaaaatggaaaaggtgcaaagtattagaaggaacgttagggcgttgctttcaaactgatgaggggaatgtgaaaatggtatcataaaacaggaaatgtgcttcatatgcccaagaggggaagaggtggaatcggaactccaaaacaactggtacatgttttgttgatgggcaaaaaaaatcacagcacaaccagaaaggagaatgtaccagatgttttcaaattagagtatttcaaaaggaaaatgttattttttgttttgtattgttttaaatcccaaggatagtttttatatttccttctgtcataatatattttagttatcctaatttttaagcatgttggcacatttaaaaaatcctaattgatgatgagaaatttttaacaataggactttatgttggattctgtacttaaaaggtactgtcaatatctcactcttggggatatgagctctaaatatgagaagcaagttatatgtgttcacctgaggaagaagctgacggacaaagcaaaccctctttaaaaaaaaaa

SEQ ID NO: 65094 - DNA, 2081 bp, Homo sapiens
tttcttgtagctcactcgagcctccacctaccaggttcaagccattctcatgtctcattcttttaagtggctgggattacaggtgcacgccacagtgcccagctaatttttatatttttagtagagacagggtttcaccatgttggccaggctgttctcaaactcctggcctcaagtgatccgcccacctcggcctcccaaagtgctgggattacaggtgttagccaccatgcctggctgctaatttttaattttttgtagagacagggtctccctgtgttgcccagactgttctcaaactcctgggctcaagcaatcctcccacctcagcctcccaaagtgctggaattacagtcatgagccatcatgcccagccaggatatggacttcttgactagtaggaagaaagtgggctggacacactggctcacacttgtgatcccagcactttgggagaccgaggtgggaggagatcttgaggcccagagtttgagaccggcttgtgcaacatagtgatgtagcaggacgagccacagacaaaacctctcagacactgagttgtagaaggaagggctttattcagctgggagcatcggcaaactactgccttaaaatccgagctccccaaatgcacaatttctgtcccttttaagggctcacaacactaaagatttcacatgaaagggtcgtgattgatttgagcaagcaggcggtacatgacaggggctgcatgcaccagtggtcagagagaaacagaacagggcagggagtttcacaatgttcttctatacaatgtctggaatctatgaataacatcagtttctaagttatgagttgatttttaactactgggtttaggccagacaggcccaggcctgctttcaggcctggtgccgggctgcctgtctttggttttacttccttgtcactttttcttaaaagaggtactgagtataaaacaatataaaacaatataaaacaatatgagagggtctctctctcttccctcatttcccccctttgagactctcagtttttattagtgggagttctcactcttatttttgctacttatgtattttcgtgcaatagattgatagtgatttatatagtatgcttgtgctgaagcattttggtgaactaaggttaagcgacgaagttttttatcatttggagaaatacaggtatcagacaagggagcagtaagcaggttcctattactattattactcttattataagagttttaaatccacctattgctgggaaccaatttccaaacatggctcccagattgagtccgtgccacacttgcacaggtgcatgtgccagttttgttatatctttaactatatcctcaactacttgcccctgatcatctatgtgtagacaataattagtaaggtcaaatttttcacaaactcctccttcagctgctagcaagtaatcaagagctagtctattttgatagatagcatttctcatcagagtctcttgccaggcaagaacagtcaaggcttgagtggttttattagtaataatttctaaaactgcttgtaaccatatgattcggttgagcatgtagatgggggttccatatccccatgagacatcttgtgaccaagtggcaggtccatagtattgtaagattttttcagggggccattcatcgtctttccaatcacctatggctatgcttcatttttcacaggaagcacagactgggaagcccagaagtttacctgtttttatgggcactaagaagaaagatggcttaatggtgccaattacacagctacctgtccactgatcaggcagcttagcataagctctgtgtccacatacccagtataacccagtgggggccgtccagtcccagtgcaattctgggtgggcccaaacagtctgcaactttggaaatttactgaatggatttttttctgtgtaattggaactccaccatgtaactgtttttgtggtaccattatacagcttttgcccaagacaactaagctgccctacaggatgagtaaatccttttccttctctagctatgcaatactgtccaataataagacttt

SEQ ID NO: 65095 - DNA, 1597 bp, Homo sapiens
tttttcagaacacaaatttggcattattttatcaatatatcaagcaatataactgctagatacaatgttcacagcagcattgtttcaacagcaaaaacaaataaacaaaactcaaatgtccatcaagaatgaataagttgtagtatatttatataatactatatagcaataaaaatgaaagaaagtcacagaagtaaacattttgccatttatataaaattcagaaacatacaaaattaacatttcacttacagatacatacgtatgttgtaaaactataatagacaaatgacaaacacaaaattccaaataattatttgagagggagagggccttagggaacttctaaaatgtcgacaacatctgtatcttaagctggctgatgagtacacagatatttacatttattatccctttatatatacgtttatgtatttttgtagtatgaaatacttcattaaaaaaagagtgaaaatgtaagacttcaaaaatgaagactaccatttatgtataacaataaaattagtgtaaaaaagtatacaaagaaaatgttcaattctttatctttccgtgctctatataatcagtattaatctaaagaccataatcctagtatgaaaaaaataacaagctttgacacaaaatctaagcatctgctttcctggcactcttaagttagacaagagtaaatatgttagcctctcaattctgcctcttcatctttcatctatacttagatttttctttatctttggacttctttggacttctgcttcggtctctctttttactcctttctctttcataaagatctgtttggtattttgatttatgactattactataatggccatccctctctcgagatcggctacgacttcggttctgagttcggtctctcttttcactcttttgtttctcccaacagctttcttcttcttcatagtgaccaaaccccatttctctatagatatcctgattagtatttttgattggcatgtagtcctcatcttctttctcttcagaacagtgatgggttttcttcttgtgttttttacttgtgtgtgagtgacttgattttgagtcttcggcctgctcatctaatataagatcgtattttgtatcctgtttgggctttactttatctttcagaaccaaattaggtggtttatcctgttctttttcatactccttgaaatcactcttggtgtatttcccaccttttcctttccatttaacctttgcaaccgactggctaaaatccacatgtattcgtctgtcatctataagcacatagtccattttaaagaatgctttctcacaatcttcttccttttcaaattcaataaaagcgtaacagagggactctcctgtcttccagtctcggataacttcacaacttcttagtggcccaaatctagagaatattatttccagatcctcatctgtggtcactgggttcaatttacacacaaacagtacattttctggaggtttaatatctgcatcaggtaggtctcccaccatctccaaaagtatagcctgagttttagcctctttttctgcaaataaatcttgtacttcctcagctgatcct

SEQ ID NO: 65096 - DNA, 1248 bp, Homo sapiens
cccacgcgtccggcatcctgttactgcattttagaaaatgatggagtcaagttttgtcggcccccagtcattccctgaggtcccttctcctgacagaggaagccagtctgtcaaacaccacaggagtctatcctcttgctgcagcccagggcaaagaagtggcatgctccataggaatgccttcagaaggacacccccgtcaccccgaagtaggctaggtggaattgtgggaccagcatatcagcaactcgaagaatcaaggatcccagaccaggatacgataccttgccaagggtattcatccagtggtttaaaaacccaacgaaatacatcaataaatatgcaactgccttcaagagagacaaacccctattttaatagcttggagcaaaaggacctggtgggctattcatccacaagggccagttctgtgcccatcatcccttcagtgggtttagaggaaacctgcctgcaaatgccagggatttctgaagtcaaaagcatcaaatggtgcaaaaactcctattcatctgacgttgtcaatgtgagtattccagtcagcgattgtcttatagcagaacaacaagaagtgaaaatattgctagaaactgtccaggagcagatccgaattctgactgatgccagacggtcagaagactacgaactggccagcgtagaaaccgaggacagtgcaagcgaaaacacagcctttctccccctgagtcccacagccaaatcagaacgagaggcgcaatttgtcttaagaaatgaaatacaaagagactctgcattgaccaagtgacttgagatgtaggaatctgtgcattctatgctttgctcaacaggaaagagaggaaatcaaatacaaattatttatatgcattaatttaagagcatctacttagaagaaaccaaatagtctatcgccctcatatcatagtgttttttaacaaaatatttttttaagggaaagaaatgtttcaggagggataaagcttaccattaaagcttttgggtagaattctgaatccaatttcgtttagtcccaacactgtcctctttggctcttagaagatgtgggcaattcagacccttggccccacagtgccagtgtctcattaaaaaacactggcagttacctggtttcaaaaagaggagagctgcatcccgcaggtggatcaccagtgagcaggtgctcttccatttggttccagtccaagcctaattttattaccaatgctatacagg

SEQ ID NO: 65097 - DNA, 1330 bp, Homo sapiens
cccctcgtagaacactaggccatgtggtggaattcgctggacggcataaggaacatcgtcttgagcaatcccaagaagaggaacacgttgtcacttgcaatgctgaaatctctccaaagtgacattcttcatgacgctgacagcaacgatctgaaagtcattatcatctcggctgaggggcctgtgttttcttctgggcatgacttaaaggagctgacagaggagcaaggccgtgattaccatgccgaagtatttcagacctgttccaaggtcatgatgcacatccggaaccaccccgtccccgtcattgccatggtcaatggcctggccacggctgccggctgtcaactggttgccagctgcgacattgccgtggcgagcgacaagtcctcttttgccactcctggggtgaacgtcgggctcttctgttctacccctggggttgccttggcaagagcagtgcctagaaaggtggccttggagatgctctttactggtgagcccatttctgcccaggaggccctgctccacgggctgcttaacaaggtggtgccagaggcggagctgcaggaggagaccatgcggatcgctaggaagatcgcatcgctgagccgtccggtggtgtccctgggcaaagccaccttctacaagcagctgccccaggacctggggacggcttactacctcacctcccaggccatggtggacaacctggccctgcgggacgggcaggagggcatcacggccttcctccagaagagaaaacctgtctggtcacacgagccagtgtgagtggaggcagaggagtgaggcccacgggcagcgcccaggagcccaccttcccctctggcccagccaccactgcctctcagcttcaacaggtgacaggctgctttcgtgacttgatattggtgtcatagcatttggcctacattaaaagccacaatttcatggggaaaggacaaaatggagagtgactgaggtgctgacctcagtgcaaggctggtgaaccctgcagcgggccagctatggtgggaagcctggcatttggggtgctccttgcaacgtcttaagcaagcgacccccctgacatagcaaaaggtggcaacccatggaggcagaaagaaggacgccagcctgacccttatctgaaacgtcctaagcagagttaatcctggctgctcaggagaggcgacacatttcaaatctccacgagatattctccacacagaaaatcttcttgattctatagagacttaatcatgcctatggctttgaataatcttatgtgatttaaataaattaaatctttatagagccaaaaaaaaaa

SEQ ID NO: 65098 - DNA, 1495 bp, Homo sapiens
ccccgcttttttttgtgtttttccccccctggcgaaaaggggattttcttccaagccatttaaattggggtacccccggggttttcccctccccccgtttttaaaccccggccccgggaatttaattttgggggccccaaaaaaaaaatattaccttgccagcccggggacgtaaaatttggtcctttaaaacggcccccccttttttttttttttaataaaattatagatatatagatgtagatataaaaacataaaacagacacaacgcaagcagacgctgtcatgtgcttactctcaggtccctgacaccaagggaagcactgacccctccccagtgtgctttcccacggcgcgagcaccgcagccaggccggggctgcggacgtggcatgccttggggtggggttctccagtttggcagggagggcctgagggctggggagggggctctgggtgtcaccagccccctgtggcagcatcacccccgtgcctgctcccgcctgcccccccgtcgcctcccacaagagcataaagcaaaggttaaggctttgatgaaagggacagcggcggccggagcactgacacatcagacacggcgcggcagcacagcacacagacacgggacacatggagccgggcccccggccacagctggctggctggccgtctgtccacctatccaccaccacccagagcaggccagggcagaagcatcagccttgccaagctacaagcttccagcggggtccgtgaaaggcaacgcgttagttaggagtagcctggcgggggacactcggtccgggagcccacaggctgtgtcagaaggacggtgggggccctgggtgcctctgtccatctctgggacctgtccgtaaggggaccattgggggctggcctggcggtgatctggggtgctgggtgatggcagtgggccaagcctggctgagagagggtgccccaaagaggctgactgggccccctcactgccccagccatgggacaggcccagacacagaccagcccagtggcccttgtcccagtgagccgacttccccatgggcagatgagtggacgggcaggcagagcgcttggggcaagctgtggaggcgtggcactctctcccgccgatgggtccacaccaggctggggtggcctcgggtccctggggcagagaagttggtggggagggggggtgcgctgtggggtcctggtccccgtggcaccatggcggatgtgtggcagtcagtcctcacaccgagatctcgtaggtggtcccacccacgccggacaccttcttaaccagcgtgtgccgtgtagggctggcagagggccctggggggccggtggcaggtcccatccgggccaggcccggggactgcccattaagcttacttgggggagtcttcagctgagggtggtccctgcatcaaaacaagcacatacacacatgcacacggtgaacacacgaacacggggacagaggacggaggagt

SEQ ID NO: 65099 - DNA, 413 bp, Homo sapiens
tcgaggagccccagggtagtcccatctgggtatggctggctgggtcactaacttctgtgagctgcttccttcctttccagaggatgcggatcaaacctcaccaaggccagtacataggagagatgagcttcctacagcaccacaaaggtgaatgccgaccacagaaagattgagcacgacaagaaaatccctgcgggccttgctcagagcggagaaagcatttgcttggacaagatccgaagacgtgtaaatgttcctgcaaaaacacagactcgcgttgcaaggcgaggccgcttgagttaaacgaacgtacttgcagatgtgacaagccgaggcggtgagccgggcaggaggaatgagccttcctcaggggttcgggaaccaccttctctcaccaggaaagactgatacag

SEQ ID NO: 65100 - DNA, 390 bp, Homo sapiens
cccacgcgtccgaccaggttagcgaccccgatagtacagtggctgtggctttcacaccaaccattccgcactgcagcatggccacccttattggtctgtccatcaaggtcaagcttctgcgctcccttcctcagcgtttcaaggtcagttggagctgagccccgggagtgagaccaggcattgagggtctactgctgaggatggggactgggagagcatgaacatggataggacatcagagtggggcctggaaggatccccattatcagataggaaactgggaggaagctttccaagtcgatgtgacaagaataaagatctgagctggaaagtggagaaaagtattgaagagtgtggcaggaagggcagtagggagcggcatatgggttt

SEQ ID NO: 65101 - DNA, 1445 bp, Homo sapiens
ggagcgcttggtggcagtccgcgggcccggacggaaggctgaggcgacgcctcgacgacagcggaccggagctgcaggggcaacacattcagggcggggtgccccatttaggcctggctgaccggagtaagaaactacaacccccgaagtgccttgcgcctcaaggttacggaggcagtgaccacccaccctggagccatggtccacgccttcctcattcacaccttgagggccccgaatactgaggacacgggcctttgccgagtgctgtactcctgcgtcttcggtgctgagaagtcacctgatgacccacggccgcatggtgccgagagggacaggcttctccggaaggaacagattttagctgtggccaggcaggtagagtcaatgtgtcggctgcagcagcaggcatctggccggccccccatggacctgcagccgcaatcctcagatgagcaagtgccgctgcacgaggccccacgtggggctttccgcctggcagcagagaaccctttccaggagccacggacggtggtgtggctgggcgtgctctcgttaggctttgccctggtgctggatgcccatgagaacctgctactggctgagggcacgctccggctgctgacacgcctcctccttgaccacctccggctgctggcgcccagcaccagccttctgctgcgggctgaccgcattgagggcatcctcacccgcttcctgccacatggtcagctgcttttcctcaacgaccagtttgtccaaggcctggagaaggaattcagtgccgcttggccccgctgattcctcgttgggatggtgcttctgagggcaggcagagggtagacacacagccagatgaagcttggcatctccctcctacccagcagctctgatgtgctgctataccaggacaagtgggtgacacaagcctgcagaaagggggctgggcagagggtggaggaggtcctgcctgtcctcaggttagtggaaccacagaacttcctgagcctagagctgctgtgttacttagaccgctgccgtgcggcagccacgcttgtccttgaacccaccttcctccatccctgccagccgatagtgctagggtgaggagctgcctggagctcaccccgctcttcttccaaacccacagtcaaggccaggcgcggtggctcacgcctgtaatcccagcactttgcggggctgaggtggttggaccacctcaggtcgggagttcaagaccagcctggccaacatagtgaaaccccatctctactaaaaatacaaaaattagctgggtgtatggcgcccacctgtaatcctagctgctcagggggctgagtcatgggaatcacttgaacctgggaggcagagtttgcagtgagccgagagtgcgccacttcactccagcctgggcaacagagtgagactccatctcaaaaaaaaaa

SEQ ID NO: 65102 - DNA, 761 bp, Homo sapiens
gggtcgacgattccgccccctttgggctttttttttggccatccgcaaaatgagtgattggatgagagggcctttgcactcccttgacactttatgtgattaattgcctctttctgaaccccagacctcaggtccccttcaccttgcccttaaaacaggaaggagtgggactggaggttgtggacggggagggaaaacctgagttggggttggggctccaggatcctctcccaggtcttttccctggctccataacattcggtcctctggccccctcaacgctctgtcccctgtttccctctgcccaggctctgggagccagatagagcactccctggtgttggtgctggcaacaccacctgctgcagctaccaggccttccttctcctgctccaggtggaatacctgctgaaaaaggtactcagcagcatgagcttggaggtgagcttgggtgagctggaggagcttctggcccaggaggcccaggtggcccagaccaccggggggctcagcgtctggcagttcctggagctcttcaattcgggccgctgcctgcggggcgtgggccgggacaccctcagcatggccatccacgaggtctaccaggagctcatccaagatgtcctgaagcaggtcaggcaagctgggaactaggggaagcacacaaggtgcagggcgaaggggggcctgggaagcctctgacgtaactccggctggcagggctacctgtggaagcgagggcacctgagaaggaactgggc

SEQ ID NO: 65103 - DNA, 1333 bp, Homo sapiens
tttcgtaccatgggcagtgagcagagctccgaggccgagagccgacccaacgatctgaactcctcagtgactccttcaccagccaagcatagagccaagatggatgatattgtggttgtagctcagggctcccaggcctcacggaacgtcagcaacgatcccgatgtcatcaagttgcaagagattccaaccttccagccccttttgaaagggctattgagtggccagacttccccaacaaatgccaaattggagaaactggactctcagcaggtgttgcagctctgcctccgatatcaagatcacctgcatcagtgtgcagaggccgttgcttttgaccagaatgctttggttaaacgaatcaaagagatggatctgtctgtagaaactctgttcagcttcatgcaggagcgccagaaaagatacgccaagtatgccgagcagatccagaaagtgaacgagatgtccgccatcctccgccgcatacagatgggcatcgaccagactgtgcccctgctggacaggctcaacagcatgctgcccgagggcgagcggctggagcccttcagcatgaagcccgaccgcgagctcaggctgtagctgccgcccggcctgcctggggctgggagccccagacaccgacaccctgaggacgtgtggagctaaggtcatatcatctgaccaggtctggaggctggcgggaggctccctgaaagtgggtgcgaaggagtccggctggcatgaaaatctgactttgcccagctcttttccttgatgcaggttcccagtgtggaaggaacctaaccagttctcggtgataactgaagctggaacgtgtgaattattaggaattctttgaagaactctgcattgagaattatttttatttagttttttttttttttaattgagagtatatagtccagtccaggtaccggaataaaaatatggagacaaggggaaaatattttacgaagctctgtgttctcaacgccctcatgaacttttcagtaggctgtctggtttatgtgtggtcaacttgaaaaactaattgaatctaggtctctgtattgttcctgtttctaccctgactgtttccgtcacaccaagcccttatctggggcgcgtcttcctgcccaggtggaacactggcattttgttgactgtcaggttaggtgtcccttagtcgtcatcagaagctgaagccttcctttccacaccctcatcagattcatctccactgataaccggtttccttgatgcagacatagtttagctttctttgactgcagagatgtctcattccacagacatttcttgaacccatttgatg

SEQ ID NO: 65104 - DNA, 878 bp, Homo sapiens
cggggtcacccaagcccttgtgcttgtcaagcgtcttcgttttcacaacatcttagattctttctttgaagcctaggcgttgatgggagctgtctggagcaggggtccccagcccccaggccgcagactgatactagtccatgacctgttgggaactgggctacacagcaggaggatctctaccaccagtcctatgaatgcgtttgtgtcctcttcgcctcagtcccagacttcaaggagttctactctgaatccaacatcaatcatgagggcctagagtgtctgaggctgctcaatgagataattgctgattttgatgagctgctctccaagcccaagttcagtggggtggagaagatcaagaccatcggcagcacctacatggcagccacaggcttaaatgccacctctggacaggatgcacaacaggatgctgaacggagctgcagccaccttggcactatggtggaatttgccgtggccctggggtctaagctggacgtcatcaacaagcattcattcaacaacttccgcctgcgagtggggttgaaccatggacccgtagtagctggagttattggggcccagaagccgcaatatgacatttggggcaacacagtgaacgtggccagccgcatggagagtacaggagtccttggcaaaatccaagtgactgaggagacagcatgggccctacagtccctgggctacacctgctacagccggggtgtcatcaaggtgaaaggcaaagggcagctctgcacctacttcctgaacacagacttgacacgaactggacctccttcagctaccctaggctgagattgcactcgccttctaagaacctcaataaagagactctggggtgtctggagccc

SEQ ID NO: 65105 - DNA, 433 bp, Homo sapiens
ctccagaaagggaaaacagcacggtgaaggggagcatcaaatctgtctggctacttctgcatgaaggaaatgaagggtcatgaaaaacttgtccatgggccagggtggaaggaatggtgggggaccagattccatcaagaggccccatgtaaatggaagttgctgttgcaggctggtattgggcttgcaaggtcatctataggtgaaatcattataatctagaagatataaacttaatgagagtggtaaaaaggcagggaccaaatagtaaaagaagaatgatgaggaataaaggtccaaggaatgggagaagccaagtgatttttggaaaccaaccagtaaaggttttggcccagttttgattactttgagaaagtatatgctagctcactttggctatcacttatttttgcatttcatgtccaatataatc

SEQ ID NO: 65106 - DNA, 1046 bp, Homo sapiens
ggcacgagttttcaaagactaagccaagtccaagactttggatttcattgatgtgcttctgctgaacaaggatgaagatgggaaggcattgtcagatgaggatataagaccagaggctgacaccttcatgtttggaggccatgacaccacggacagtggcctctcctgggtcctgttcaaccttgcgaggcacccagaataccacgagcgctgccgacaggaggtgcatgagcttctgaaggaccgcgatcctaaagagattgaatgggacgacctggcccagctgcccttcctgaccatgtgcgtgaaggagagcctgaggttacatcccccagctcccttcatctcccgatgctgcacccaggacattgttctcccagatggccgagtcatccccaaaggcattacctgcctcatcgatattataggggtccatcacaacccaactgtgtggccggatcctgaggtgctgccttccccattcaccaccaccacccccatcctctacttttgtgtgtgtgtgtgtgaattccaaggttcctagtggagggggcagggttttgatgaggaaaatccaacatcacctcaccccaaaacacacacaagtgtctctccaaggctgctggacataggaaatcccactggcaaaccttttttgtctcacctgcaggtctacgaccccttccgctttgacccagagaacagcaaggggaggtcacctctggcttttattcctttctccgcagggcccaggtaagagcgccctgtgtctgaggcagggatgggatgatgggtgcgggagttaaaaaaagggggacgttgcagatggtcccagttccagctctccttccctccattccttcacagtttatgggaaaacgtccatagaatggggatgagtagcgtcctagaggggtccgcggagtgctcaaaatccccttctccatctgctggtctgagctgggagctggagtcaggcccagtctccgggacatacaagcccacatgggagtcccaggcacgcttagtctttctctctctctctc

SEQ ID NO: 65107 - DNA, 596 bp, Homo sapiens
tttaacaccagactatcaccactttaattctcctccctggccctaactactgaattttttattaaagccataagctgcgatggaacctaacctctgtgccccttcaatgtggaacatgtggtcatcaaagaagatgtggggccggatcttcaccaagatgggacttttgggggctccagcaaggaaaagagcttcgtctatctctagaccccagcgtcgaagggtcttcagcacacgggcgcctgaactggctgcactcctagctgtaaccagccatcatccatggaaagtccagattagcctcctggatggatttgtgagaagcagagcctctcctccaagccagagaagccattgtgtaccagctcgccctattagcataccatgtgcccaggagtaaacagtgcccagagatgctctctgcaccacaccaccactgctggggtcggggagcggagttggtgatccaggaatgttttcctgtttcttcagtgcctctttcagtgatatgaagttaaaaccagggacacaggagagaattaagctgacaccaggagacacagctgacactggggagaagtggtgaagacagcatc

SEQ ID NO: 65108 - DNA, 1612 bp, Homo sapiens
gacaaatttagaggccatcccaaagggtttgcgtatatagagttctcagactaagagttagtgaggacttccttggccttaaatgagtccctatttagaggaaggcaaatcaaggtgatcccaaaacgaaccaacagaccaggcatcagcacaacagaccggggttttccacgagcccgctaccgcgcccggaccaccaactacaacagctcccgctctcgattctacagtggttttaacagcaggccccggggtcgcgtctacaggtcaggatagatgggctgctcctctttcccccgcctcccgtgagccccgtatgcttcctcctctctggtctgaggaacctccctccccccacccctccccgtggtcttcaggaactttgtctcctgcctgtgcaggttgaggaaggtagttgcaggccaggccagaaggccagcctcatcatcttttctgcagtagaaattggtgataagggctgcatccctcccttggttcaaagaggcttccacccccagccttttttttcttgggagttggtggcatttgaaggtgtttgcggacaaaactgggaggaacagggcctccaggcagtgaaagcactgcttggacatttgttacttttttcggagttagggagggattgaagactgaacctcccttggaagaataccagaggctagctagttgatcctccccaacagccttgtgggaggattttgagatacttattctttatttgagccagtcttgcaaggttaacttctcactgggcctagtgtggtgcccaggtttttgccttgcttcacttctgtctctacatttaaatagacgggttaggcatataaaccttggcttttcataagctctacctgcctatccccaggagttagggaggatctatttgtgatggcctagggtttaagagctgtggaggactgaaaactggataaaaagggggtccttttccttgcccctgtctctcactcagatgcgcttctttttcgccactgtttggcagttttctgttaagcccccctccccctgccccagttctccaggtgcgttactatttctgggatcatggggtcagttttaggacacttgaacacttcttttccccccttcccttcacagtaactggggcaggggcctacggggaggggcttgtactgaactatctagtgatcacgttaacacctaactctccttctttcttccaggggccgggctagagcgacatcatggtattccccttactaaaaaaagtgtgtattaggaggagagagaggaaaaaaagaggaaagaaggaaaaaaaaaaagaattaaaaaaaaaaaaaagaaaaccagaaaatgaccttgggggaaaaaaaatattttttaaaaaaaaaatatccgggggagggggggaaaatcccatacctaactgttgaggagggacctgctttggggagtagggaaaggcccagggaggggggcaggggcctgtttattcactctggggattcgccatggacacgtttaaactgcccaagctgttgcccatgtttccctgccccacttcacccccttgggggctgctcaagggtaggtggccgtgggtggtagaagt

SEQ ID NO: 65109 - DNA, 786 bp, Homo sapiens
ttttttttttttaagaccctcatcaatagatggagacatacagaaatagtcaaaccacatctacaaaatgccagtatcaggcggcggcttcgaagccaaagtgatgtttggatgtaaagtgaaatattagttggcggatgaagcagatagtgaggaaagttgagccaataatgacgtgaagtccgtggaagcctgtggctacaaaaaatgttgagccgtagatgccgtcggaaatggtgaagggagactcgaagtactctgaggcttgtaggagggtaaaatagagacccagtaaaattgtaataagcagtgcttgaattatttggtttcggttgttttctattagactatggtgagctcaggtgattgatactcctgatgcgagtaatacggatgtgtttaggagtgggacttctaggggatttagcggggtgatgcctgttgggggccagtgccctcctaattggggggtaggggctaggctggagtggtaaaaggctcagaaaaatcctgcgaagaaaaaaacttctgaggtaataaataggattatcccgtatcgaaggcctttttggacaggtggtgtgtggtggccttggtatgtgctttctcgtgttacatcgcgccatcattggtatatggttagtgtgttggttagtaggcctagtatgaggagcgttatggagtggaagtgaaatcacatggctaggccggaggtcattaggagggctgagagggcccctgttaggggtcatgggctgggttttactatatgataggcctcgtgcc

SEQ ID NO: 65110 - DNA, 2278 bp, Homo sapiens
  misc_feature (1)...(2278): n = a,t,c or g
ctatttggggacccccgggttttccccgtccccccgttgttaaaacccggcccgtgaaattaattttgggggccccaaaaaaaaagttttaccttgccaggccggggaagttaaattggatcctttaaaacggcccccccttttttttttttttataaggataagcaagcttttattccgtcaagagaacaaaggtcaggacttttatcctggtggggggatggggagtccagattccttctctgatgaggcaaaaaaagaatcaagactcctgttcaagtaaagggcagagggtgagagctagtactcttattctagaaaggaagtagatacttttctttgataaaggaatgaacggtagactcctagtttgcagaaaaggtgggaaagatgtgacttgtactttggtaaggagatagggaaggaattaaggctattactctgaagaaagttggggggccagggctcctatttttttgctgaggagatggaagatcagggcttgtattcaataagaatgggaggggccaggggatgcctggcaaaagccttgcactgtgaggtgcaggtagaggcttttattctggtgagaggacatggactctctctctcccctcaggtaactgtgccctgtaccagcggggaggctggtggtaccatgcctgtgcccactccaacctcaacggtgtgtggcaccacggcggccactaccgaagccgctaccaggatggtgtctactgggctgagtttcgtggtggggcatattctctcaggaaggccgccatgctcattcggcccctgaagctgtgactctgtgttcctctgtcccctaggccctagaggacattggtcagcaggagcccaagttgttctggccacaccttctttgtggctcagtgccaatgtgtcccacagaacttcccactgtggatctgtgaccctgggcgctgaaaatgggacccaggaatcccccccgtcaatatcttggcctcagatggctccccaaggtcattcatatctcggtttgagctcatatcttataataacacaaagtagccacagaccgtgtctggtttgtatctgcacctggcaggggtcactccctgggcccgccctcctcgtcctccacctcctcctcttcctcctcctcctccttcaggtcctccaggatgaggttgtccaggtcttccaggaggccaccctggctcaagcaggtggccacagtggagccactgctaatgtgagggttgctggggtggagcactttgggcaggtggttctgcttccggctcttggggtgagcacaggatgtcccaggcacgtggggctctcgccggttgtagcagtcggcagctgagcaggagtgagtgtgggtgctgcggcgatccgggtcccggtcccagcgcggggggaggatccgtgttggatacacggggaagccgcacccgtagcagggggacggggaccccatctgtgcccagcccctgggggcgggcagggctgtgagggtccgagggcgaggctgggccagggtggggccagggcagggaggggcagggctggggtagggcagggctgagggggagctgggggtcagcgccctcaccggaagttgtgccgacacttcgggcagtggaactcagccaggccccacatcttgtcagctggcactggctcgtagcgcttccggcatttccggcaccgggatacctccttccgctggggcacgcggcgccaccagacgtggtcgcaggaggagcaggcaaactgccggtccacagcagggataaggtcgtcctgggcacgttgaaacatgcgtaggttggcttctgtcagtggcaggagggaggtcgccactgcctgaatgtcccggtcctgcttcatatcttctggtggatcctgggcatccagatcgttacttagttcttggccatctttttgctttaccccgtacacgatggagcgccccactcccgtgtggtcgctgccgaatttcctcatcagagcccccgccttcttggaggataccttcccatgaaacttctcccggaggcgccggacgctcttctccagctccacaccttcctgagacatggtggcggcggcgcagttccccgcgagggtccgcactgcgcggctcagccgcccccctacctgggtgcgcccgtcggtccagcagccgcgcagggcagggggcggtgcctcggggccggctganttccncgncntggccagggtcatcaaaggtatcaaaacngcctctnctggtcatgctgct

SEQ ID NO: 65111 - DNA, 1307 bp, Homo sapiens
ggcggaattcagagagtgagaccctgtatcaataaagaaagaaagaaagaaaagaaacagaaataaacttaggacacagcagacggcccatcctgagggtaccacatagcagatgctgggaccttttttcaggtggacgccacatgacctttcctttgcaggcatccatgctgatgttcacaaggcacacagcatttcagctgaagaaagaactggcaggattttcatcacgaaagggcactgtctatcgtttatgaaaatgaagcatatgaagtaaaagtttggaaacagatggaattaaatcttctgacagattttaaaataagatctaaaaaagagcaagacatgctcttggatggggaaacttaatatcagaaaaatgtcaattttcccattttttccatataaatttaatgtaattcaaattccattaccaacagggtgattttttaaaaaactagataaaatgatctgaaagattatgcagcagaataaatgcccaagaattaccagggaagactggaaaaaagactgctgtgggggttttgccttcctggaaataagaccatactgcaaagtcactgtaatcagatcaatatggcattggcagaggactagacaatggaaaggaatggagaatacaaaaataagtttcaggatatatgagaatgagatatatgccaaaggtagtattttgattcggtgggagaagggcagactgtgaagtaagtggtaccagccacaactgaatatccatctgggataaaataaaattgcactcgtcttagagatccaaatcaacttcagatggattaaaactttgaatgtaaaaaacataaatgactaacagtcctgcaaaatatcttggagacaacctgtgccatctggagagtgggaagagcacatgcaaaggccaaggggtggagcagcccagcatgttctggaaaaggtagggctccccaaggctgggatgatggtggagacctgggtgtgtgggagcacaggggtgggggcccgtgggccaggaatgcacagagaggggctggtgctctgccgcaggcccaagcccccaaagcccggtcattcccagcaccatcttcacgggtttctgcccaggtctttctgctgcatctcttcctcccccgattccttaatcattttttttaaaatcagttcatgtctttgtaaaccaaattatttctaaaaggcaaatttatattactgccgaaatcaagggtcagtgagctagttgtgtatgttctgaatcacatggaaataaatgcatcgaacattaataaggaaaaaaa

SEQ ID NO: 65112 - DNA, 1020 bp, Homo sapiens
aatcgaacactgtaccaactggcggaattccaatccctgagcgctatgtggagctagatcccgaagagccacccagccttgaggagctgcaggcgcggtaccgcaaagccgagaagatccgcaacatcctcgcccggtcaagcatgtgcaacctacagccgacctcaggccaggaccagaacagtgtggctgacctggacttgcagctgcaggagcaggagcgcatcatcaacatctcctacgccctggcctccgaggcctcccagcgtagcaagcaggtggcagcccaggcagtgactgacccgtgacccagcatgcaaagaagcctggagccaggggcccagtggaaccagcttcctccaaggagatgacctttctgcccccaaggaaaccccttccagctgagcagggaatccggccggaggaaggagcagcttaccgactgcgggtgttcaccacaggccaggccctaatatgcacccactagtttagctcagactcctctctacatatgaatggcaaaggcacttttgatatacactgtaaaatacactgtattttagaatcggaatctattttctaatgttcccctcaagggctgagtggcaggaaggttgaggatgcaggactttgcagctgcacgtacagattcaggtacttctgggtgacaggtgttgtgggggcaggaagggcggggcaagccgaggctagtccaacttccaatgacctcaggagaaagtgagatttaaagaggtgttcccagtagactccagcaagaggctggttggcgtgctgtctgggagaagaggggcccttggctgcagagatcagctgtccctgacctgatgaccagctctgtgtgaaactccacgaggatcacacgtggagcccaagtctgtgccttgccccttgggtttggcttaagggcaacagtgtgttcaagaggactggggcccacaacctgcccccaggcttcctccagcaaaaggcttttttctttctgacagttctagatcgcga

SEQ ID NO: 65113 - DNA, 1095 bp, Homo sapiens
ggcctgcagcagctgtcggcgctgcagcctgagccgggcggggtcccgctgcactcgtcctggaccttctggctcgacagatccctccctggtgccacagcagctgagtgcgcatcaaatctgaagaaaatctacacagtacagacagtacagatattttggagtgtatacaataatatccctcctgtgactagcctgcctttgagatgtagttatcatttaatgagaggagagaggcgaccactttgggaagaggagagtaatgcaaagggtggcgtatggaagatgaaagtccccaaggacagcacgtccacagtttggaaagagttgctgttagcaaccatcggggaacagttcacagactgtgccgcagcagatgatgaagtaataggagttagtgtcagtgttcgggaccgagaagacgtcgtccaagtctggaatgtaaatgcctctttagtgggtgaagcgactgttttagaaaagatctatgaacttctgccccacataacttttaaagcagtattttataaaccccatgaagagcatcatgcttttgaaggtggacgtggaaaacactaattgcactctgtaaagaattctttgtcctttgctgattggttttggaaacggtcttaacaggagggagagtgaagagaagacttgccgaagccgatgctggtcaatttagagtgggtttctgtccttgcagatgggcaattaggactcaaagtggcaggtggggtggggggagattgtgtgggtttctaccgtcacattacttgctttttaaaaaaaacacacacaaaaaactttttttttggctttctaaaatctctgttcttttcactctgattttttttttttttgcccgtaaaaaatcctttatccccccaaataatggttttcaaccccccccttttattggggcccaaaaaagggggttccccttaaagaaccccggtggcccctattaaaggaaaaatgccaaatcgggaaaaaaccggttttgaaaaccccccttggccagggggaacccttacttggaaaaaactggttttttaatttttggtgggaacccttccttatgtccggggg

SEQ ID NO: 65114 - DNA, 934 bp, Homo sapiens
cgctcaagatccttaactgaatcccatctgcaaagtcctttgtgtcatcttgggtaacatatgcagagggtccagagattagggcatagtcagtacaggggacccttattccacctaccagagagggtccagatgaggactgggtgaggggacgcagggaaagggctggcccggcccctaggaggtaccaagtgctcagctagtagcacctgtcatgggatacagaaccggccagcaggcctttgaagccagggtcctagggtcacccaccccaacccttcctactcccttctgcactccagactctgaagaactggcggcttcagcagtacagccacgactcggcagacccaggcatcctcgtgctcctggcctgcgggaccatatccagcacctgcggccaaatagccccttacccgctggccctggtccggacccgcatgcaggcacaaggatttcatcatgttgcccaggctcatctcgaactcgtggggacaaggaattggccagccttcagcctcccaacgtgctgggattacagccggtggtcatgccatgagcaaccttatggagaggaccatgtggtaaggaactcagccaatagccatgtaactgagcttggaagaggatcttgctgtcctggccaacatctcactgcaattctatcagttgaattccctggatagtccaagctttgtggatccctccaccgaaacaactggatcccagtacctgaatcctgaatcttagactcttatacttcaaacactgatcacgggaacagccggctcagcggctcctgagttcctaatgctcagaatatgggtgagatgataaatgtttgttgtgttaagctgccaacctttggcgggggggtaattcgtcacatggcaacagctggctaatacatatatacctacatgtaaaaaaaaaa

SEQ ID NO: 65115 - DNA, 1567 bp, Homo sapiens
cccacgcgtccgctccaggctcctggagtgcctcatgctggctaagttctctctgggctcctccaggggttctgtgtgctcttggaggtccctctgctagtggtggctaactagagagtcagcaggggggtgactgggaaagagggagaggtgatgttgcctgctactcccctccttgcggaccctcataccacatgacgtggcggcgtggggccaggaactagggaaggcagaaggcgggcgcagtgggcagctctctgggctcagcttgctgagggggcctcctgtcctggctctttctgggagacctcattcttctgcccatgttcctgcctcacacattccccgtgatgaacgctgtgggcggggcccggcctgtgccctcagtcccacagctcctctagtgtacctgccccgtgggaaccccatgtggaaagagccctcagaactgacaggaatcagggacagaggcccttgctgtcagcctcctgggcacctgcacctgccaggcctctctttcttaccagcccagtgctgctgccaaaatccagggctatcccagctgcccgggaccccagttgagccgggatattttgtcttctggagatggctggtgggcaggcctcagtggtcatcatagggtctgcgggggtcctggggtgcaggtggggctcctcagggaagagccatagtctgtccccaagtcggaagggtaatcttcatcttctctcacaggagccacaaaccactgtggtacacaacgctacagatgggatcaagggctccacagagagctgcaacaccaccacagaagatgaggacctcaaagtgcgaaaacaggagatcattaagattacagaacagctgattgaagccatcaacaatggggactttgaggcctacacgaagatttgtgatccaggcctcacttcctttgagcctgaggcccttggtaacctcgtggaggggatggatttccataagttttactttgagaatcgtgagtgggttcgtgctgctgatatactcctgcctgcccctttacccctttgtctctgtctcctgctcaccttctcatcccagttgcccacttttcccttatttgaccttcgtgctgcactcctactctgtatgcttgtccccttgtgccccgatggttgtagacaggcacctttgaaggccctgctcctgagctccaagtgccattcattctgcagctgctttgtggcagtgccagtcaccacaatcaagctcacttatttcttgccgggcgcggtggcttacgcctgtaatcccaacactttgggaggctgaggctggcggatcacgaggtcaggagatcgaggccatcctggctaacacggtgaaaccccatctctactaaaaatacaaaaaattagccgggcgtggtggcggtgcctgtagtcccagctactcgggtggctgaggcaggagaatgatgtgaacctgggaggcagagcttgcagtgagccaagatcaggccactgcactccagcctgggcaacagagcaagactccatctcaaaaaaaaagaaaaaattattta

SEQ ID NO: 65116 - DNA, 1273 bp, Homo sapiens
cccagcccggcgaggtgtctaactgagtgtaaggtaaaatgctcaagggaagcggctgcccccccccccccgtttcaggagtccccccgccccccccgtcttcttccgttattgggccttttattatgtttgtgttggggtcctgtaaagaaaatatatatttattataaaataaagttagtttcatgaagagagtagaaaaataacactatgagctactaaaaaagttgtggaactcagtctccgaggattggggtgagaggctttcacatcactctggaaacccaccaacatgaggctctccgtgctcatgtgggacaggtatagcacagctcgtacagggagcatgtggctcaggtcctgcttgaagcccaaggagcctagatggtccacacgagatgctctggccacggtgatcaaggaggagaacttgaggtcagcaggggactggttctgagaaggggcaggatgggaataaccttgcccctccctatactggagtgtagaagagtctcttgggctgatggtcctggtttagaagatggtacccactggccttatgctgagttgcttgcccaaatgtctgtgctgaagaaaagccacacagcctttctcaggacaacttgccccaccaattctcactggtgtggctaaagtaccagaagcaatatgtgtggtgtcagcctgatgggctgctggctgaaattctgtacttcaaatcgtgtccatactggagaaagcagccaaggtgagcacctcaagtaaaagctctgagccacagaagaagagcaagatgccattcatgatggcttccaggcggagtacgtaggtctgcagcagcaggtaataggaggccatcatggcagatgggaaggtcaaggccacgctaatactgagtggcatctttcgctggcagaggtttccctttgtaccaaaaaacaggcgaattacttcaattccaagataaaggaggagcatcaccacatccagtactaggttagctgttggatatggtagcaggacacctttatacagaaatatgaaaagttccagcaggaaataggtagcattataccacccgttcagaaagaacaggatttccagcggggtggaggacaaccgtttacctccggaatctcacctcgcggcgccatcttcagtccccgtggcagcatacgctgccacaccggctcccggagcagcgcggcgctgccggaaacagggacgaagcggcctgggtttccggcccctctgcccgcccgggacactctgg

SEQ ID NO: 65117 - DNA, 728 bp, Homo sapiens
ctttccacaccatggtccaagggaagggctgccctgtctgaagagtcccgcccacttgtaggatgagacgtggaaaatattgttgctgtaacttaaaaaacaagaccaggggggttggctgggagcaccggccagcaggccctgctgagcataaaccccctccactggagaaggcgtggcccctgcccacctggacccttctggaaatgagggaagtgctaacagcagtgcccatcccacaagcattaaactcgggaggtggagactctccagcagaaagctgggcagcagagtggtcctgcccctcggcccacaaagggccttggccgagcatgggcatgcctggtgtgtgcccactggggtccatccctgccagtggggttccagggacctcggggaccgggctgcttgggcccttggactctaggtgagccgtgagagcgggctggggcaggcggagcagctgcctgcagggcagggacacggtcaggggctacctcccggacaccctggcctctccacaggcagctatccatgatgctgatgctggcgcagtcaaacccgcagctgttcgcgcttatgggcacccgggcaggcatcgccagggagctggagcgtgtggagcagcagtctcggctggagcagctgagtgcggcagagctgcagagcaggaaccagggccactgggctgactggctacaggcgtacagagcccggctgggacagga

SEQ ID NO: 65118 - DNA, 1397 bp, Homo sapiens
ggcacgagtgaaggcaggggcttccatcgttggcgtgaactgccgctttgggcccgagaccagcttgaagacgatggagctcatgaaggagggtcttgagtgggcagggctgaaagcgcacctcatggtgcagcctctggggttccacgcgcctgactgtggcaaagaggggtttgtggatctcccagaatatccctttggactggagtccagagttgccaccagatgggatattcaaaaatacgccagagaggcctacaacctgggggtcaggtacattggcgggtgctgtggatttgagccctaccacatcagggcaattgcagaggagctggccccagaaaggggctttttgccaccagcttcagaaaaacacggcagctggggaagtggtttggacatgcacaccaaaccctggattagagcaagggctcgaagggagtattgggagaatctgctgccagcttcaggcagacctttctgtccttcgctgtcaaagccagacttctaaggagtagtgaaagaaaaccctgaaataatcgaacaggaaaaagttgccctcaagcctgacctggaaccgttcctcaccttcatcctcaccatgccctgctatctccagctgctgagcagctgaggtgctgcagccccttcccttccagcccacaagtgtgtgcatattgagctcctgctgtggttaagcactgcaacagactctaccagagatgcaaagagaagcgagagaggcaccttgttctccaagaacttactgtccaatcatgctgtggtgcattcctttgaagatcatgaagaatagccaaacttgtctttgagggtgaatttgacactttaaaataatcagaagtcactgagacccaaagctagtgaataattcaagtgactaagctagatacttgaggatgatagagcaacactaaactaaagcaatgagtctgctttttttaatgatttatacaatgactccaaaggcaatcccaaagaaaagatgtaaagaatgttttgagcaatggtagcattattgaaataaatgtttaactatccaaagtgattactttcaaagatgatttttacttaaagatattaggtctggccaggcgaagtgactcacacctgcaatcccagcactttgggaggccgaggcgggcggatcacctgaggtcagcagttcaagaccagcctgaccaacatggtgaaaccctgtctctaccaaaatacaaaaattagccgggcatgatggcgggtgcctgtaatcccagctactcgggaggctgaggcaggagaatcgcttgaacccaggaggcggagcttgcagtgagccgagatcaggccattgcacttcagcctgggtgacagagtgagactccatctcaaaaaaaaaa

SEQ ID NO: 65119 - DNA, 830 bp, Homo sapiens
ttttttcacaaattataatattttattatagaaaaagggtgcccaaatacaggatttcgtaaacactggtaggtgaacaagtgcaattttaaaagtaaatacaaagtagaggcaaaacctacaagcattttgccttcagaagaaaatcgtaatgttctcctgcactagtgatcccacccagaacacaaatgtggctccatctcccatgaaagcatcatatttgctttctgagctcagtattcccatttcaataattgcaaagtgatggcaagaagtggcactgaatacattactacaaacccttgacttaaaatattgagacagggtcttgccctgtcatccaggctggagtgcagtagcatcatcatggctcactgcagcctcatcctcctgggctcaagcaatcatcctgtctcagcctcttgagtggctgggaccacaggtatgcactaccatgtccatgcctggctatttttttaattttttacgttgcccaggccagtctgaaactcctgacctcaagtgatcctcccaccttggcctcccaaagtgctgggattaccggcatgagccactgcacccagccaaaacctttaatttttttttttcttttttgagatggagtcttgaaaaacaaaaacgaaaacacaacctgagatggaccatgtgagcaggtgataccatcagggagtgctcagtgtgttctaaaaatcgcagtgtctggcacacagcaaaagcttcacaaatatacaccaaataaccaaggaaaataagtaacaaacattatgcctgcatgctaaataaattcacagataatcttcaaaataacc

SEQ ID NO: 65120 - DNA, 2919 bp, Homo sapiens
attaacctaggaaatacatgttatatgaacagtgttatttaagccttgtttatggccacagatttcaggagacaagtattatctttaaatctaaatgggtgcaattcattaatgaaaaaattacagcatctttttgcctttctggcccatacacagagggaagcatacgcacctcggatattctttgaggcttccagacctccatggtttactcccagatcacagcaagactgttctgaatacctcagatttctccttgacaggctccatgaagaagaaaagatcttgaaagttcaggcctcacacaagccttctgaaattctggaatgcagtgaaacttctttacaggaagtagctagtaaagcagcagtactaacagagacccctcgtacaagtgacggtgagaagactttaatagaaaaaatgtttggaggaaaactacgaactcacatacgttgtttgaactgcaggagtacctcacaaaaagcggaagcctttacagatctttcgcttgccttttggccttcctattctttggaatacatgtcatgtcctgactgcagccaatcacccagtatacaagatggtggtctaatgcaagcctctgtacccggtccttcagaagaaccagtagtttataatccaacaacagctgccttcatctgtgactcacttgtgaatgaaaaaaccataggcagtcctcctaatgagttttactgttctgaaaacacttctgtccctaacgaatctaacaagattcttgttaataaagatgtacctcagaaaccaggaggtgaaaccacaccttcagtaactgacttactaaattattttttggctccagagattcttactggtgataaccaatattattgtgaaaactgtgcctctctgcaaaatgctgagaaaactatgcaaatcacggaggaacctgaataccttattcttactctcctgagattttcatatgatcagaagtatcatgtgagaaggaaaattttagacaatgtatcactgccactggttttggagttgccagttaaaagaattacttctttctcttcattgtcagaaagttggtctgtagatgttgacttcactgatcttagtgagaaccttgctaaaaaattaaagccttcagggactgatgaagcttcctgcacaaaattggtgccctatctattaagttccgttgtggttcactctggtatatcctctgaaagtgggcattactattcttatgccagaaatatcacaagtacagactcttcatatcagatgtaccaccagtctgaggctctggcattagcatcctcccagagtcatttactagggagagatagtcccagtgcagtttttgaacaggatttggaaaataaggaaatgtcaaaagaatggtttttatttaatgacagtagagtgacatttacttcatttcagtcagtccagaaaattacgagcaggtttccaaaggacacagcttatgtgcttttgtataaaaaacagcatagtactaatggtttaagtggtaataacccaaccagtggactctggataaatggagacccacctctacagaaagaacttatggatgctataacaaaagacaataaactatatttacaggaacaagagttgaatgctcgagcccgggccctccaagctgcatctgcttcatgttcatttcggcccaatggatttgatgacaacgacccaccaggaagctgtggaccaactggtggagggggtggaggaggatttaatacagttggcagactcgtattttgatcctgagagagtccaaaatgcactggtcacgaaacgtctaatactatgactgttaaaatgtcagactataacaaatatctatcttttatttttcattagacccttatacttcaagagaacacactcagtgcttgtttttattttcttgacacatttattaacaaaatgcatcatggaaaaaaaatctacctcttaaaattcatttgcttttatggttagacatgcttgaccaaaaatgttcagaagaaaatatgtacctggtccctaattaagctgcgttaaatttggtagaagcatttaaatggtctatcttcagttttactgaacaaaaaatgtaatttatttagcattctttataaaagaattgatgctagaggtaaaaaaaaatacttgtttttaaaaaatcctttacgtcttgtgtaattaccccattattaaattcaagtccttgaaaatcaactagagattataaagtctctaaagaaggcaataacaaaatttatcaagatatagtacttttcagtttttgtttagtgtcttcagcatcactgtgtctgtatttcaagtacaaatgtttttaaaaaggattctttatacatatgtgctgaattgattttaagaaagttgcatgatcctgtaggagcaacatttttacctaaaaaatgctaactttatagtatttctaattgttcaaggattttaaaattctatttcagggagtatatcttctgtggttttgaaggaggtgagttctgtatgtgccttgcagtactgtaattcaaaaataggaatctttggctgcaaaattttaatgaaatgttaggaagtaattttcgtgctaacattaaaattataactttttgaaaggtaatagattttccagaagtaaaatctgatggttctaaatcaatcaatgtgatagttcatttttaactcttagaagaattcagaggaaattaacccagctaagtaaaaaatctgtcttgattttgttacttattcctcagaatattaaacattgatcacatatttttagagttttacatttgggttttttgtttgtttgtttcagtcatatgtttggcactgttgtttctattttcgtagttttagataaaatgttaaaatgcc

SEQ ID NO: 65121 - DNA, 789 bp, Homo sapiens
  misc_feature (1)...(789): n = a,t,c or g
gactgaggtaggagaatcccttgagcccgggaggcagaggttgcagtgagccgagaccacaccattgcactccagcctcggtgatagagtgagactccatctcaaaaatgatacagaagttatatcctttttttgtttttagacagtcttgctctgtcacccaggctggagtccagtggctcaatcacagttcactggctcgctgtagcctcaacctcctgggctcgagtgatcctgcagcctcagcctgctgagtagctgagactgcaggtgcacaccaccatggccggttgattttattactttagagccagggtctcactgtattaccaaggctggtcatgaatttgtaaaagattttcaaaggaaggaaggaatgacttacccagagtgagcaacagttttgggtaaactgatggcattcacactacttgtaatttcctcctaggtgtgatctgtgttttattttgcactttaaatgaagctaccttatcgagataagtcttccccatggtgtcataggctggcatcacagctttatggttaattgcagcccagattatacgaggtcccccatgccatgtagatgggatgccacttgtatgtagcatttccagtcactctctcctgacctttccccccagataatgaaggttctggaagcaaaaggcccaaggtggagtattcagaagaggagatgaagacccacatcagcaagggtacgctgcgcaagttccctgtgcccgtgttgaaataggcaaaacgggaataatgggtgcggnggcgtgt

SEQ ID NO: 65122 - DNA, 2314 bp, Homo sapiens
ggaattcgcgagaagcgctgcagttactgcaacttcaacaagtacatcccttttcgcctggattaggctgccatgcagaagtgtctggtgaccgaagctcatacgctgctgcggctcagcggggtgcaacgggtggagtctgtgttctttggtggggggacccccagtctagccagtccccacacggtggctgctgtcctggaggctgtggcacagacagcccacctgcctgcagacttggaagtcacattggaggctaatcctacttcagctccgggctccagactggcagagttcggggcagcaggggttaacaggttgtctataggcctccagtccctagatgacactgagctccggctgttgggacggacgcactcggcctgcgatgctctgcggacgctggcagaggcccggcgcctctttcccgggcgcgtgtctgtagacttgatgctggggctgccggcacagcaggtggggccgtggcttgggcagctgcaggaactgctgcaccactgtgatgaccacctctccctctaccagctgtccctggagcggggcaccgcactcttcgcccaggtgcagcggggtgcccttccagcccctgacccggagctcgcagctgagatgtaccagaggggccgggctgtccttcgggaggctggcttccaccagtatgaggtctccaactttgcccggaatggggcgctcagtacccacaattggacttactggcagtgtggtcagtaccttggcgttgggcctggggcccatggacgatttatgccccagggggctggaggccacacccgggaggctcggatccagacactggagcctgacaactggatgaaggaggtgatgctgtttggccatggcacccggaagcgtgtccccctgggcaggctggagctgctggaggaagttttggccctggggctacgcaccgatgtggggatcactcaccagcactggcagcagtttgagccccagctgaccctgtgggatgtgtttggagcgaacaaggaggtgcaggagctgctggagcggggcctactgcagctggatcacaggggtcttcggtgttcctgggagggtctggctgtgctggactctctcttgctgaccctcctgcctcagctccaagaagcctggcagcagagaaccccctcccctgtgccaggaggatgacaaaaatgttcctgtgttccagggtaatgccaggtgggttttgagagctgggtcggtactgcagacatctcttctccgttgtcgggtgccgtctctgctccttgtggttattgctcagccctggcatccccaggggaatggcagcagtgaggtagatgggaggacatttctggtcagggaactggcatcccattcagcatctcaggactcacaggccaacatgtgttccatggctgggaattgcctaccacccacatcagcttctgtttacctttttggcatcaaataatgaacagtgtttggaaatctttctacaggcaattacctccccaagagaagccttccttattttggagtaaggtcctaagatagctggatgaatcaggaaaaccatgtcccctctaggtattattaatataagcaggaagggatctactataggaatgaagtatttataaaccactgaaagggatagagaagtgaacattggagaaagccagtagcaactgtgagaaatcagcaacttgcaggaggcacagaaaactcctgctgatggtctcagcttccagcagcacaaaagcagatgatgtactggaaaatgctcagaagatgctacaaaacctcatgcctactgtctgccactgctggagaaggaatcatggtttctagaagtgcctctcattagtggactttaaagcaaatcctggctggcaggaaattctgaggaatatagctcttaggcttccagcctctaccatgcaggagagaacacagaaggactgatgtatgttggtggatccatgtatgtgtccagcacagcggcctgctggactctgagaactgggaaagatcagagcaagccttgcctcttatcttcgggaaaccagaatatgtttggggtggtaggagccacacagactcttctgagccccctcactcacttccttccccctgtgcctttcctttgagagtgaaggtgggtggagttgaccagagaaaggggagagaattcgggaaagacccaaagtgtttgtaattcttctttgtccttttacctacagaaatggtcacatggttctatttaaatagcctaataaacacatctggagcctgaaaaaaaaaa

SEQ ID NO: 65123 - DNA, 1860 bp, Homo sapiens
  misc_feature (1)...(1860): n = a,t,c or g
aacagggcatgctcttaaagcgaagtgggaaatggctgaagacatggaaaaagaaatacgtcaccctgtgttccaatggcatgctcacctattattcaagcttaggtgattatatgaagaatattcataaaaaagagattgaccttcagacatctaccatcaaagtcccaggaaagtggccatccctagccacatcggcctgcacacccatctccagctctaaaagcaatggcctatccaaggacatggacaccgggctgggtgactccatatgcttcagccccagtatctccagcaccaccagccccaagctcaacccgcccccctctcctcatgccaataaaaagaaacacctaaagaagaaaagcaccaacaactttatgattgtgtctgccactggccaaacgtggcactttgaagccacgacgtatgaggagcgggatgcctgggtccaagccatccagagccagatcctggccagcctgcagtcatgcgagagcagtaaaagcaagtcccagctgaccagccagagcgaggccatggccctgcagtcgatccaaaacatgcgtgggaacgcccactgtgtggactgtgagacccagaatcctaagtgggccagtttgaacttgggagtcctcatgtgtattgaatgctcaggtatccaccgcagtcttggcccccacctttcccgtgtgcgatctctggagctggatgactggccagttgagctcaggaaggttatgtcatctattgtcaatgacctagccaacagcatctgggaagggagcagccaggggcagacaaaaccctcagaaaagtccacgagggaagagaaggaacggtggatccgttccaaatatgaggagaagctctttctggccccactaccctgcactgagctgtccctgggccagcagctgctgcgggccaccgctgatgaggacctgcagacagccatcctgctgctggcacatggctcctgtgaggaggtgaacgagacctgtggggagggagacggctgcacggcgctccatctggcctgccgcaaggggaatgtggtcctggcgcagctcctgatctggtacggggtggacgtcatggcccgagatgcccacgggaacacagcgctgacctacgcccggcaggcctccagccaggagtgcatcaacgtgcttctgcagtacggctgccccgacgagtgtgtatagtatctgttttatttgactgcagtctccttggtgcaaaaacaaaatgggaaaaataaggataactcagaatttcaaaaggaaatcacaaattcagctaataatagcattttcagtacttttcgtaaactaagtaaatacacaaaatgttgatttttctgaccataagacgtattttatgtccttttgccaaggtggatttgttagtctcaggccctcctggccacattgcccaagtcacacaggcttctgtattatgtatttagataaaatgtgtgaaaatatatttgaaataaagttcataaatatgcattgatttttgtacaaaaaaaaaaaaaaggggggccctttttagagatcccttggggggcccaatttttccgggggttggcaagtttttatttttttctttttggggggcgtttttaaaccctctttgggttttttgggaaagaaccttttttttgggggggggacttattggcccaccctccctccaaattttaaggcttttggggaaaataaaaatttttaaggggtaaagggggaaaaccacccccctttccctggctgttaaaaatgnngnnnnnnnnnnnnanaaccccccctctcggggggggcaatggggcccccccctctttaaggagatagagct

SEQ ID NO: 65124 - DNA, 1955 bp, Homo sapiens
  misc_feature (1)...(1955): n = a,t,c or g
tttcgtgtttgatgctgggatcctcttgtggggggcgtctgtcaacgtcaccatttgggaagtgcgcagagctcagagcagcgcttccatgcttccttctgcttgggggcccctccagggagcttctttcttcttgctatctttttctttctgttttctctcctcttccccgcaccttgggaggcaggagacccacttggtggtgctggtaagtggaagccttggtgggtgggcaggggctgggctggggagggtggctgaaccggctgctgccacacctcgtgggggctgccgcgcaggatgcctctgcacacgggtcctgcagccttgcaagaggtgggcaggactggaaggagctgttcccacaggaggatgatgagggcgccccgtgcccagcagaggatgagctggccctgcaggacaacgggttcctgagcaagaatgaggtgctgcgcagcaaggtgtctcggctcacggagcggctccgcaagcgctaccccaccaacaacttcgggaactgcacgggctgctcggccaccttctcagtgctgaagaagaggcggagctgcagtaattgtggaaacagcttctgctctcgatgctgctccttcaaggtgcccaagtcctccatgggggccacagcccctgaagcccagagggagactgtgtttgtgtgtgcctcgtgtaaccagaccttgagcaagtgagaagagaggccagggtccaaccaggcacccgtccttgggaccagcagtagaccccccactctccccacccctggcccactgtggtgtgtgctgggcaaatgtggcctgaatgctaggtaggcttccccttccttcctcactctctccagctggattctggagctgttctccatccatgagagtggctggcaatggctgctctcaatcccttgagggagaagagcccctggagggcctggcatgtttgccctgctctgcctgggactgagcgagtggacttagggctgggcaggcagtagccaccagagggcagcagcgaactaggccaggcctgactggggtctgaagatcagggtcagtgtggctatgcctgggaattccagacctgaggttgggaaaagaggtttttctcctgcagggtactgggccaggccctcagcctcagagagcctgcagaagggcttgggagtgccacaccccatctctgctgattgaatgtccctccaggcaccaggatctcatcatttccccatcagagggtgtggccaggcctaacaagaccatgggtgcttctagaaacagggttgaagttcccagattccctgagaggagaatgtgtataggagggtttggctgagtccttcagcgttaagtggaggaaagcttggggaagccccaatagctggacagacctcagcctcccctcgaagacacctcaattcacagactctcagcccacacaatgccccagtgtccccagctccgctggagcagctgcagggcacttggatcacaacttctgcaccctctgtccagagtctagggcagtcctccactggcccagcactccagtttcctttccctgcctcttgtccaatggagtgggaggccaggtgagtggagcagaggtcctgaagcccttgacccctgggggcctgggtagtgtaggatctcgctgggctgggtcctggattccagggctattccctggaggacagtctcagttatgggataaggccccctgggggtctccatttctttccaacagtttcatgttcactactggactcttacgggctcagtatctctcccttagccatgagctggctcagggaatccctttcccttccctggaagcttgcctggctttctcaagtatttatttaattaattgcatggttcctggggaanatgttggcanaagtnatgggatgangaggaaatttggggttgggggtcttctaacta

SEQ ID NO: 65125 - DNA, 1524 bp, Homo sapiens
gaaatggtactcttttcatcatggtgatgcatatcaaagatcttgtgagtgattacaaagaatgatggttgtagaggaaacccttaccttggtaggaagcattactattaagggactgcttttttttttaggttactgaaaatggagctgacccaaatccatatgtcaaaacatacctacttccagataaccacaaaacatccaaacgtaaaaccaaaatttcacgaaaaacgaggaatccgacattcaatgaaatgcttgtatacagtggatatagcaaagaaaccctaagacagcgagaacttcaactaagtgtactcagtgcagaatctctgcgggagaattttttcttgggtggagtaaccctgcctttgaaagatttcaacttgagcaaagagacggttaaatggtatcagctgactgcggcaacatacttgtaaactagtgaatgtctgagctttggaagcatgaacagttataaacgtgcatgcatacatgcacacacacacagacacacacacacacacttgttaattttgtatagtatttttatacttggacagaacttataaagttaaatatacttgctgcatttcaacacatctgttggaccaacagtcacataactaacctttttgaatttttggaagccattgctgttttaaagtcattatgtagaatgctacaaaccctaaacttaatatatactaattcctgaaaaagactttgagacagtactatgtcagttcagccacctattttgcattgttttctataaggaggcaaagcatatgtgttttcctgttatgcaccttttatagcctttaccactgtgtaatgttcacaaacaccaaagtaaaggaaaaatgcaggatgttaccgtaaaatccagctgctattcatggagctgaaaaacaaagcacaaataatagatagctaagttaagaactactaagtagtttatagaagtagggaaaaacgtaatactgctttttattcatgtctttaaagcctttttcagaataagtgccaatcactgatgttgtaaataatggtgccttaactttatatgcttccctggcacttcgtttctgatttttttcctgatttgataaataattagtacatagttttcactcacttgcagcttactaaagacaagaaattatgtacatgtactaatgtttttcccacaaaaaaatcctttacttctgatgtatgaattagttatctaaatagttaagcctaatacctgaataagactcaccaatgtgattgtacaataaattctatcattccattaaaatcctacatttattcccaggaatggtaatttcacctccctacatctatactccactccctcagtaaataagtgaaaattgttaacccatgtgcccattcctgagtagggcagactcttcacaagaggcccatgacaagaattctagggtccagattgaactttaatatagacctttgtctgtgtagaccagtttgtcttgtaaactgtcttacttatgt

SEQ ID NO: 65126 - DNA, 1656 bp, Homo sapiens
cccgggtcgacgatttcgtgatggctgcggccgtggcggggatgctgcgagggggtctcctgccccaggcgggccggctgcctaccctccagactgtccgctatggctccaaggctgttacccgccaccgtcgtgtgatgcactttcagcggcagaagctgatggctgtgactgaatatatccccccgaaaccagccatccacccatcatgcctgccatctcctcccagccccccacaggaggagataggcctcatcaggcttctccgccgggagatagcagcagttttccaggacaaccgaatgatagccgtctgccagaatgtggctctgagtgcagaggacaagcttcttatgcgacaccagctgcggaaacacaagatcctgatgaaggtcttccccaaccaggtcctgaagcccttcctggaggattccaagtaccaaaatctgctgcccctttttgtggggcacaacatgctgctggtcagtgaagagcccaaggtcaaggagatggtacggatcttaaggactgtgccattcctgccgctgctaggtggctgcattgatgacaccatcctcagcaggcagggctttatcaactactccaagctccccagcctgcccctggtgcagggggagcttgtaggaggcctcacctgcctcacagcccagacccactccctgctccagcaccagcccctccagctgaccaccctgttggaccagtacatcagagagcaacgcgagaaggattctgtcatgtcggccaatgggaagccagatcctgacactgttccggactcgtagccagcctgtttagccagccctgcgcataaatacactctgcgttattggctgtgctctcctcaatgggacatgtggaagaacttggggtcggggagtgtgtttgtcacttggttttcactagtaatgatattgtcaggtatagggccacttggagatgcagaggattccatttcagatgtcagtcaccggctttgtccttagttttcccaacttgggacgtgataggagcaaagtctctccattctccaggtccaaggcagagatcctgaaaagatagggctattgtcccctgcctccttggtcactgcctcttgctgcacgggctcctgagcccacccccttggggcacaacctgccactgccacagtagctcaaccaagcagttgtgctgagaatggcacctggtgagagcctgctgtgtgccaggctttgtgctgagtgctgtacgtgtattagttcctttactgctgaccacattgtacccatttcacagagaaggagcagagaaattaagtggcttgctcaaggtcatgcagttagtaagtggcagaacagggacttgaaccaagccctctgctctgaagaccgcgtcctgaatttctacactagagcttcctcatcaggttacccagaagtgggtcccatccaccatccaggtgtgcttggatgttctccaccctcgaggtgtacgctgtgaaaagtttgggagcactgctttataataaaatgaaatatactacttcaaaaaaaaaaaaagggggggcccgttttaaaggacccctggggggcccaagtttaacgcgggcttgcaacgtaaaagttttccccttatggggagccgaataaaacc

SEQ ID NO: 65127 - DNA, 1399 bp, Homo sapiens
acgtggaattccccacacagactgggtgtagaagtgtaggtaaaaagtggactatggatagcttatgaaggatccaatttcttgggaagacaaatcctactcaggcctaatgagatcccaaactggacagcattcagcagatggaaaacaattggttccctccgtcctatgaagcagcctgcagtgtacatcagaataaagaaccgtgcccagggtgaatatctgacagtcactggaagtctagcagacaccagggcaacatctgtgtgcatttctccctatagtggaaagaatactcagatctggtactactgccgaggactctttaaatccaaggccagtgatacatgtcttgatgtgattggtggccgggacacacctggagctaaagtagctctatggactgaacatgggcaattcaggcagaagtggagactgaataaaaatggaactatcagctcttatctcagtgatcaacttgtccttgatgttaaaggaggaaattattgtgacaagactcatgtaattgtaaatcagcccctggagggagaagaaacacagaaatgggacattgaaatattgtgagagaatcaacatccctagaaagatccctagaaagagcaaagaaggaaacacatctgtcattgtcttgtggacgtggaaaggaagctactgtcctcacactcctggatcactgagcagaatgaacattttctccagcctctgagactatcgctcttaaccatggaaaagctcaaaatattcttgccattactcagtgttcctataaagaaaatattatgatatcttggaaaggttctattcctgatctccagctgtggtgagcaagtttcctgaagtgtttattttctctcatatccaccaaacgtgaatcctgttcctgatggcccgttattggacactggtgtaggctattatcctgtattatttattaatatcctacctagatgcttgtatgagtacaaagcataaagaaacagatttctataggtcaagtcatacttttgcaaacagatgatgagtaattttttagcaacacctgaaaatatactaaactttcctagataaactttaaggtttctatactgaggcttttataatgaacgcacctcgttaagtatttatacttgtaactaaccccaggcagggacctcagctttgttaggaataaggcacaagaagtattttctgtagctattgtttcctcagtccttcaaactaaaaaagtacaaataaataacctatggccaaacttgcactgttacgtgttaaccaagacatccctttaggtgacaagactctataacagtggttacctgtctccatgttgacacttcatcctagatttaaggagaggcatcaattttttttttttttg

SEQ ID NO: 65128 - DNA, 1129 bp, Homo sapiens
cccgcgagacgggtgcgcttacgccacggcgtctgctggcggccgcggagacgcagagtcttgagcagcgcggcaggcaccatgttcctgactgcgctcctctggcgcggccgcattcccggccgtcagtggatcgggaagcaccggcggccgcggttcgtgtcgttgcgcgccaagcagaacatgatccgccgcctggagatcgaggcggagaaccattactggctgagcatgccctacatgacccgggagcaggagcgcggccacgccgcggtgcgcaggagggaggccttcgaggccataaaggcggccgccacttccaagttccccccgcatagattcattgcggaccagctcgaccatctcaatgtcaccaagaaatggtcctaatcctgagtcgtcacccttggattttatggatcacggagctgaccatctttacctggtcctggaactgaaaaactgtagcttgtgtgaaaatgagcctttggaccagtctttattaaaacaaacaaacatgagtagtctgcatatcgaatatctagagctctaaaccccccaatacttaaaaggtctaattgcctgtcctgtggtttcattagtctgatacgaagatagggatttcctcagtcacagatgatattttgaaggaaagctggcaataaagccacaatgatttgaggtctttgcttaagtatgagatacttgatgggggctttatcatgcaacattagtttgcttaccttaagaattgcccaaaaatgaaagaaaatatgagcttttcagttaaacatactcctaaaaacattttccgggattttactactaaaattggacatttaagcgaagtaaaagaggccgggtgcggtggctcacgcctgtaatcccaacactttaggagtccaaggcgggcggatcacttgaggtcaggagttcaagaccagcttggccaaggtgataaaacccgtctctactaatacaaaaaaaattagctgggtatgttggtgcaggcttgcaatcccagctacttgggacgctgaggtgggaggatcgcctgaacctcagaggcagaggttgcaatgaagcggaggttgcagtgagccgagagcatgccgctgcactaccagcc

SEQ ID NO: 65129 - DNA, 831 bp, Homo sapiens
aaaagattacggcctgaggatagcttcatgagtgtttatccaatgcagactgaacatcatcaaacacctcttgattataacacgcaggtaacatggatgttagctcaaagacaacaagaggaagcaaggcaacagcaggagagagcagcaatgagctatgttaaactgcgaactaatcttcagcatgccattcggcgtggcacaagcctaatggaagatgatgaagagccaattgtggaagatgttatgatgtcctcagaagggaggattgaggatcttaatgagggaatggattttgacaccatggatatagatttgccaccatcaaagaacagacgagagagaacagaactgaagcctgatttctttgatccagcttcaattatggatgaatcagtaggtttaatttaaatgtaccctaggattgcaaaatcagaagtataggcagtctctcagtttgaggttgaagacctggggcagcatactgagaatagatgaaaacagctggatgtgagaaaaagaggcaggcaggcaggatttcagtgggaggggaagagagtgctgcaatagtgttgacagattagaaaagtacttttgaatcctggctgactgggacttgaatattaaggaatttggactgttcttccaggtttgtactgttcttcaatgggttgcccattgaaagattttaaataaggtaatggcatgatcagaattgtgtttcagaaagatttccttgacatttatggatgggacagaatgaatgaggggcgtcatataaaggcatggtgaaaaataatgagaacttgaccaaaggtcgacgcggccgcg

SEQ ID NO: 65130 - DNA, 458 bp, Homo sapiens
tccttttgttttcagaagtttctttgggggcaactacattatattcactgaggaagaggagcagctaagcaggaagatgatgaagtactgggccaactttgcgagaaatgggtgagacagcacacccctgcctcaacctccccgattgggggacttgtgcccatccagtgctctcctagtctggggtgacctcatgagcacacccgcatccttcatcacatgatggccccttccccagctccgggacccactcagacagggtgggggtgcgtggggcagtggacacgctctatctctccagtctacctggagggtgggcgccagtgctgtgccaccgtcagggcctccctctcagagagagggacacaacagagctggctggcctcccccaacccccactggtgcgtgcactaaccagagggagcttatttacttgttcttggagcgctcccactcac

SEQ ID NO: 65131 - DNA, 479 bp, Homo sapiens
ggaattcgcggcaggtgggacgagccccacagccccctcctcaaaaacgaccacctccaggactcagtgatccctggggggcaggctctgccagccctcggccacacgtggctccggcacccatggtcccagtgccttggatggagacggccagttctggcggccagatgtggtgctctggaatccagtcccatttccttcctggccacgcctgtccagcggcctcttcagccgcattcagcccctacttacctggggaccccggctggggcacgagagtaccaggggggtagggcccaaagggatcaggggaagcctctggcctggagggtatggggcacgcttccccaagggcggacccggcaggaggaagcccaggagctgggtcctgccgcccaggagctgggccctgccacccaggccgggctagggacatggcagggcctgggcatactgacgctggacttgagcgacctggg

SEQ ID NO: 65132 - DNA, 1029 bp, Homo sapiens
catttttctgcctattcactgtttttattttttagtgggaagataagtttttactctttttaatcagtagggtttggattttggagatggctgtcatattcaggtcagaggcagttgacttggtgctgatgcttgtttcagcttgtttctttccattttcctccagagtaaagaaaagattgaaaaactaaaactccaagctgaatccttctgccagcgtttggggaaataccggatgccctttgcctgggcacccataagcttatcaagcttcttcaatgtctccacccttgagagggaggtaactgatgtggactctgtggttgggagaagctcagtgggtgaacggaggacattggcccaatctagaaggctttctgaaagagccctctccttggaggaaaatggggttggatccaacttcaaaacctccactctgagcgttagcagctttttcaagcaggaaggagatcgccttagcgatgaagacttattcaagtttttagctgactacaaaagatcatcatccttacagagacgagtcaagtcaattccaggcttgctaagactggagatttctacagctccagagatcatcaattgctgtctgactcctgaaatgctgcccgtgaaaccctttcctgaaaaccggacacgcccgcacaaagagattttggaatttccaacacgagaagtatatgtccctcacactgtgtacaggtaagaaacacaggctcgggctgggcgtggtggcttacaccataatcccataactttgggaggccgaggcaggaggattgcttgagctcaggagtttgagaccagccttggcaacatggcaaaaccgtgtctctacaacatatacaaaatttagctgggcatggtggtgcatgcttgtaatcccagcaacttggcaggctgaggcaggagaatcgcttgaacccaggaggcagaggttgcagtgagccaagattgcactactgcactccagcctgggagacagaaccagactctgtctcaaaaaaaaaa

SEQ ID NO: 65133 - DNA, 1907 bp, Homo sapiens
attctgccacacctagcttgctttcataagcagatctgattccagatgtgatgcccccacaagccttgtttcatgatgacgatgagatggaaggcgatggagtcatagacccagggatggagtacgtcccaccccctgctgggtcagtagcttctgggccagtggttgggggcagaaagaaggtcagaggccctgaacagataaagcaggaggtagagagtgaggaggaaaaacccgacaggatggatattgacagtgaagacacagattcaaacacatctttgcaaacaagggctagagaaaagaggaagcctcagctggagaaggacacaaagccgaaagagcccaggtatactcccgtgagcatctacgaggaaaagctgctgctcaagaggctggaagcttgtcccggtgctgttgccatgactccggaagctcggagactgaaacgcaaactgattgtcagacaagcgaaaagggataggggattaccactttttgacttggatcaagttgttaatgctgctcttttgttagttgacgggatttatggagccaaagaaggaggaatttccagacttccagctggacaagccacgtacagaaccacctgtcaggacttcagaatccttgaccgataccagacttccttgccgtccaggaagggatttcgacaccagaccaccaagtttttgtatcgcttggtaggatcagaagatatggctgtggaccagagtattgtcagcccttatacctctcggatcttgaaaccttatatcaggcgtgattatgaaacaaagccacccaaactgcagctcctgtcacagattcgttcccacctgcacaggagcgaccctcactggacgccggagcccgacgcacctctcgattactgttatgtgcggccaaatcacatcccaacgatcaactccatgtgtcaggagtttttttggcctggcattgacctgtctgagtgtctgcagtacccagacttcagtgttgttgttctttataaaaaagtcatcattgcctttggcttcatggttcctgatgtgaaatacaatgaagcttacatttcatttctgttcgtccaccctgaatggagaagagcagggattgcaactttcatgatctatcatctgattcagacctgcatgggcaaggacgtaacccttcacgtctcagcaagcaaccccgctatgctactgtaccagaagtttggattcaagactgaagaatatgtattagatttctatgataaatattacccattggagagtacagagtgtaaacacgcattctttctgaggctccggcgctgatgcgaatacagctcacagagaaacgcatgtgctattggagaacaggtctttgtggagatctaaaggcagtgattgatttcacagggagctctaatctctgtgattacatggtccttcaaactcccaaccaaagtgagaaaagcggcatgcagtgaaatgagcagtgagcagccctttagcaaaatcgccctccagtccttcctggagatgccttcagccagcatcccagactccacagttatttatgaacgatgtcgtgattctccctccacctgacagtttgtaagagtgaaagagcatctaacctgatgctcttggagagagataacctgtctgtcataacttaaaggatgagaaaatgtggtgtagctattaaagattcatgcagtcccaaaaggcactgtcctgggatgatgagagattataaggtgatttcataaaaggaatccaaccctgtgcccggccattgatgtgttgtcattgaatccaggaggatttctagggcactgaagttttgttgtttcttttgctgactttggttacagtcagaaaaaataaactagatgtttgtgtctaaaaaaaaaa

SEQ ID NO: 65134 - DNA, 721 bp, Homo sapiens
ggaggcaggaggttacagatgttaacaaagtctctgaggtcattcaaggaaaagaagagagtccagcacaattttacaagggactatgtgaggcctatcgtatgtatactccctttgatcccaatagccctgaaaatcagcgcatgattaacatggctttagttagtcaaagcaccaaagatattagaagaaagcttcagaaacaggctgggtttgtgagtatgaatacttcacagttattaaaaatagccagtcagatgtttgtgagtagagatgtggcaggccgtaaagagagccgcaaagaaagcaagtgccaagcccggcaaaacacctatctgctagctgcagctattagaggagttcccccgaaggggccgaggaaggggggaccctgggaaaaacactcagtctgaccaacccatgcctgcagcataacccagtgtgcatactgtaaagaaacagcgcattggaaagacaagtgcccctagttaaaagagaaacaaaatggctctgagccagaggtttcaggcaaggatgaaggggccttgtttaatctagcagaagggttactggactgagggggaccgggctcaggtgcccccaatgagcccatggtcaagatgacagtcaggagcaaggacattgagtttcctgtcaatacttatcctgaacattcagtagtaaccaccccagtcacccccttcctacctccaagaataaa

SEQ ID NO: 65135 - DNA, 2019 bp, Homo sapiens
ctattttgttggttttgtttcggctagctagatagactatcagctgaacactctcttgaaggagttccagctaacagaggagaacactaagctccgatatctcacctgttctcttattgaagacatggccgccgcgtattttccagactgcatagtcagaccctttggctcctcagtcaacacttttgggaagttaggatgtgatttggacatgtttttggatctagatgaaaccagaaacctcagcgctcacaagatctcaggaaattttctgatggaatttcaagtgaaaaatgttccttcagaaagaattgcaactcagaagatcctgtctgtgttaggagagtgccttgaccactttggccctggctgtgtgggtgtgcaaaaaatattaaatgcccggtgtccgctcgtgaggttctcacaccaggcctccggatttcagtgtgatttgactacgaacaataggattgccttgacaagttccgaactcctttatatatatggtgccctagactcaagagtgagagccttggtgttcagtgtacggtgctgggctcgagcacattcactaacaagtagtattcctggtgcatggattacaaatttctcccttacaatgatggtcatcttttttctccagagaagatcaccccctattcttccaacactagattccttaaaaaccctagcagatgcagaagataaatgtgtaatagaaggcaacaactgcacatttgttcgtgacttgagtagaattaaaccttcacagaacacagaaacattagaattactactgaaggaattttttgagtattttggcaattttgctttcgataaaaattccataaatattcgacagggaagggagcaaaacaaacctgattcttctcctctgtacattcagaatccatttgaaacttctctcaacataagcaaaaatgtaagtcaaagccagctgcaaaaatttgtagatttggcccgagaaagtgcctggattttacaacaggaagatacagatcgaccttccatatcaagtaatcggccctgggggctggtatccctattgctaccatctgctccaaacagaaagtcctttaccaagaagaaaagcaataagtttgcaattgaaacagtcaaaaacttgctagaatctttaaaaggtaacagaacagaaaatttcacaaaaaccagtgggaagagaacaattagtactcagacatgatggctgctacattgtgtaaagaactgggcttagcctatcaaatggtctgtggacttacttggaaaaactgatttgaaactttcacagatctcagctttcatctgatgtcacttttcatgatcttctcattggcccccttaacctggtctgaagttctgggatgttttcagtttgatcagtctgatactcagtggcactttattaaaacatcagctgtggagtgtggcggtgcacacctgtagtcccagctgctcaggaggctgaggcaggaggatctcttgagcccaggattttgaatccatcgtggacaacatagcaagattccatctctaaaaaaaatgaaaataaacataagccacaaggaatgggtgaaagattattgtaatgtgctttaacgtaaataggtaaatatactaaacaaatgctaaaactcagttttaggatgaaaccattgttgatatccacatcagtccctgtttagaaaacatttaaaatgacttttagttatgtacagtacgttggcaatgaataccattaagcctcaaaatttggtagtgcccctcggaatatgtatatttgtatttttcaagcgaagttctcttattcacatataaattaaagtgggttggtactgatatcaaaaaatgtttatgtttttagaacagacatttcagtccctgcattcttaggtattccaaaccagatttgatgacatcaatagattgcattttaaaaatattgtttgatttttctattttcaaaaataaaattctgtttctaactaaaaaaaaaaa

SEQ ID NO: 65136 - DNA, 1657 bp, Homo sapiens
gcggaattccccctgcctgtcccaaggagctaattctgagcctgctccctttctaagcccagagtccagaatgtactctgcctcagcctctcacatcctccacaagcatggacatctggggcatgagaaggcagttatgtgaggctgtaagaaaggatgctgtgtctataaatgaatcccggtcctctcacacagcctgccccccgccctcaggacccccctgctaacctccatggcacctcaaagacaggccctgggcaggggtcctgagctgggtttcaacccctccccctaccatctgcttggcaagatgatcagaactctctgctctgcggctctgctccccagtcctgcctggagagtgggtggggctggggaggagcaggccgaggccagctggtggcgcccagtacctttgccactctgacttcagctgctggatgcgagcctcggactcctgtgtaggaagaagggacaaatacaagaaatactcatctcagaaattggtgttccagagtaggatctgctgtctgttagcgtctttgcttaaccacacccctgcccaaggtctcttgacccctgcagcaaaaatcaaactggcctccttgtcaaagccctcatgagtctcgtccatgtctgacacactgaggtatctgttcacccacactcagcacatgcacaccagcatgacaggccgctgtgccctggcacaccccagggagcccctgcacagctctccaactaaggggtcgggggtcaaacagagaagtcagaggagggcactcccctccccatgcaacacccaaacagtccctttggaagggccgaggggtccgaggtgaacatgttggatggggtcaggacccagtcacaggccctgagtgccgcaagcccgctgacctgggaggcccggacgatcttcttgaagaggtcttctgagtcttgctgatgctctgctctcagggcagacagttcttcctgtgagacgggagtgagaggacaggttggacagagccatgcttatagggaccctcatgactaggaagtggcggaactggaattcaaacaaggtctgtttgcttccagagccctggctctcagccttctctgaaccacgcaagactcccgcttcagctccactgcacacctctgcggtgtcaggtaccatgctggggctttctactcgcacagctcactatgggggtgggggagacacgatggcctccatcaaagaggaggaaactgaggcttagagaaggtgaggaggcctggcgtggtggctcacgcctgtaatcccaggactttgggaggccaaggcaggcagatcactagaggtcaggagttcgagaccagcctggccaacttggtaaaaccctgtctctactaaaaatacaaaattagctggatgtggtggtgcacgcctgtaatccagctactcgggaggctgagtgaggcaagagaatcgcttgaacctgggaggcacaggttgtagtgagtcgagatcacgccactgcactccaggctgggtgacagagtgagatattgtctcaaaaagaaaaaaaaaaaggaaaaaaggagaaggggagtacctgcaaaagggcaaagctgtctgatcccaaatgacacttgttctctctgctgctgggcaccttcacgc

SEQ ID NO: 65137 - DNA, 2053 bp, Homo sapiens
tttcgtcgtttccggtggcggcggaggctgcactgagcgggacctgcgagcagcgcgggcggcagcccgggggaagcgtccgggaccatgtctggagaactaccaccaaacattaacatcaaggaacctcgatgggatcaaagcactttcattggacgagccaatcatttcttcactgtaactgaccccaggaacattctgttaaccaacgaacaactcgagagtgcgagaaaaatagtacatgattacaggcaaggaattgttcctcctggtcttacagaaaatgaattgtggagagcaaagtacatctatgattcagcttttcatcctgacactggtgagaagatgattttgataggaagaatgtcagcccaggttcccatgaacatgaccatcacaggttgtatgatgacgttttacaggactacgccggctgtgctgttctggcagtggattaaccagtccttcaatgccgtcgtcaattacaccaacagaagtggagacgcacccctcactgtcaatgagttgggaacagcttacgtttctgcaacaactggtgccgtagcaacagctctaggactcaatgcattgaccaagcatgtctcaccactgataggacgttttgttccctttgctgccgtagctgctgctaattgcattaatattccattaatgaggcaaagggaactcaaagttggcattcccgtcacggatgagaatgggaaccgcttgggggagtcggcgaacgctgcgaaacaagccatcacgcaagttgtcgtgtccaggattctcatggcagcccctggcatggccatccctccattcattatgaacactttggaaaagaaagcctttttgaagaggttcccatggatgagtgcacccattcaagttgggttagttggcttctgtttggtgtttgctacacccctgtgttgtgccctgtttcctcagaaaagttccatgtctgtgacaagcttggaggccgagttgcaagctaagatccaagagagccatcctgaattgcgacgcgtgtacttcaataagggattgtaaagcagggaggaaacctctgcagctcattctgccactgcaaagctggtgtagccatgctggtgagaaaaatcctgttcaacctgggttctcccagttacggaaaccttttaaagatccacattagccttttagaataaagctgctactttaacagagcacctggcgtgggccaagtgcctgatactcccttacactgaatcatgttatgatttatagaaatacctttcctgtagcttttatagtcattgtttttcaaagacgatataccagccctcacccaggttttaaaaaaagcactggtaggcatagaataggtgctcagtatatggtcagtaaatgttctattgattatcaatcagtgaaaaaagaaatctgtttaaaatactgaattttcatctcactcccattgcaaatcaaggagatctcagcagtgaactgggaaaatacaaaagctctgggctaatctataaaaacttaccctgaaatattaagggcagtttgcttctagtttggggattgcgctagcccaatgaaggtgatgaagcttttggatttggagggtaaaagctccttcacaccccttccaaaagtcagtcacagaccactgcaacatgccttccctgctggatcattatatacattcagattgtgagtggattgccttggttgacttttaatttattgttttttgttcttataaagatgataatcttaccttgcagttattgactttatattcaattatttacatcaaataatgaaataactgaaatgtacaaatgtcaaattttggaagtatattcaataccaatgctgtatgagtgggctgaatccagttcattgttttttttttggtaagaagtgagactacagttccagctacctacatgtcttttcttgtcatccttatagatctctttggctttcagaaagatacagtgataatccgtgtatgaatcagtctcaatgaatttaaattagatattgaaaaaaaaaa

SEQ ID NO: 65138 - DNA, 397 bp, Homo sapiens
cccgagttgccctacaagcagagaagatgaatcatcacccggaatggttcaatgtataaaacaaggtccagataactctcacctcacgtaactgtggtggactgatcaaaagagatgtgaagctggccacgtttattgaaaaagcagcttcttctgtgtgatttcttccaaaatacatgtaaaatcttacacacatcttagctgcaacgtaggctgaaggcaatttacgtgaacaaattgagttgttcttaaggcatcatctctagaggcagaaaaaaaaataacaatttaagttatgtaaatttagtttgcctttatatactatgttttgtaaaatcagtgcttatatacaaaatgattaaacttgaaaaaaaaaaagtgagaccatgctagtggg

SEQ ID NO: 65139 - DNA, 2127 bp, Homo sapiens
cctgcctcagccttccaagtaactgggattacaggcatgtaccaccataccagctgatttttttgtatttttagtaaagacagggtttcaccatgttagccaggctgatcttgaactcctaaactcaagtgatctactcacctcagcctcccaaaatgctgggattacagatgtgaggcacctggcctcagatttttgatactcttaaaccttctgatccttagtttctctctccaaaatactctttctaggttaaaaaaaaaaaggctcttatatttggtgctatgtaaatgaaaatgttttttaggttttcttgatttaacaatagagacagggtctccctgtgttgcccaggctggtctcgaactcctgggctcaagagatcctcctgtctgggccctcgcaaagtgctaagtaggattacaggcgttagccaccacacccaggctgtaaaaatgtacttattctccagcctcttttgtataaaccatagtaagggatgggagtaatgatgttatctgtgaaaatagccaccatttacccgtaagacaaaacttgttaaagcctcctgagtctaacctagattacatcaggccctttttcacacacaaaaaaatcctttatgggatttaatggaatctgttgtttccccctaagttgaaaaacaactctaagacactttaaagtaccttcttggcctgggttacatggttcccagcctaggtttcagacttttgcttaaggccagttttagaaacccgtgaattcagaaaagttaattcagaaatttgataaacagaattgttatttaaaaactaactggaaagattgttaagttctttctgaattattcagaaattatgcatcattttccttcaagaatgacagggtcagcatgtggaattccaagatacctcttgacttcctctcaagctccgtgtttggtcagtggaggcccatccgagctcagcactgagaagtgttagtttctttgggacccatctaccctgaccacatcatgatgttcatctgcagctgttgcaaggtgttcagattgtataaacataaatgtcacaaaaactttaaaagaagtgcaattctcaaaaggttaggtggactaaagcattctgtaaagcaactgctaataatgagcttacagtggatttgaatttgaaaaatatagtaacaagcctgtcaaatatctgcaagaactatggaataaaactactgatgcagtgaagacagttgaaaagatcaaacaaatgccaagctatatttataatgaacaaattcaagaaaaaggactacggaaagttcaggacatcaaagaagtcaggcaaaactcatcttgacccctgttgcaggcaaaggaacgcagctggaagaaaagatgatataacagttaacaggatgcagacatggcagaggtttcctaaaaatctcattatctataaccatttctatatttacatttgaaaatctcctttggagacttagaacctctaaattattgacttattttttatataaggtcactccgatgaaaggtgattacaaaatcatctacattgctgtctacaaaacagataatatggatgtttgatcgcatctcattgttaactctttactgatatgtttgtaaatacagaagtgaaatgtggacataaaatagttacgctatttggttaatggtactagacaacatgtaattaatgacattcaaaaatttatggctagtgatatatataaagtaaaattttctttgcagtaaaatatgccctttattatagaagggaggatataaggaaccaacagtttgtatgaaaatagctcaaataatatcttttattttgattttaatatttcttattttggtttattagtgtcttagaacaaaatggccttatataatgaagcctagttatgctggactgttttgatctcttttaattgttctgacagatagttggggatgagagccgaataaggtttgcctgaaataactgacactatataatttctgctttggcaaatactaagttctaacttgtcattcctggtagaacaagctttatttttcgagcctagcaatgatctagaagcagatgttatctcagtgccttttgc

SEQ ID NO: 65140 - DNA, 478 bp, Homo sapiens
tttcgtcagagatagcagagcgccgagttggggccacgaaggcgtgaggggagtcgtcgtccctcctgcacgaaagcgtctaagccttggcgacgccgccctgggggacccacgtcaggcctgggatagggaccgctgtccccgggtccctaccaatgtcgcccgtcgctcccggcccagctctacccgcagagtctgatggcagcggccactctgaggacgccaactcaggtgagtgcggcgtcttcccgtcctcacacaccttcccccacccacgttctaaagccatcagtgaggggcgcctgctcgagtccccgctgcccagggtcggggacactgaggcgttcgtgggtggggccctttttttgacactgcgtgtgacgaggtgtgggagagcgtgacaggcggaggaaccggcgcgtgcaaaggttgaggcgcgactgagccaggagaattcggaaagctgttttctgcaggc

SEQ ID NO: 65141 - DNA, 841 bp, Homo sapiens
ttttttttttttacaaaatgtgtatattaatagctttgcacaaatattttaaagacaaattcagctagtctaagaacttcatgaaaataaaacaggtggataaatacttcatgtgcacaatgcactccatcagacgtcgtcggctgggagaggaggtatgttgatccttggccttgtgaagaatgctatcttctccctaaaggtctgcacttggatgggctctttgtggctctgcccacgcagctggtagatctccttggaggccttcttcagcatcttctcagccgcctgctcatgacggtagtcaagtttggtctgtcttgtctgccgctcggcctcccgcagcaggccacggagccgctcgtcccgaagcacccagggtgggaggtcagtctggccacggagctgggcgtcctccaaccgctgccgcagctcacggagggcgcagagctcctcattcagctgcctctgccgtgttctcgacgcctggagatccagctccaagtccagggaggtgcgggccatgagctcagccagggaagacctgcatgactgcaagagacgccagctgtgagccctcactcaggccttctagaaggttcttccacaattaataggagacaggtcaggcacacgtatttctctaagcacgcccaaggttaaaaaacacagatgtgggcaagagaaatgtaaatctctagttcagtatcaaggttagtaacagcaaattgtttttctttaatgatgacctatgtattggcagaaatgtgcagcaacagatgctcttatatggggctggcaggatcaaaaatggaacaatctttatgaagggccatttgag

SEQ ID NO: 65142 - DNA, 2109 bp, Homo sapiens
  misc_feature (1)...(2109): n = a,t,c or g
ctcactctgttgcccaggctggattgcagtggtgcgatctcggctcactgcaacctctgactcccgggttcaagcgattctcctacctcagcctcctgagtaactaggactacaggcgtgagccaccacaccctgctaatttttgtactttttagtagagatgggtgccgagaccagctccgtgtgcggagaccagctcggttgtggagaccctaacccagcgttgctagaggaattaaagacacacacacagaaatataaagtgtggagtgggaaatcagggggctgacagccttcagagctgagagcctcaaacagagttttacccacatatttattgacagcaagccagtgataagcattgtttctatagattatagattaactaaaatgggaaacaaagggatgggccaaaacaaaggtatgggccctggctagttatctgcagcaggagcatgtccttaaggcacagattacttatgctatggtttgtggttcaggaacccctttaagcggttttccgccctggggataggccagggtgttcctcgctctcattccggtaaaccacagccttcccancatgggcgttatggccaccatggaacatgtcacagcgctgcagaggattttgtttatgggccagttttgggggccagtttatgtccagatttggggggcctattccccagcatatcccccttcttgtttttgcagggcaataaaagcaaaggcagctttatcacggtgagctacttctcgcaggagtcaggatctgcatctgcagactacacaaagacaaacaacacagattaaaagcacaatcatcattgaaatcacagagcttccaagtgtttttatccattttaatgggttactagctgctaatttgtctgcagctccttcaagcactccagttcctggcattaaggtcaggtgtgcctgggatgctttaaatatttgttctttcaattttgcaatatccaaaaacaagtttgtagagtgtccttctagatgcttttttattctttcccaaattttgatcttattaagagctattaatagtttccacaaatccttatgtttagctcctacaaagggccatatcatttgaggttgaggtgccactacaccgccatggttccagataataggaattcttgccgtatttcttaccatttctaccatctgaccattttgttcagaccagctgaacatagtggggctgtggcacacagactgacaggtgcaattcaagctaaacatccccttaggggaccaatcaataatgattccataggaattgttgcacagcacctctgcctgttttgcaatgcaatcttcccaaacaaatacattcattatttctagccaggtccaattctgtttacaaataggtttttgagggcagtatacctcaattacaggagcagatttattatggtaaatacggagaccagaaagcatgtgtaactgtgtcatagagtgattacatccaggcattattgccagccaagattgataaatacgcccaataagtataattgtcctctgtgccagcccttgttgaaggaatactcatggcaatggtgatcaccactatcatagctatcattaaattactcattgtgactggttgtcccactttccttaggttttcttctgccatctgtgacagcttcttgatctgtccccaggtaggtggctgcgttcgatgggtgttgctcgtgacagttggggtccccctcagcgtcagtctcaacatggctgcaaccaggggatcctcgggatcctcccagaatctattcctcagcatcaggctcatgataaggtttcaggtgcctcgatgatatccaaattggcagttgatttggtccacggggattgcttaagagtactcaggtgtcctccagcttagttccacgttctccaaccgtcgctctggcgacccttcaacccaggttcgagccccatgtatggacaccacttgctgagaccagctcggttgtggagaccctaacccagtggcactggagcaactcagcactacctgcagcggcgcagctcctcgtgccgaattcgtgcagccggcgaagncgncgagtctcc

SEQ ID NO: 65143 - DNA, 358 bp, Homo sapiens
agtaaacacaattttagtatcttttatttcactaaattggaatgctgctattacaggacaaataaagacaggtgatgtggccacccaaacaccaccaacatagctctttagttagttatattgcaagctctaatgtattccactatatgaacacagtcagattctatttcttcatcaaaaagtgttgttggaagttgtcagatgtatttaaatatagaacccctattcaatggctaggagatgagagagcagcagagatggaaaagaaactttataaaagtattctgaaaatctgccccctttctccataatgttcatgtttctcatgctgagagtagctgtgtactttgggtgttgg

SEQ ID NO: 65144 - DNA, 1155 bp, Homo sapiens
  misc_feature (1)...(1155): n = a,t,c or g
gcggccgcgaagcgtgcgcaggctccggccgctgcgctgcagatggcggaaatggatccggtagccgagttcccccagcctcccggtgctgcgcgctgggctgaggcccttctgcgatgttttacctggctgcggctgtgtcagatttctatgttcctgtctctgaaatgcctgaacacaagatccagtcatctgggggcccactgcagataacaatgaagatggtgccaaaactgctttctcctttggttaaagattgggctcccaaagcatttataatttcctttaagttggagactgaccccgccattgtaattaatcgagctcggaaggctttggaaatttatcagcatcaagtggtggtggctaatatccttgagtcacgacagtcctttgtgtttattgtaaccaaagactcggaaaccaagttattgctatcagaggaagaaatagaaaaaggcgtagagatagaagagaagatagtggataatcttcagtctcgacacacagcttttataggtgacagaaactgaagtaaaaagcccttataggatcaaaaattgttcagggctcttagagatggtgaaaactacaaaaaaaaccatggctttcatatggacagataaaatgaaagaaagggaaaaggcagtggtgtgtaggcaaatatggtttggcatttgtcttttaatgacacctgatatgatgtcattttgattttgaaattgaacactagaactgttaatcacctttaaaaagaagagcttattgggaattatatattccttaaaatatacatgggggcctgaatgtcagccatctttatactatagaaaaaggattatggatgcatgaatggtcatgctttggagatcaaatattggttgaatgcctatgtatgtcaggccctgtgctgagccatgaggattaaaaagatgaataaacatatcttgtttaggaaatggatgtataaaaaaatcaagtgcaataaagtgtgtgtccaaaagctgacacaatggaaaggatgttttgttttgtttgaaatttatcaaatatagtagtaggaaagaaggatacctccctgaagatagattgtagaatggngagcttttcactgcatttactttttgcttcttattgtaaattcacctcatgttt

SEQ ID NO: 65145 - DNA, 1355 bp, Homo sapiens
tttcgtgcttgctgggatcatggcggggaatcactgcgagctcctgccgctggcccgtggcaggctcggggcggggttggggtggcttcttgtgcctcccttaaagcgcggggctcagcgtcctggcccagcgccccagcagcaggtccaagtgggtccggctctacagcggcggcacctacttcctcaccactgggcagacgccgctgtgtcaggacccgaaatccttcctgtacctcttgagccaggccgaccccgacccggactcggacaagacggagttttgttcttgttgcccaagctggagtacaatggcacaatcttggctcaccacaacctctgccacctgggttcaagcgagtctcctccttcagtctcctgagtagctgggattacaggcatgcaccaccacacacagctaagttttatatttttagtagagatggtttcaccatgttggccaggccagtctcaaactcctgacctcgtgatccgcccaccttggcctcccaaagtgctgggattacaggtgtgagccaccacacccagccaattagggctgtcttacaaaaaaaaaaaccaccacgaacctttgcgagaatcgagcgcagcctgtgctggttgtgtaagccgtgggacacacgggaaagccaggaagaagaggaagagcacccccacaccccacccgcgtgaagaagagcaaccccactccccgcccgtgggaagaagagcaccctcacgccgggcccgcaggaagaagagcacccccacgcccggcccgcagcatcccgctggcttcctggccacctctcctcacccatcttagaggcatggccgggctggggcatctttccctccttgggcaggatgaaacaggcgcctatttaatcgacagagaccccacctactttgggcctgtgctgaactacctgagacacggcaagctggtgattaacaaagacctcgcggaggaagatgataccacgagtcaacccaaaagttgctggggagaagttgctctttaatgaattgcatctcatgaatgtatcaggctgtgacctttctgcactctctaatgagttcatgaatttaggccaattatggccacaaatgctgctgctgtcacagagagatgccggataaagaacacccaccaccagtctctgaacagggaggggagaatcaactctgaatgtgatgtagtggccaggagagaggaccatgttcaacaacgccacacagatgcaaatgacttgtttcttcaacaaactgcaagggaaaaaataaaaatgggggaagctacagattaaaatacatgtgtttggataggagagtatttaatggcaaaaaaaaaa

SEQ ID NO: 65146 - DNA, 792 bp, Homo sapiens
cgtggtggaattcccagagtgcttagctcttgtgcaccgccctcaccccctgtactagctgatggataccaagtccactgaccggaagatgacactgcttcatttcatcgccttgacagagaaggagaaatacccagacctggctaacttctggcatgagctgcactttgttgagaaggctgcagcagtgtccctggagaacgtgctgctggacgtgaaggagctgggccggggcatggagctgattcggcgtgagtgcagcatccatgacaacagcgtcctccggaacttcctcagtaccaatgaaggcaaactagacaagctccagcgggacgccaagacggctgaggaggcctacaatgcagttgtgcgctactttggcgagagtcccaagactacacctccttctgtattcttcccagtatttgtccgattcattcgttcttacaaggaagcagaacaagagaatgaagcccgcaagaagcaggaggaggtaatgcgggagaagcagctggctcaggaagccaagaaactggatgccaagaccccatcccagcggaacaagtggcaacagcaggagttaatagcagagttgaggcggcgccaggccaaggaacaccggcctgttgatgatgtcctcgatggtaccatccttcccctcataaacaggccggtgttccttggcctggcgccgcctcaactctgctattaactcctgctgttgccacttgttccgctgggatggggtcttggcatccagtttcttggcttcctgagccagctgctacgaaa

SEQ ID NO: 65147 - DNA, 544 bp, Homo sapiens
gttgtttttcttctgtgggaggcaggtgcagtcccagcacccaaggtccctatcaagatgcaagtcaaacactggccctcagagcaggacccagagaaggcctggggcgcccgtgtggtggagcctccggagaaggacgaccagctggtggtgctgttccctgtccagaagccgaaactcttgaccaccgaggagaagccacgaggtcagggcaggggccccatccttccaggcaccaaggcctggatggagaccgaggacaccctgggccgtgtcctgagtcccgagcccgaccatgacagcctgtaccaccctccgcctgaggaggaccagggcgaggagaggccccggttgtgggtgatgccaaatcaccaggtgctcctgggaccggaggaagaccaagaccacatctaccacccccagtagggctccaggggccatcactgcccccgccctgtcccaaggcccaggctgttgggactgggaccctccctaccctgccccagctagacaaataaaccccagcaggccgggaaaaaaaaaa

SEQ ID NO: 65148 - DNA, 830 bp, Homo sapiens; identical to SEQ ID NO: 65119

SEQ ID NO: 65149 - DNA, 925 bp, Homo sapiens
gcggccgcacgctggagccctacccgttggtgatcgcgggggagcacaacatcccgtggctgctgagcctgcccggctcggggcgcctcgtggagggcgaggtctacgcggtagacgagcggatgctgcgctttctggatgacttcgagagttgcccggccctgtaccagcgcacggtgctgcgggtacagctgctggaggaccgggccccgggcgcagcaggagccgccagcgcccaccgcggtgcagtgcttcgtgtacagcagggccaccttcccgccggagtgggcccagctcccgcaccatgacagctacgactccgaggggccgcacgggctgcgctacaacccccgggagaacagataagggggacgggcagggtgggcctaggtttgagagccctggggctccaagatgcgcccagcccatgctgggtgaaggcggaagccgaacagggccctttccaatgaatctgccggaaaggaaccaatctttcagtggcagctgattttacaaataatgttgagatacgaatagcaaggtgcttccctcccatctttctacctggtaagaaaaatttaggattttaactcccctaaatgacatttagagaactcgtgttatgcctaattcttcttcctcctcgtgttgtttctgctgttggctctgctttgagctcaagataatatttaggatcagtgtaaagacttggtgttgccgctagattttagcagccctactatactgattctggcctgtaacccctgagaaagccgattttacacggctgggtagaatttgtagaaaagatccacagggcaagcatgctgtatatcagagtgcgtatagcaccattcttcctaattttcagatcaagcttcacagcaaatattaaagattatttaaatttgaacccacgcgtccg

SEQ ID NO: 65150 - DNA, 403 bp, Homo sapiens
aatacagtgggtggctgtggctgctgcgttggtggtggctgtgtttgtggctggggtggcacctgatgtggtggctgcagctgtggtggctgtggctgctgcagtggctgtggctgtgatggtggtggtggcggcggcggtggtggtggctgcggtggctgttgctgctgcaagggatccaacatgactcctgactttctaccattgatgcttgagctctcataagacaccacaccttcattcagtgaggaagaaatgctttcactctgggaattcacagcatcccaatctgacgttgtacccgtgtgacactgtttgtgagccccaagtttcaacgagctcttgcaagtaaacggacattcgtcacatttgtagacagctgtctttccagataagtggatgt

SEQ ID NO: 65151 - DNA, 898 bp, Homo sapiens
ttttttttttttccagcaggctaatttgtctgtttattcccacaaggtagccaggggtgggggcgccgagccaagcccagcaggccatgggaccttcctccggcggggtgcacgctggattttcgggtctgccccaccagcaggtttgcaggcaggccgtcatgagtgccggtggaaggctccgagggcgtgggcaggggctcgggcggggccacacacttgtggagctagaaatagtggggcaggtccttctctatcaccaggggctcctccatgggtccgtagcgcttcaccacgcagccgttcttgtcgatgaggaacttggtgaagttccacttgatggcatttcccaggatgcccttgcccttgggttggatcttcatccacttccacagcgggtgggcgtcgtccccgttcacgcagatcttgctgaacatatcgaatttgacgttgtagcccgcggcgaactctttgatctcttcgttactccctggctcctgcttcccgaactggttacacgggaaggccaggatccgcaaaccacactcagcgtatcgggcgtgcaggtcgacgagctgagtgtagtttacttcggtcttgcctcactgggaggccacgttggtgacgatgcacacgaagccccggtacttgtccaggttaaccatgtgcccgtcgatgtccttggcggaaaactcgtgcatggagcgcgcacagcgccagtcgtcccgggacgcgcacatggtcccggccaggccaggcgcggccagagccccacagagcagcgccggcttcagtaggcggcaaaggcggccgaggctcatcgcggcggggctgggagccagcggctcctcccctcgtccagccgaccaatggacgcgcgtcggctttccgcgcctcc

SEQ ID NO: 65152 - DNA, 1194 bp, Homo sapiens
acgtgcggaaccggtccggagttcccggcgggacccacgcgtacgctacgtgcgagcgtttgttcgcgtctttaccggccaggccaaggtcaaggcctcagccaggaagcaggcgctggtgttccagggtgtgggctgcggggccttccaccttcagcgtctcggcaaagcgtcaggagtccccagcggccgggccaagttctctgcagcctgtggtccccctgtgacccccgagtgtgaacactgtgggcaacgacaccagcttggtggccccatgtgggcagagcccatccatgacctggattttgtgggccgtgtcctggaggctgtgagcgctaaccccggccgcttccacacctcggagcggatccgaggggtcctgagcgtcatcactgaggagctcccggacgtgcctctgtactacaccctggaccagctgagcagcaccatccactgcaacacaccaagcctcctgcagttgcggtcggccctcctccacgctgacttccgggtctcactctcccacgcctgtaagaacgctgtgaagacggatgcccctgcctctgccctctgggacatcatgcgttgctgggagaaggaatgtccggtgaaacgggagcgactatcagagactagcccagcgttccgcattctcagtgtggagcccaggctgcaggccaacttcaccatccgggaagatgccaaccccagctcccgacagcgaggactcaagcgcttccaggctaacccggaggccaactggggtccccggcctcgtgcccggccagggtgagtggtggtaaggtgggggtggggctcagccagggaaagaaggggtaaagggcagatggggtcccacctactcctcccctcgcacaggggcaaggcggccgacgaagctatggaggagagacgcaggctgcttcagaacaagcggaaggagccgccggaagatgtggcccagcgggctgcccggctcaagacatttccttgcaagaggtttaaggagggcacctgtcaacgcggggaccagtgctgctactcccacagccccccgacacccagggtttctgctgatgctgcccctgactgtccagagacctccaaccagaccccccctggacctggggctgccgctgggccaggcatagactgaaccaataaagagatgtcacgtcaccttcaaaaaaaaaa

SEQ ID NO: 65153 - DNA, 986 bp, Homo sapiens
atcatcttttttgatacttttttaaaaagctcaaaatgaggaacataaaatactatcaagtaatcaacagaacattcaatgtgtataaagatttttttaaaaatacgtttaaaaagagagccagggaattcaatttacattttagaccatttaatggaggtatttgttgcacatgtggttttagtgtaacgtaaacacaacatctctccccagaaacacttaacctgagttggaaatgaaatatgaactgaagagattcttaattcacacatacacttctcctcaaaatattagcaatgattccaactgaggattctgcttgaagttcaggactcggtcccaggacaggaatgaaggaaaactccgtgcagttcgaacgctctgctgaagtcaaaggactgcacctgcgggctcttaatcagagctagcttcctcaaacacccgcggaacgaggtctggctgcgcaggcatttttgcttcacaccagcaggatagccaccaacataaatgggattgttggtgtccactgaggtagactgggtgtgtggactttcagcgccaactgcgttcccgtcaacaatcagagtgatacggtgtttgcttttgttagcttgaagagtgtgccattttccatcacagagcacagtggcggttttgggctcatatgcagctgttatcctgccagcaccattgttgacatggaacaagaccttgccgtccacaagctctagtccaatggcatccactttggcagtgctgatccccaggaggacgccattctgcgaggaggttcgaaactccagtgtgatgttcacatctgactggactttgtagccctctttgactgtaacacacaaggaggacccaagtcagggtgagcgctgccaggcccaggttgagcatttggcctcctggctaggggttgggggacctggctctagctcctcctttggatccagctgcatccccaccagcaggtcactcct

SEQ ID NO: 65154 - DNA, 445 bp, Homo sapiens
  misc_feature (1)...(445): n = a,t,c or g
ccggaattcccgggnacacgatttcgtgggcagatcacgaggtcaggagttcgagaccagtctggacaacatagtgaaaccccatctatactcaaaatacaaaaattagccgggtgtggtggcagatacctgtagtcccagcaactcaggaggccgaggcacgagaatcccttgaacccgggaggtggaggttgcagtgagctgagatcgtgccattgcactccagcctaggtgacagagtgagactctttaggatgccagtaaagatgggtattagcaacacatatccttttagaagagtcctttgtagactgaagaactgaaacctgaagaacagaagatctctggagcaccttctcctgcgctgatgggtacaaaactagtttctccagcagttctttgtgaagtgggtcggactcgagggcttcgtagaatgaaatgtcat

SEQ ID NO: 65155 - DNA, 1084 bp, Homo sapiens
tttcgtgcggaggagctgctcttggaggggaagaaggcgctgcaactcggtgagtgacctgcgatgtccgcgaccctcaaccttggcccaggtggatctgacgctctgtggtcagctttctcctcagtctcctctcctccggatcccaggatcctccagtgccctcagagtcgctgggggcttctgaagagcccttgagcctcctcaaaactttcagggccctccttagagccctcacctgtccctcgggctccgcaggcccacctggacctgcggtttcctcccacacttttccccacctcccaccttcttgggtggctccctcactgtcttcccttctctctgcagcccgcgagccgcgcctgggcctggacttaggatggaacccttccggagaaggctgtacgcagggcctcaaagacgtcccacccgagccgacccgagacatcctcgctttaaagagccttccccggggcttggcccttggcccctcactcgccaaggaacagcgcttgggggtctggtgtgtcggggaccccctgcagcccggcctgctgtgggggccgctggaagaggagtctgcctccaaggagaagggcgagggagtaaagccacggcaggaggagaacctgtcattaggcccatggggagacgtgtgtgcctgtgagcagagttctggctggactagcttggtacaacggggcaggctggagagtgagggaaatgtggccccagtgcggatcagcgagaggcttcatctgcaagtgtaccagctggtgctgccaggctctgaactgctgctgtggccccagcctttctctgagggcccaagtctcacccagcctgggctggacaaagaggcagctgtagcagtggagtctgctgtacagcaggaagtggcctcccctggggaggatgcagcagaaccttgcatagatcctggttcccagtcaccctctggcatccaggcagagaatatggtgagccctggacttaagttcccaacccaagaccgaatttccaaggatagccagccacttggcccattgcttcaggatggcgacgtggatgaggaatgcccggc

SEQ ID NO: 65156 - DNA, 1893 bp, Homo sapiens
cagcagcgcgcaggtcctcaccatagctctggtggccacctctgtcccgccatgctgctcaccgacagtggccagggcccacagcaccaagaggcttgggccacaaagtaaagggtcgcggagcctcgccggccgccatgtggagctgcagctggttcaacggcacagggctggtggaggagctgcctgcctgccaggacctgcagctggggctgtcactgttgtcgctgctgggcctggtggtgggcgtgccagtgggcctgtgctacaacgccctgctggtgctggccaacctacacagcaaggccagcatgaccatgccggacgtgtactttgtcaacatggcagtggcaggcctggtgctcagcgccctggcccctgtgcacctgctcggccccccgagctcccggtgggcgctgtggagtgtgggcggcgaagtccacgtggcactgcagatccccttcaatgtgtcctcactggtggccatgtactccaccgccctgctgagcctcgaccactacatcgagcgtgcactgccgcggacctacatggccagcgtgtacaacacgcggcacgtgtgcggcttcgtgtggggtggcgcgctgctgaccagcttctcctcgctgctcttctacatctgcagccatgtgtccacccgcgcgctagagtgcgccaagatgcagaacgcagaagctgccgacgccacgctggtgttcatcggctacgtggtgccagcactggccaccctctacgcgctggtgctactctcccgcgtccgcagggaggacacgcccctggaccgggacacgggccggctggagccctcggcacacaggctgctggtggccaccgtgtgcacgcagtttgggctctggacgccacactatctgatcctgctggggcacacggtcatcatctcgcgagggaagcccgtggatgcacactacctggggctactgcactttgtgaaggatttctccaaactcctggccttctccagcagctttgtgacaccacttctctaccgctacatgaaccagagcttccccagcaagctccaacggctgatgaaaaagctgccctgcggggaccggcactgctccccggaccacatgggggtgcagcaggtgctggcgtaggcggcccagccctcctggggagacgtgactctggtggacgcagagcacttagttaccctggacgctccccacatccttccagaaggagacgagctgctggaagagaagcaggaggggtgtttttcttgaagtttcctttttcccacaaatgccactcttgggccaaggctgtggtccccgtggctggcatctggcttgagtctccccgaggcctgtgcgtctcccaaacacgcagctcaaggtccacatccgcaaaagcctcctcgccttcagcctcctcagcattcagtttgtcaatgaagtgatgaaagcttagagccagtatttatactttgtggttaaaatacttgattcccccttgtttgttttacaaaaacagatgtttcctagaaaaatgacaaatagtaaaatgaacaaaaccctacgaaagaatggcaacagccagggtggccgggccctgccagtgggcggcgtgtgctagcaaggcctgccgggtgtgccgcagtcaccacagggttctgagaacatttcacagaagtgcctgagacgcggagacatggctggtgttaaatggagctattcaatagcagtgacgcgctctcctcagccaccaaatgtccctgacaccctccccagcccccacagataacatcagctgaggtttttttcagtatgaacctgtcctaaatcaattcctcaaagtgtgcacaaaactaaagaatataaataaaccaaagaaaggtgaaaaaaaaaa

SEQ ID NO: 65157 - DNA, 1341 bp, Homo sapiens
  misc_feature (1)...(1341): n = a,t,c or g
gaagccaccagtgcctcccaagcccaagctcaagtccccgctggggaaggggccggtgaccttcagggacccgctgctgaagcagtcctcggacagcgagctcatggcccagcagcaccacgccgcctctgccgggctggcctctgccgccgggcctgcccgccctcgctacctcttccagagaaggtccaagctatggggggaccccgtggagagccgggggctccctgggcctgaagacgacaaaccaactgtgatcagtgagctcagctcccgcctgcagcagctgaacaaggacacgcgttccctgggggaggaaccagttggtggcctgggcagcctgctggaccctgccaagaagtcgcccatcgcagcagctcggtgagcagggcggtgcggggagggatccgtgccttgtccgtggccccgtctgtcattcctcttgtctgttctctggctctcctgttcctccttgttctgttccattccttctgtggcaacccccaacccgcccccgccatccacctctgaatctggtcttgcttggcctgcccgagagaggaggttcttctgggcgtctgacacgtcagggttgctgctcactgtgtccctgttggtgccagaagtgggagctgggctcccctcagagactcaggttgggcatgaggcgcctccatggccctcctggaggctcttggccccagggattcctgtgagttctctctctccctcccgacacaggctgtctttaccattaagggttgttttgtgttttactttggaggtacgcctccctcctcccatcctctctgtggccatgtggctgcccagtgtggctgataccctctgccttacagctgcctcctgccttgcttcctctggcggcttggagcacactgactccttttcttttgggggatctgccactaactccctatttcccatcccagaaacatttgtctcttggcaccaccttagaatcccttaaacatggattcccgtgtgtcatttctaaagtgcagtaagaagatagatggaagtcacgccatctccctgcactccatctgccctcttgccttctccccaccacttccccgtctgtcctgcccctgcccagaaggatctgagcaggggcctggcttgctgctgaggctgtcacagctgccagagccctgggctgatcccataggtctttccttgaggacccgactcccaaggctccttccaaagaggagcccttcgggcccgtgggctgcatggatgctggcggcagagctggtcatcccccacccgcccccntgtctgcctttntaaaagctgctttgccttctgtgcccctaa

SEQ ID NO: 65158 - DNA, 1904 bp, Homo sapiens
cccaggcaaggaggtgctggggatggggaatgttcacaggtgaacaacagcagtggtttttcaacttctttttcatcagcagaaactatttacaaacagggtttcatatggacccccaatatagaagtcagataagggactgaaccagggactgggggcccagggccctagggctcagcctcctcctcagcccacgaagccatgtgactgctgggctggggatcgaaggcagagcctggttctgaagcctagagctggaagctggctgagaaggtctgggaagcccagctccctggattcccctcgccccctcagtgctccgtgcggtgcggccggggccagagaagccggcaggttcgctgtgttgggaacaacggtgatgaagtgagcgagcaggagtgtgcgtcaggccccccacagccccccagcagagaggcctgtgacatggggccctgtactactgcctggttccacagcgactggagctccaagtgctcagccgagtgtgggacgggaatccagcggcgctctgtggtctgccttgggagtggggcagccctcgggccaggccagggggaagcaggagcaggaactgggcagagctgtccaacaggaagccggccccctgacatgcgcgcctgcagcctggggccctgtgagagaacttggcgctggtacacagggccctggggtgagtgctcctccgaatgtggctctggcacacagcgtagagacatcatctgtgtatccaaactggggacggagttcaacgtgacttctccgagcaactgttctcacctccccaggccccctgccctgcagccctgtcaagggcaggcctgccaggaccgatggttttccacgccctggagcccatgttctcgctcctgccaagggggaacgcagacacgggaggtccagtgcctgagcaccaaccagaccctcagcacccgatgccctcctcaactgcggccctccaggaagcgcccctgtaacagccaaccctgcagccagcgccctgatgatcaatgcaaggacagctctccacattgccccctggtggtacaggcccggctctgcgtctacccctactacacagccacctgttgccgctcttgcgcacatgtcctggagcggtctccccaggatccctcctgaaaggggtccggggcaccttcacggttttctgtgccaccatcggtcacccattgatcggcccactctgaaccccctggctctccagcctgtcccagtctcagcagggatgtcctccaggtgacagagggtggcaaggtgactgacacaaagtgactttcagggctgtggtcaggcccatgtggtggtgtgatgggtgtgtgcacatatgcctcaggtgtgcttttgggactgcatggatatgtgtgtgctcaaacgtgtatcacttttcaaaaagaggttacacagactgagaaggacaagacctgtttccttgagactttcctaggtggaaaggaaagcaagtctgcagttccttgctaatctgagctacttagagtgtggtctccccaccaactccagttttgtgccctaagcctcatttctcatgttcagacctcacatcttctaagccgccctgtgtctctgaccccttctcatttgcctagtatctctgcccctgcctccctaattagctagggctggggtcagccactgccaatcctgccttactcaggaaggcaggaggaaagagactgcctctccagagcaaggcccagctgggcagagggtgaaaaagagaaatgtgagcatccgctcccccaccaccccgcccagcccctagccccactccctgcctcctgaaatggttcccacccagaactaatttattttttattaaagatggtcatgacaaatgaaaaaaaaaa

SEQ ID NO: 65159 - DNA, 1409 bp, Homo sapiens
tttttaagtttgttttggaaataacagaaaagatatttattggccaggaagttggtgctgctaagaccgagaaatttaaagaatcggacagatggacgcagagaaccagagggcaatgtgggaccttctcttgccatggcctcaggtcttgagggaaggctcgggcctaggtttctggactgcaaaggggacccccaggtgggaggggcaggaagcagccggagtgagcccttcgcccctgagtgcctggctcgcacctctcgagctgtgccctgggcatcactgagcagaggggtgcggcagcttcaggaggcagaaacgagaggggtgggagatccacaggaccaaagggtgcagtgatgggctgggtggcgggcccagggaaatggggtggggatgggctgggtaagacctggccctcccctgctgccctgaagaccaccccagtctacctcggtgctggccaggaaacctttcggctacctctcccaccatcccagactgtgggcagggggatggggagggagtgggcctggatctgggacctccctccagaatttcctccagatgggggcagtgcccagggaggggttatttgtcttccctgccatggagtgggaatccccagccgaggccctaggcccctcagcagggaagggatccccggggaggcaggtcccaggagcagaccctgcccccagcccccacagacacaccccaatctgaaagccatgcgtgtcggtgtatataggaaccatgtacagagcccagagaagccccctacatccccccgggaaaaaaaagaaaactagacagaaactcatctatatattctgtatctggagttccgttttgaatattaactgtgttatttttatacactttttaagccttaactcgccattgatttaccagtttaacgtttcctggggtttctttgcccatggggttctctgcccccacccccggccctttgtttgacttgcgtcgtctgatactcagtattgtagctttttgtccgcatgttactccctgtaaatacgctgttatacatactgttaacacccctttgctttttctatgggacctccaggccaccatatttagaactagttaccttattaaaaaagaaaaaacagtctgttggcttctcagtctgcatcttggaggcagggaggtgagggcaggtgcccctcagacacttcaggaaggtagtttgcattctatttaaaaaagggagtggggagcaaatgaaaatcaaatgtggggggaaaacactaaagggggcaagaaacaaaggaattacaaaccctctgctctttgtatttctctgttgtgaagaataaactgtacctgcacccggaaaaaaaaaaaaaagggggggccgttttagaggacccaagcttacg

SEQ ID NO: 65160 - DNA, 792 bp, Homo sapiens
cagatgggaggatgcctggctgtgcccgaggcgagtgggcattggccatcaggacaggagagaggtggtgtccagtggagacatccacgtagccctgcaggccctcagcccccaggaccacctcagtttgggcattgcccctcccctcccactggggtgcgagtgaccaggagtgacccagctggggacaggcgggaggcaggacagctctggaggggccccaaggctcccgccccccatgggggcccagcagcgactccatcccccgagtcctcccggacaccccggcacctggggagaggcggaggaaggcaggaaccccagctgctcccagggtggcagccgtgggcggaggctctgctgcaggatccgggaggcccagagaaggcacctgcatttcacgctgagcgcatctgaggatgcgatcaggaagcagccccggcactctctctttatggatgcccacttccagtttaaccgtggcatcccgggggcaagggcgccctccaagctgtgcttcactaattccctcagggtttggaactatttgcccagttcccacgatgggcctttaagctctcgtccttcctaacctaaggcaacttcaaccatctgataaatctaataataagttacaatcgaggccgggcacagtggtctgtaatcccagcaccgtgggaggctgaggtggaaggattgcttgagcctgggaggtggaggctgcagtgagccatgacagtgccactccactccggcctgggcaagacagcaagaccctgtttaaaaaaaaaa

SEQ ID NO: 65161 - DNA, 2337 bp, Homo sapiens
ttttttttaaaaggaaggaaaatattttattaaaagttttttaaagtttatgaattgaagtctatgaaaacaaactacttgatacaaaaacattcagatattagatgtcaaaataaatcagcacatttgaaaatactataaattatatttcaaacaaatatatacacattatgttaaccttcaacaggatccattatcactacttagaacactgatatgtttatctcttaagtatgtaaaaattacatagctgttaactttgtatggcaattcacctataacacatttaagaaagcattacaaaattcattatatgataattctacaaaagttttctcacatttaccaaagcctactaaagtccagagggcacaaatattggccaaatagttcttttatcttaggacataaagatgtttttgctgttttttagaaccattaagatggctaagagaaccaacttttacgggagcttagctgttctcaggcatctgaatgggggtgtggagaagtcctcaagttacaagaatcacagttacttttttaggatgaaaaaataaaaacattgcatttgatgacattacagtcaaaatgagctctaatacaaatgtatgtggagaggttttgaagaataaatcggatatcccaggggaggttctgctgcttgtaccgtaagatttcttaaaagtagtggatgagcttgtatactataacgttcttcatcatcgtttgtggcataaagtaattcccatgaaagattggcccactgacctctaacagcttcaggatttaactttcccacttggatcaataattcttgaaggctaagcactctcccagtgtaaattcccatattagaatcataccccagagaaaacaagtatggcttttcttgtaaaattgcttccttccacttttcatcagataccaaaccaatgtaccagtcacgttcatattcttcaaggtacttaatcagttctctaaagtcttctattggacctaaacttgctttatcaatcattagtttcagagtatacctgaatgctttcagtgctagttgaaacagttctggcttttctgtgagccagtccaaagcaacagaccaaggcaaaacaccaccgtaaactctcaatatatgaccaggactaggagccatattgtctattccaaataaactaaaataacaagtcattactgtatgaacataaaagtcttttaaaactttgtccttggcaatttcttccagtacatttgaggccttctcttctgaatgataacattccaactgccttagaacaaattggtaccagtcttctggaaataacgagctcatctccttcattttggaactgggcatacagctagtcctccactctgcgggtaagcatactaagtgagaatgtgaacaactgaactccatgagaggaatatatggcatgtcctcttgttttcctttgtcaacagcagggtatcctaatagaactgctttgtaaagatcgttttcaggaacagtgcctgtagaatgatcaccaaccctctgtgattctactgatcctggaataaacaaatttgtacctggcaaatctttcaactgatgtttttcttctattacttttttgatagttggctcatcatcaaaaatattatcatcagaccagtcattaaaagtttctgaatttaaactgtctatgtcttctggggatttgggaggtggcaaagtgttcaaagcaggcaacattagaggtgctttccctttattttcagtgttgtgaacattctctttcatgccaggccttttggagcagtattgaacaagtatccacacaagtactttaatgaggtcacctttaaattcttttaagttttcatgagaatcaattatgcctgatagaacattcctggcatcagaatacaatttcacaggcaaaacagtacagggtgtcaagacatttccaaagtgttcattaagggaacatactcttgtgtattcttgctcaaaagcatcttcaaaaacttcatcaactctgcgagcttctgcagtatgacaggatgtttcctgcaattctaaccccttaatgttaatagagcagtaagtatagccacattccagaatcattatccacattaaacgatcctgaaaacggcccaagtaatgagatccaggtaggaggagacctaaacttccagctgccattgcagtctgcagtacagcagtcaacctgggcaccatttggtagtagtacactgtatctgcacacacacaggctgtggtgcctgctgctcctggccaactcagtaagagtctgagtcctgtatccaggcttctgttccaccata

SEQ ID NO: 65162 - DNA, 2464 bp, Homo sapiens
  misc_feature (1)...(2464): n = a,t,c or g
gagttttgggtccacggataaaacgtgtctcctttgtctctaccagaaaatgaaaggaattgaaattaagagaagggagagattgaagggtggtgcaaagattgaaaggagaaagtggttgagggatagtgagagaggttggagaagagagtaagaagaggctgcttacccaatttgaaattggtgagatgttccttgggctggtcggtctgaggacctgaggtcataggtggatctttctcacggagcaaagaacaggaggacaggggattgatctcccaagggaggtcccccgatccgagtcacggcaccaaatttcatgcgccacatttcatgcgcgtccgtgtgaagagaccaccaaacaggctttgtgtgagcaacatggctgtttatttcacctgggtgcaggcgggctgagtccgaaaagagagtcagcgaagggagataggggtggggccgttttataggatttgggaaggtaatggaaaattacagtcaaagggggttgttctctggtgggcaggggcgggggtcacaaggtgctccaaggtgctcagtgggggagcttctgagccaggatgagccaggagaaggaaattcacagggttaatcactcagttaaggtggggcaggaacaaatcacaatggtggaatgtcatcagttaaggcggggcagggccttttcacttcttttgtgattcttcagttacttcaggccatctgggcgtatacatgcaagtcacaggggatgcgatggcttggcttgggctcagaggcctgacattcctgccttcttatattaataagaaaaataaaacaaaatagtgttgaagtgttggggcggcgaaaatttttggggggtggtatggagagagaatgggcgatgtttctcagggctgcttcaagcgggattaggggcggcgtgggaacctagagtgggagagattaagctgaaggcagatcttgtggtaaggggtgatattgtggggacgttagaagaaacatttgttgtatagaatgattggtgatggcctggatacggttttgtatgaattgaaaaactaaatggaataagagaaggagaaaaacagatataaaaggactaagaattgggaggacctaggacatctgattagagagtgcctaaggagattcagcatagtcctgccagcaaagattatttatttacttcaagagttaagagtggcagtttggggatagcaccaggagatatcagctgtgatggcttggagaaacagtgtaaaccggcagtgtaaacaagagcagggcatgtatgagtagttgagaatggtgaataggagtatgactagacagaagatagtagggatgacaagttttttggggcacagtctaagttggtctggtgtctggaatgagactggggcctaataaaaaggagcatctatacaggagcttaaatgggctgtaccctgtagcattctgaggacaggcctgaattctgagaagggaaagtggtaaaagtattgtccagtcctttttaagttggtggctgagcttggtgaggtgtgtttttaaaagacctttagtccattctacttttcttgaagatggaggaccttaagggatataaaggtttcacagaatactaagagcctgaaaaactgcttggctgatttgactaataaaggctcacctgttatcagactgtattgaggtgggaaggctaaactgaggaattatgtctgacagaatggaagaaatgactgcggtggccttctcagaccctgcaggaaaggcctctacctatctagtgaaagtatctacctagactaagaagtattttagtttcctgacttgggacatgttgaataaagctaatttgccagtcctgggtgggggcaaatcctcgagcttgatgtgtaaggaagggagggggcctgaataatccctgaggaatagtagaacagcagatggaacactgagaaattatttccttgaggatagatttccacgatggaaaggaaatgagaggttctgagaggcaggctagtggcttgtactatagcatagcctgcctttgctggtgtgtggcgattaggcctggtggaaccaccatcaataaatcaagcgtgatcggggtgaggaacaggaaagaaggaaatatggggaaatggggtgaatgtcaggtggatcagagagatagtcatgggggtcaggtgtggtatcaggaataatgtgggaggccagattgaagtctgggccaggaacaacggtaattgtgggagactcaacaaggagtgagtacagctgaaggagctgggaagcagaaagtatatgtgtcaggtatgaggaagaaaatagattttggaagttatgagaactgtagagagtgagttgagcatagtttgtgattttgagggcctctaaaagtattaaagcagcggcagccgcctcgtgccgnnttttccaggantatcagtgt

SEQ ID NO: 65163 - DNA, 1500 bp, Homo sapiens
tggaaaactttcaacatttcatggatagaataagtaatggtgggttagaagaaggaaaacctgttgatctagttcttagctgtgtggacaattttgaagctcgaatgacaataaatacagcttgtaatgaacttggacaaacatggatggaatctggggtcagtgaaaatgcagtttcagggcatatacagcttataattcctggagaatctgcttgttttgcgtgtgctccaccacttgtagttgctgcaaatattgatgaaaagactctgaaacgagaaggtgtttgtgcagccagtcttcctaccactatgggtgtggttgctgggatcttagtacaaaacgtgttaaagtttctgttaaattttggtactgttagtttttaccttggatacaatgcaatgcaggatttttttcctactatgtccatgaagccaaatcctcagtgtgatgacagaaattgcaggaagcagcaggaggaatataagaaaaaggtagcagcactgcctaaacaagaggttatacaagaagaggaagagataatccatgaagataatgaatggggtattgagctggtatctgaggtttcagaagaggaactgaaaaatttttcaggtccagttccagacttacctgaaggaattacagtggcatacacaattccaaaaaagcaagaagattctgtcactgagttaacagtggaagattctggtgaaagcttggaagacctcatggccaaaatgaagaatatgtagataatggactgggatatattgtatttctcatgttaaagcctcttcccttgaaattaaaaaaaaattttaactgataaaacttagggcaacattaattaatgtatattcttacctgaattgttatactttttgaaaatcctgtgacttgcctgtttctccccgctccaacgaaatcattaactctcctaaaatgtgtttcattctagtaagaaaacctcaaaggatattgtaggatataaatcttacttgaaaacatagctgttgaaatgttttggccttttggagtgggggaaggacaaatctgatcctgtaatctttttctttccagtaatcccttgtgtctgttgcatgaggacatggacaataaagtagtatatgatcctcagatacagggagaaggacaaggcatacagcttattgattagagctggcaagcatcttctcattatgtttggaattgctttctataagaaaattgcccactactactaacttgatcaacaatgaattcaaaatagttaacctatgaaataacatcctctcaaatgtttgctgatgaagtacaagttgaaatgtagttattggaaaagtctgtaacctgtggatcatatatattcaaagtgagacaaaggcaaataaaaagcagctattttcatgaatagacaaagttgatttcaggaagtataaattatattctgcaccgaacaagggaacagaaattattgcatctgtggaacatatatct

SEQ ID NO: 65164 - DNA, 1300 bp, Homo sapiens
ttttttttttttgcttcaaaaatacagtatttattgtaataactacagtagcaagaagaaaaaaacgaatggatactacgtgtttagcagcagagctgatataattatgadatataaacaattactattgggagaaaatacattacactcattgcttgggaaccatgaataatacttatatatgtacgaaatatagaaaaataaaataggttaacataataaggatataggcaattattttttttaattttataaaaacttttatttttccttacaaactggggtagttaggagacctgataatagcttttttattttcttggcaccaaagcaacttacttatgtgttccttcttgcattatctgttccagatcatagtcaagttttccaattcgttttactaagctagcaaaattttttataccaaaaagagtaaaatcaaaacaaatgctcctttgtttatagatgaaaatctggagcaaaataacacaacattaaaaaaacaaaactttgcaaacacatcctaaagctacacacattgaagcgtttacagcaatatgctccctgggttcgttctcccttcccccaatcctctaaactgtgcctttgggtctcagacccttgtcccgggggtccctctgaatccacctttcaagaggatggagctgggccactaggctgaggtctggccctgttctcctcatctgccaaagcctcacagtactgcgctggccagtccttggggtcttgattatggaccttggccacaaacttaagaactttcatcttgctggtttccaggttggttcgcgggccccactggaattcgtagtcgacggggtcggtgtggggtatccgccggtattccaggtaacgctgtcgcacaaagtcctcagtaatgagtttctttggatctccgaaaattaaatgcttcttggtggggtagacccctaagcgccgcagaaagtcccaggcttcagtttccttgatggtgttgcccttcataaagatgagccctaagacgatcatcaggaggcccgtagtgggcgtgccttggtcacccctcatctcggcatcctcctccacaggctccagggtgttgatgaggatgtaagtgttgctcttgggttcaagttccaccagcttatacccgaagacgtactggaggcgctcggcggcccgtttgaagaggtcggggaagatgtccttgtagtccccgatgacgtgcttcagtatgtcggcccgcttgatcggaatcttcttctggtctttaatcagcaagaactgcaccagctcggac

SEQ ID NO: 65165 - DNA, 783 bp, Homo sapiens
catgcgtccgattcagcaccacaggattagaaccatgatttacaggagcaagatggcgagcctgttcccccatccaatgtagaagctatagctgaacatgcggttttgtcagaagaagagaatgaggaatttgaggcttattccccagctgcagcccctacatctgagcgctctctctcaccatccacaactgagaagacttcagagaaccagtctccactgttttcaacagttacaccagaatacatggtcctatcaggagacgaggcctcagaaagtgggtgttacacaccagactccacatctgcttctgaatattcagttccatcactggcaacaaaagagtcactgaagaaaacaattgaccgtaagtccccgttaatattgaaaggtgtttctgagtacatgattccatcagaagagaaggaagacactggatcgtttactccagctgtggcccctgcttctgagccctctctctcaccatccacaaccgaaaagacttctgaatgccagtcaccactgccttctactgccacatcagaacacgtggtcccatcagaaggagaggacctaggaagtgaacgtttcacaccggattcaaagttgatctccaaatatgcagccccactcaatgcaacacaggaatctcaaaagaaaataatcaatgaggcatcccaattcaaaccaaaaggtatttctgagcacacagttctgtcagtagacggcaaggaggtcattggaccatcttccccagatttggttgttgcatctgaacactct

SEQ ID NO: 65166 - DNA, 1032 bp, Homo sapiens
tggttcttcctttattcttagttcttagctgtgatggatccttgcaatgaaagaattaagaagggcgggtgcggtgggtgacgcctgtaattccagcactgtggaaggtcgacgtgggacgattgcttaagcccagggctcaaggccagcctgggtaacatgaacaattcttaacgtccaaagataacgtctttccttaacgtcgaaagatgccttgttgtgatattacagcagtcattcctgctcactacgggcaggcagacagtgcagaaaaggtgaagcacaaaaactaaaaaggaaaatctctccttgaaccactgcgaacagatccgagtgctggggtactgctgccagctggttggtggagttctggttgaacagtgtcccgccaggtccgaagtggggacacgtctgttggtggtgtccacccaactcagccactgcaggaccatcttgcgactctttgatgacctggccatgtttgtctacactaagcaatatggcctgggggcacaggaggaggacgcctttgtccgctgtgtctccgtcctagggaacctggctgaccagctctactacccctgtgagcacgtggcctgggcggctgatgcccgggtcctccacgtggactcttctcggtggtggacgctgagtacaaccctgtgggccctctctctgctcctgggggttgccaggtccctgtggatgctgctgaaactgagacagaggctgcggagccccacggcgcccttcaccagcccgctgccccggggcaagcggagggccatggaggcgcagatgcagtcggaggcgctgtcacttctcagcaacctggccgacctggccaacgccgtgcactggctgccccggggcgtgctgtgggccggccgcttcccgccgtggctagtgggcctcatgggcaccacctcctgcctgccagctggcgtcttgtatccaaatcaagatgaggaagagggggcctgtcgtgccttgagaaagctggaacgggaatcaattaaacattgtggtgct

SEQ ID NO: 65167 - DNA, 2843 bp, Homo sapiens
gtaagtgcggtggaattcgtgctccatgggaaagatttccaagtagattgcaaagcttccggctccccagtgccttagatatcttggagtttgcttgatggaaccatgatcaacaatgcaatgcaagccgatgacagtggccacaggactaggagatatacccttttcaacaatggaactttatacttcaacaaagttggggtagcggaggaaggagattatacttgctatgcccagaacaccctagggaaagatgaaatgaaggtccacttaacagttataacagctgctccccggataaggcagagtaacaaaaccaacaagagaatcaaagctggagacacagctgtccttgactgtgaggtcactggggatcccaaaccaaaaatattttggttgctgccttccaatgacatgatttccttctccattgataggtacacatttcatgccaatgggtctttgaccatcaacaaagtgaaactgctcgattctggagagtacgtatgtgtagcccgaaatcccagtggggatgacaccaaaatgtacaaactggatgtggtctctaaacctccattaatcaatggtctgtatacaaatagaactgttattaaagccacagctgtgagacattccaaaaaacactttgactgcagagctgaagggacaccatctcctgaagtcatgtggatcatgccagacaatattttcctcacagccccatactatggaagcagaatcacagtccataaaaatggaaccttggaaattaggaatgtgaggctttcagattcagccgactttatctgtgtggcccgaaatgaaggtggagagagcgtgttggtagtacagttagaagtactggaaatgctgagaagaccgacatttagaaatccatttaatgaaaaaatagttgcccagctgggaaagtccacagcattgaattgctctgttgatggtaacccaccacctgaaataatctggattttaccaaatggcacacgattttccaatggaccacaaagttatcagtatctgatagcaagcaatggttcttttatcatttctaaaacaactcgggaggatgcaggaaaatatcgctgtgcagctaggaataaagttggctatattgagaaattagtcatattagaaattggccagaagccagttattcttacctatgcaccagggacagtaaaaggcatcagtggagaatctctatcactgcattgtgtgtctgatggaatccctaagccaaatatcaaatggactatgccaagtggttatgtagtagacaggcctcaaattaatgggaaatacatattgcatgacaatggcaccttagtcattaaagaagcaacagcttatgacagaggaaactatatctgtaaggctcaaaatagtgttggtcatacactgattactgttccagtaatgattgtagcctaccctccccgaattacaaatcgtccacccaggagtattgtcaccaggacaggggcagcctttcagctccactgtgtggccttgggagttcccaagccagaaatcacgtgggagatgcctgaccactcccttctctcaacggcaagtaaagagaggacacatggaagtgagcagcttcacttacaaggtaccctagtcattcagaatccccaaacctccgattctgggatatacaaatgcacagcaaagaacccacttggtagtgattatgcagcaacgtatattcaagtaatctgacatgaaataataaagtcaacaacatctgggcagaatttattttttggaagaagtttaatcaaaggcagccataggcatgtaaatgaatttgaatacatttacagtattaaatttacaatgaacatgcaaaataaaaggacttgtaaataaatgcattatgaactgatgatactgatttatttaatggatctcaaaacaaacttttaacttaaggcacttttattttgccaacaaataacaataaacaaacattgaaacggttcactataaaataacaaatggctaatgtacctgaatttttcagtaaaaaaatgaacttctaataccagttgccctagtgtccacctcctatccaatgttaccaagcatggcactccagaaccagagaccaatggaaaatattaaatctggcaatctttatgatgtaaatttaccatcctgatgtataaatattttgtggtttataaatttttttgctaaaacctacagaaaataagcactgaactgtcttatgattcaccatttgttcacactgaaaattttcattgatggggaatacaaaaatgttttaataactgcatttaaaaataaatgcaggctcacttttccacatgtaaaaagcaatgtaatacctgcacatcataaaatgtgaaaagggggttatttttgtccaaatacacccattaaaaaggttttaaaaatacaatgaaacttctttataactttaaaatctagctcaggcacccctggtttggagctgtttataaggaaatttttctgagcaggaatcgttgctctataagcatttcatttcattaattctttatgggatgggaaaatgcttgggagggtctaggtctattatatataatgaagtttcactgtatttaaaatctgatcaatcctacacaaaatgtgtttttgtaattcactgaatttatattacatgcttaattcaacctgaattaatttggggaatattaaatgattgatcttatctaaatctaggggtggggttttccagtgtaatttctccagcatctattcaaacattcacctagtacttacttacttaagaattataggagctttataaatgg

SEQ ID NO: 65168 - DNA, 1420 bp, Homo sapiens
  misc_feature (1)...(1420): n = a,t,c or g
tgtcgtggaattcgggatttgatttaggcttagctctaccatagaccaaggttttaacttgaaccttactgggtgctagcttccccatatatttaattctgtgatctctagagatcctttaagttctaaactagacttttctaagtagaagcttaaacttaaaattcaataacattcaaaaaagatattgaggtatactttaattttcaaaaatatgattgtaatgtttattggaatgctcagaggatattttgtaaaaagcaaagatataaaaaaaacaaaggaataactggattaagcatcaagcctaattgggagctgctgggtaaggaggccatgagagattgctctggagtagctttgtctttcaggagaaggaagttatagaacaatgattaattcttgaaattgatagaaaaatatatttaaatatgttttaaaatgtgagtagaattctcataatgctggtttggatatatattgatacattcaattaaaaaaactggtactacctcctaaaattgaacctatgcatacttccaaaggacagagcagttttgctctcagatatatcgccacagaaatgcatacacttgtgtgctggcagataagcacaagacttttcatagcatccctattcataattgcccaaaactggaaacagcccacgtatccatcagcagtaaaatggatgaataaattgagttatgtttgctgtattgcagtgggttactgtgcaactaagaataagtagttgtgtgcaataacatggatagatctaccaaatataaagaagccagacacaaaataatatatacactatgatgatagcagttacattttataaaatacacatgcaaaaacaggcaaaactaatttatggtgttagagtatgagatagtaggtacttctgggaagaaaaaaaggagttgggagaatatataaaaatatgactaggtaaggccaggcacggtggctcacacctgtaataccagcactttgggaagctgagatgggtggatcacctgaggtcaggagttcgagactagcctgcccaacatggtgaaaccccatgtctgctaaaaatacaaaaattagctgggtgtagtggcacatgcctgtaatcccagctatttgggagggtgaggcaggagaatcgcttgaacgcgggaggcagaagttgcagtgagccgagattgcaccattgcactccagcctgggcaacaagagcaaaactctgtctcanaanananaaanaaaaaaaaaaaanaaaagggggcccccttttaaaaaaaaaacattttacccccccgcgcgggcgagattttttttttttttggggccccaaaaaataattttcgggggggcgttttaaaaaagggggggggggaaaaacccggtggcaacccataattttgtt

SEQ ID NO: 65169 - DNA, 669 bp, Homo sapiens
cttcctggcacgggagacaaccacatagctcctgggagatgcctccccaaacccctgctcccagctcacacttccagaagcctccttccaaaacctcttgttggacagcacccctttctcttctcatgccatcatttagtattccccgtagcaatgactgccccctgacgtggatgtcacttgtttgctatctcccctactagaacatcagtcccggggagcagggatcctggcctgtctagttcatgctgtctacccagcacatggcataggcccagcacacagcatgtctgcagagtgggccgaagcgccacccccactcaccatgaggttggcattggcaatgtggtgcttgaccacgcccccgcccagaatgatcatcccagtgcacttggcaaagatggcctgtgtgttgatgagcctcaggtcctcaacgatgtccaggaccaggcccgggttcttgtaggaatggaagaagatcatgtcgcccagcgagccgtctgtaagtgcgggactaaacacagggatgtggttctgcagagaacatgacaggacagtggctggagctcagagcctcgtctccatgctggctatatgactatctgactgcggatggcgtgcctaatctctctaggacttgctcctcattagtagcatatcagagcacct

SEQ ID NO: 65170 - DNA, 1338 bp, Homo sapiens
atttttagtagagacggggtttcaccgtgttagccaggatggtctcgatctcctgacctcgtgatccgccctcctcggcctcccgagtagctgggactacaggcgcccgccaccacgcccggctaattttttgtatttttagtagagacggggtttcaccgtgttggccaggatggtctcgatctgctgacctcgtgatccgccggcctcggcctcccgcagtgctgggatttcaggcgtgagccgcggccggccgccctcctaggttttagtaggttggagagctgtgggtctcgcacgcttcaccagccaaattcctaagtccctttttatcgttttaaccctaagagtcacaggtcgtgttacagatcagggggacagacaagcacagaacccccatctcccagcacccagcctccgagtcagatgccccccgccctggtctctcacagctgtgctcactaggcaagcctggccggcccctccctggtagcagtgaagctgttgattatgtttgtcgttgttgcatttcagttacacaagtgttaccagaatgcagtctcctttatacaaacttaaaagtatgagtttaagcctagtctcttgtgccctccacccccgccattcccagaggggactgctctctcctggtggacacattctacaatttcaccaacatagacgccgacacgcgggcacctacgtaaacacacatgcgatgctcatgtaaacaaacatccatgcacacactgccacccaggtacacacacccgagaatgtgtgtgtccctgtacgtgaacccgagtgtgcccacgtacacgtacccaactgtcctcatgtacacgtacccgagtgtgctcacgtatacgtacccgagtgtgctcacgtacacgtacccgagtgtgcccatgttcatgtatccgtgtgtgtacgtacccgagtgtgtgtatgtgcctgtgtgtacgtacttgagtttgtgcccatgtacgtgtacccgagtgtgtgtacgtgcctgagtgtgtgtacgtgcccaagcacaggcacattgtccagatccacataacactccttctttgcagttgcttcctccacacacagagtgtcccccatctctccagggtacacactgcagtgtgggtgaacatcaaaagccgtgcagtgagagaagccaatcacagcaggtccgtgccgcctgacagtgttcacatggaagttcggaaaagacggctctgtagagacagacagatttgtggtttcccaaggttgggggtgacggttaggagtcaggatttctttttggggggatgataatgttctgtaatggatcgcggtgacagg

SEQ ID NO: 65171 - DNA, 709 bp, Homo sapiens
gagcactctgaaggccacagggtgtccaacagatgaagacagaggagggactggcaggccccaggcttccctctgaacacatcccaaacctccccactactctgcagtcagcacccaaagccccagtcatcgccatctctcacccagacagcagcaacagcgtccaggggacccctccctcacccctaacccccatcctaaatcacagtccaggcttcacgtagcagccacagggggcctttaaaaacagagtcagagcacatctctcacctgatgagaccccgcatcagcttcccattgctcttgcagtgaagtcgaagccactcatcacagccgagtgcctgggtggcccccgccagccgcccctcatcacctgcaccagcctcttgctgtctccctgacagcagtcccctccctgtcctagggggtcttacagccagcaacttctttccaccccaggactcttgcactgcttccctccgctcggaagtctcttccccagccctgcacatagccgccaccttctcgttcctcactcagggctcaattcagatgtctctgcctcagggagcctcctctgaccattcccagtaggaccctcctcatcccttggctccagctgccttgccagccctggcaactcttcgggctcaaacggttggcactgctttacaatgcactcaccatgcttaaccctaagaaaggcccg

SEQ ID NO: 65172 - DNA, 1864 bp, Homo sapiens
cccacgcgtccggaggagcagcaggaggggggctttgcgtcccccacgtttgtcaaggtctagtggaagcggaagccggcaggaggtggcccgagcagggccgggtccccgcgccggacatccaagaaaaccaaggtggagccctacagtctcacgggccagcagagcagcctcatcagagaggacaagagcaacgccaagctgtggaatgaggtcctggcgtcactcaaggaccggccggcgagcggcagcccgttccagttgttcctgagtaaagtggaggagacgttccagtgtatctgctgtcaggagctggtgttccggcccatcacgaccgtgtgccagcacaacgtgtgcaaggactgcctggacagatcctttcgggcacaggtgttcagctgccctgcctgccgctacgacctgggccgcagctatgccatgcaggtgaaccagcctctgcagaccgtcctcaaccagctcttccccggctacggcaatggccggtgatctccaagcacttctcgacaggcgttttgctgaaaacgtgtcggagggctcgttcatcggcactgattttgttcttagtgggcttaacttaaacaggtagtgtttcctccgttccctaaaaaggtttgtcttccttttttttttatttttatttttcaaatctatacattttcaggaatttatgtattctggctaaaagttggacttctcagtattgtgtttagttctttgaaaacataaaagcctgcaatttctcgacaaaacaacacaagattttttaaagatggaatcagaaactacgtggtgtggaggctgttgatgtttctggtgtcaagttctcagaagttgctgccaccaactctttaagaaggcgacaggatcagtccttctctcgggttctggcccccaaggtcagagcaagcatcttcctgacagcattttgtcatctaaagtccagtgacatggttccccgtggtggcccgtggcagcccgtggcatggcgtggctcagctgtctgttgaagttgttgcaaggaaaagaggaaacatctcgggcctagttcaaacctttgcctcaaagccatcccccaccagactgcttagcgtctgagatccgcgtgaaaagtcctctgcccacgagagcagggagttggggccacgcagaaatggcctcaaggggactctgctccacgtggggccaggcgtgtgactgacgctgtccgacgaaggcggccacggacggacgccagcacacgaagtcacgtgcaagtgcctttgattcgttccttctttctaaagacgacagtctttgttgttagcactgaattattgaaaatgtcaaccagattctagaaactgcggtcatccagttcttcctgacaccggatgggtgcttgggaaccgtttgagccttatagatcatttacattcaatttttttaactcagcaagtgagaacttacaagagggtttttttttattttttttttctcttaatgaacacattttctaaatgaatttttttttgtaggtactgtatatgtaccaagaaagatataacgttagggtttggttgtttttgtttttggattttttttcttttgaaagggtttggttaatttttctaattttaccaaagtttgcagcctatacctcaataaaacagggatattttaaatcacatacctgcagacaaactggagcaatgttatttttaaagggtttttttcacctccttattcttagattattaatgtattagggaggaatgagacaattttgtgtaggctttttttaaagtccagtactttgtccagattttagattctcagaataaatgtttttcccagatagaaaaaa

SEQ ID NO: 65173 - DNA, 1837 bp, Homo sapiens
aatacttctctttttttaatttataggagatatagaaaaaaaatatcatttgggtgtgagtccactttgcgatcgtcacactgaatctattgccaacatccagattggtaactatacatatttagatatagctggttagaaaaatgccactgtttttatcaagaagggaaatatatttgaaatataaaatattaaaattatgctcatttctatttttaaaaataatttaagaaattttacccttgttttcccttgttatggctcttctaattctcatttaattttaggatgtaaaaagtatatttttgcagaacaggcagcagcaataacttgtttctgttcttatgtaaataagaatccattattcgctcatgtggaagcttcttttgcatcatttgggactgccatttaaaaaaggataggtaaacaaagaaatgacaaaaataaaataaataaaataaaaatggataggtggtgacccactgagcctgatcataatacgaagaccagcttctgccactgcctttccagactcttaccactgcctgttgattaaatctaactcttcaacatcctagacaggcccttataatcttgcttcaaatgctgtgcagccatcttgcctcaacttccctctcatttgcctacagcatctcgggacgcttctgtgtttcccaagtatacgctgttctttcgctctttgtgcctcgccagtgctttccatgtgcctcgtagagttatttttcttgaagaggcagctcaaatgtcaccttctccagaagctgctctccacttgctttaggcagagtcagtcacttttcttctagattccaaagtgcctgatccacttggttgtggattcctggagcctagcaccacaccagaagcacgaggcccttgagaactgtgttgagtgaactaataactgtattatagaaagcataatgaaaatgtcctgtgactgaagtatgtgtagcttgttgcaggagttcacaggaaagttgactaggattgagtgtgttgggctttgggtataaaggagggggattctacgggggcagtagctcaacaaggaatagagggaggagtgtaattttggtagctggtgttgaatagggcctttgagaatcagactgaacacagtgaaatatgtgcccaaagttcagaaagatgaagtttccagaaactaagaaggtagcacaatatgtggcatcatactcagaaaggaagaccatgccatggggccagaaattcagaaacgtaattcttacattgtgattgcaatggatactcatggaagaaagtgggtagtggccgatttgacttcagagtgacaggtagagaagggaagagcgtgtagaactgtggccagactttaggagtgtgagggatgctgaatctcccagagagctcacactggccaggaatgctgagagtagcagatgcttttcttttgggaggatagtaaaacaatttagaaccagatatgctttgtcttgattctcaagtagaataatcttcaaatgcaaaagaatacattagaaatggacaaaagtggccaggagcggtagctcatacttgtaacccagcactttgggaagccgaggcgggctgatcgcttgaggtcaggagttcgagaccagcctggccaaaatagttaaactcacgtttctactaaaaatacaaaaattagctgggtgtgatggccacttgggaggctgagataggagaatcgcttgaacctgggaggcagaggttgcagtgagccaatatcgtgccactgcattccagcctgggtgacagaatgaaactccatcactccatctcaaaaaaaaaa

SEQ ID NO: 65174 - DNA, 608 bp, Homo sapiens
cccacgcgtacgcccacgcgttcgctcggctcactgcagcctccacctcctgggttcaagcaattctcctgcctcagccttccgactagctaggattacaggcgcctgccactacgcccagcaaattttttgtatttttagtacagacggggtttcgccatgttgaccaggctggtctcaaactcctgacctcatgatttgcctgccttggtctcccaaagtgctgggattacaggcgtgagccaccacgcccggccataatctgttcaagtttcttagttgtagttgcctccatttctttataaaatgaagccattcaacattttaagtataaggtttaatgcaatgagatagggcaagttcttaggttaaaagttaatgttcaaatataacatctattttttctttcctgcagcaaaccaagaggaagctagatgatgccagcaaacgtttggagtttctgtatgataaacttagggaacagacagtaagttttggaggaaaaggatttatgataatcatttattcctagttgctagtaaaacagttgtcttatcagcactcccatttagtatgcatgggggcaaaattgtcatgacatttagagg

SEQ ID NO: 65175 - DNA, 858 bp, Homo sapiens
tgggtaagaaggcctggctgttgatgggcaatgctattcctgagggtccaactgcctatgtgctaacttgggagcaaggtcgttatttaatatggaatccctgcagtggacatttttatggacaatttgatacattctgtcccttgaaaaatgtgggctgtttaataggtcctgacaatatttggtttaatattcaacgatatgaatctccactaaggataaattttgatgtcaccaggcccaagctatggaaatctttcttttcaagaagccttccatatcctggcctttccagtgttcagcctgaagagctaatttaccagcgctcagacaaagcagctgcagctgagctacaagacaggattgaaaaaatactaaaagaaaaaatcatggactggaggccacgccatctgactcggtggaataggtattgtacctctactctgcgtcacttcttgcctctgttagaaaaaagtccaagggagaagatgtagaagatgaccacagagcagaactgctaaaacagctgggagactacagggttctctggatttcctcttcacatgccttattctgaagtgaagcctttaattgacgctgtgtatagtactggagtacataatattgatgttcctaatgttgaatttgctttagctgtatacatacacccataccccaaaaatgttttgtctgtttggatctatgttgcctctcttatacgcaacaggtaatttttttcactgtactttctctatcatgtaaaaactacacttaggatatgagaaaattttaaattatatgcatcacatcagaagaacatattattggcaaataataaaattatcaactgttttcaaa

SEQ ID NO: 65176 - DNA, 2095 bp, Homo sapiens
tcatttcctttccatcgtggaaatctatcctcaaggaaataacttctcagtattccatctgctattctactgctcatcagggattattcaggccccctcccttccctacacatgaagctcaaggatttgccccacccaggactggcaaattagctttactcaacatgccctgagtgagataactaaaatacctcttagtctaggtaggtactttcactggataggtagaggcctttcctgcagggtctgagaaggccaccgcagtcatttcttccattctgtcagacataattcctcagtttagccttcccacctcaatacagtctgataacagacgagcctttattagtcaaatcagccaagcagtttttcaggctcttagtattcagtgaaacctttatatcccttacggtcctccatcttcaagaaaagtagaatggactaaaggtcttttaaaaacacacctcaccaagctcagccaccaacttaaaaaggactggacaatacttttaccactttcccttctcagaattcaggcctgtcctcagaatgctacagggtacagcccatttaagctcctgtatagatgctcctttttattaggccccagtctcattccagacaccagaccaacttagactgtgccccaaaaaacttgtcatccctactatcttctgtctagtcatactcctattcaccgttctcaactactcatacatgccctgctcttgtttacactgccggtttacactgtttctccaagccatcacagctgatatctcctggtgctatccccaaactgccactcttaactcttgaagtaaataaataatctttgctggcaggactatgctgaatgtccttaggcactctctaatcagatgtcctaggtcctcccaattcttagtccttttatatctgtttttctccttctcttattccatttagtttttcaattcatacaaaaccgtatccaggccatcaccaatcattctatacaacaaatgtttcttctaacgtccccacaatatcaccccttaccacaagatctgccttcagcttaatctctcccactctaggttcccacgccgcccctaatcccgcttgaagcagccctgagaaacatcgcccattctctctccataccaccccccaaaaattttcgccgccccaacacttcaacactattttggtttatttttcttattaatataagaaggcaggaatgtcaggcctctgagcccaagccaagccatcgcatcccctgtgacttgcacatatacgcccagatggcctgaagtaactgaagaatcacaaaagaagtgaaaatgccctgccccgccttaactgatgacattctaccacaaaagaagtgtaaatggccggtccttgccttaaccgatgacattcccccacaaaagaagtgaaaatggccggtccttgccttaagtgatgacattaccttgtgaaagtccttttcctggctcatcctggctcaaaaaccttccttactgagcacctcgtgacccccactcctacccgccagagaacaaacaccctttgaccgtaattttcctttacctacccaaatcttataaaacagccccacccctatctcccttcactgactctcttttcggactcagcccgcctgcacccaggtgattaaaagctttattgctcacacaaagcctgtttggtggtctcttcacacggacgcgcatgaaatttggtgccgtgactcggatcgggggacctcccttgggagatcaatcccccgtcctcctgctctttactccatgagaaagatccacctacaacctcaggtcctcagaccaaccagcccaaggaacatctcaccaatttcaaatccggtaagcggcctctttttactctcttctccaacctccctcactatccctcaacctctttctcctttcaatcttggcgccacacttcaatctctcccttctcttaatttcaattcctttcattttctggtagagacaaaggagacatgttttatccgtggacccaaaactccggcgccagtcacggactgggaaggcagccttcccttggtgttaatcattgc

SEQ ID NO: 65177 - DNA, 1968 bp, Homo sapiens
ccttgcttgcaggaagccatgcagttagtttctgcagttagtcgtgtgaggctaggtggttgggcaggcctcgggctgtaggtgttgggtgggaaaaagacccaagggcctgaaagggagggaaaggggagggtagcgggagggtagcaggtgagttcctagggctggaaggtttaacagcagcctggtgcagtgccctgtcatcaagacaaacccacggtcctcctgggtgcctaccaagcttggtttgtacaaaagcaaggtgggagtctatttttgtacatgagatacatcacacttacctgtgggccagtattgtgaagtgagtctgagttgtttacactgatgccttccctgcccaccacaaattgtgtacatagtcttcagatgataccacccctttccccagctcccaaccaagagctggttctaggcctgtgttatatgtcatatttagcgtttttatatatgacctttgatttctgttgtttgtattttagcacagtgtatgcaccttcatttaaatacatctgtgtgcatacagatacgcatatatgtgtgtgcgtatgcatatatctctcatctgtagtttccaagagttcagctgaagcagatggagtcctgcagcccaggagacaccctgcatccctgctaatagtgtttgccacaagtattagtgagtcttccttattaatattttcatttcagaagactgaagcaaagctgatagtgtttgctgtttctttggcagctaagtgagggtcttgggatgacttgctgtgttcctcaagctgcactttggggccatctctgcagtattagccccctttttgcttggtggtactctgtctgtgcctgtgtgtgtgtgtgatagtcactcttgcatggcttccatgtctggtttgtggcatttggggataaggtgctgaagccagagcatttgcagtttgtttgaggcctcgttgccaatgatagatcactcctgttgacctggtatgtctgcttgcttgctgcttttccttgctttctcttggaagaggaaaggactctggtcaggcccaggctgagtgagatgagctgcagctggctcatggccttcttagagcagagagaggagtatgtcattttactaagttcctaaacaaacatttatgcaggcaacactccttgcagatccagaaactgaggcacaatagggttatgacttgctcaagaatatgtagctgctagggggtaaatcaaggcatcacaatttctgttcagcgggcaggaataggctgtgaattgctagcactttttttttttaagcaattactttttgacttgttcctctgaaagtgcaagaggcgtacacctttcccaaatgtagactagaatctgcaggatgccacccactgtatagttctgctttcccagagaggaagaacttttagaaaccaaatgatcttaattgttattgcccacccctggcttttccgggtagaaaattcacagtaggaatgattgttaagagagagtgcttggaaccatgggttaacaggaaaggctacctaacttcacatatctgcaaccagagcagccaccaagcattacttagcagcaggaaaatgattgtatttgagttcctgtgtgtccaaaactgaggcaccatgttctttgaaaacatgccacctcaaggctgggcgcggtggctcacacctgtaatcccagcactttgggaggccgaggcgggcggatcaccggaggtcgggagtttgagaccagcctgaccaacatggagaaaccccatctctactaaaaatacaaaattagccgggcgtggtggcatgcgcctataatctcagctacttgggaggctgaggcaggagaattgcttgaacccaggaggcggaggttgcggtgagttgagatcgtgccattgcactccggcctgggcaacaacagcaaaactccgtctcaaaaaaaaaa

SEQ ID NO: 65178 - DNA, 431 bp, Homo sapiens
attatgagatggttcccctcatcagccaagcctgcgttcttctcctggctcatttaaaacgctatgcggaatctggggacgcatttgacatccagaggtaaggctgctgcattacagatgagaaatcgagtttttgaatcactgcttcttgtaactgtccataattgctgacaattaccttgggactagcaaactgtggaaacgctagaagctcataaaagcatggatggactgattaataaaaagaaaagaaacccacttaacatgggaaagagatgtgagcagagccagggtacgtgcgtcctgtcgaacctgtggatggatccaccctctgacctccacagacccaggaatgggcaggacaggcctgcgcctaaggacagggatggggggaaagttcaagccttttcactttaagaaaaattgtgggg

SEQ ID NO: 65179 - DNA, 1050 bp, Homo sapiens
cttccttccttccatccttccttcctttctttctttctttctgtttcgtccttttgagacagagtttcactcttgtttccacggctagagtgcaatggcgcggtcttggctcaccgcaccatccggcacccgggggcgaaagagcatcacgagacaagacccgcacagaggggaagacagggaggcacccccacgcctggcttggctgatgtttgtgtttttagtaggcacgccgtgtctctccatgttgctcaggctggtctccaactcccgacctcctgtgatgcgcccacctcggcctctcgaagtgctgggatgacgggcgtgagccaccgtgcccggcctgttgactcatttcgcttttttatttctttcgtttccacgcgtttacttatatgtattaatgtaaacgtttctgtacgcttatatgcaaacaacgacaacgtgtatctctgcattgaatactcttgcgtatggtaaatacgtatcggttgtatggaaatagacttctgtatgatagatgtaggtgtctgtgttatacaaataaatacacatcgctctataaagaagggatcgtcgataaagacgtttattttacgtatgaaaagcgtcgtatttatgtgtgtaaatgaacgagcgtacgtagttatctctgttttctttcttcctctccttcgtgtttttcttccttcctttcttcctttctctccttctttaggtttttcttcctctcttcctttccttctttctctctttctgtccttttttccttcgtgctttatttctctttcgttccctgtgtttccttcttttttctttcctctctgtttctttttcccttctttccttcgtttctttcctcattctttctctctttttcgtgtttctttccttcccgtctgtcttttaaaaaatggagtgtttcagaagtttactttgtgtatctacgttttctaaattgtctctcttttctccattgtcttcctccctccctccctccctcactctcctgcctcccgtcgacccgggaattccggccagtagcctatc

SEQ ID NO: 65180 - DNA, 1286 bp, Homo sapiens
tttcgtgagctttgtgagagaaacaaggctggcttcaagtgatctgcaaccagagtaattgggatttgacaaggactgtgaaaggctgactctccctgttctctttcatgctggcaccgggcagagtgtgggaactactgcctcaatacgatcatagaagccattgagatcccgcagtttatcggccgcagttacctgacgtatgacaacccagatatcttgaagagggtgtcaggatcaagatcaaatgtgttcatgaggtttaaaacaactgccaaggatggccttttgctgtggaggggagacagccccatgagacccaacagcgacttcatttccttgggccttcgggatggagccctcgtgttcagctataacctgggcagtggtgtggcatccatcatggtgaatggctccttcaacgatggtcggtggcaccgagttaaggccgttagggatggccagtcaggaaagataaccgtggatgactatggagccagaacaggcaaatccccaggcatgatgcggcagcttaacatcaatggagctctgtatgtgggtggaatgaaggaaattgctctgcacactaacaggcaatatatgagagggctcgtgggctgtatctctcacttcaccctgtccaccgattaccacatttccctcgtggaagatgccgtggatgggaaaaacatcaacacttgtggagccaagtaacaccagctggccttgtccaagggacagagccttctattctgagaatcccaggggccctcagaccctgcctgatgctatatgcagaggcccagggaccaggtgtgtttcctctcaccaagaagaaagtacacactgatgagaaactgagaaccaagacaggcatccctgggtggcctttcctgctgacactccacgagctgacccagcagaattctctgtgtaggaagcatcggactttgtccattgaatatgtagcggctgccagagatcacacatcaatgcaaattccagagcctgtctgctatagctcagtgactgtgttgtgattcatagtacattaaaaagagagagagagagaaagaatcccacagggcactattaaaatacttctctccttccctgactcatgacactcttcctgacagcagaatgactgtgtgaccttgaacttcacatttcccacattggcccttggattgttcggattaaccccttccactcctcactggctggttcactgtgttctgactagtccataaaaataaagatggaaggagatcaaacacagaaaa

SEQ ID NO: 65181 - DNA, 2112 bp, Homo sapiens
tttcgtggagaggcggaaaggatggcgctgtgacagccgggccggagccctcgcgtccccaccccgcgccctggccgctgggcccggcgagatggagtccacagcctaccctctcaatttgagcctgaaagaagaggaagaggaagaagagattcagagccgggaactagaggacggcccggcagacatgcagaaagtacgaatctgctctgagggcggatggaaaatgaagaatctgacgtaaagcctccagactggccaaacccaatgaatgctacctcccagtctcctcagcctcagcactttgacagctttggcctccgtctgcctcgggatatcacagagctgcccgagtggagtgaggggtaccccttctacatggccatgggcttcccagggtatgacctctcggctgatgacatagctgggaagtttcagttcagccggggcatgcgccgcacttacgacgcagggttcaagctgatggtagtggaatatgctgagagtaccaacaactgccaggctgccaagcagtttggagtattggaaaaaaacgttcgagactggcgcaaagtgaagccacagcttcaaaacgcccacgccatgcggcgggcattccgaggccccaagaatgggaggtttgctctggtggaccagcgtgtggccgaatatgtcagatacatgcaggccaaaggggaccccatcacccgggaggcgatgcagctgaaagctctcgaaatcgcccaggaaatgaacattccagagaaagggttcaaggcaagcttgggttggtgtcgaagaatgatgagaaggtatgacctgtctctgaggcataaagtgcccgtgccccagcacctgccggaagacctgactgagaaactcgtcacttaccagcgcagtgtcctggctctgcgcagggcgcatgactatgaggtagctcagatggggaatgcagatgagacgcccatttgtttagaggtgccatcacgggtaactgttgataaccagggcgaaaagcctgtcttggtcaagacaccaggcagggaaaaactgaaaatcacagcactgcttggtgtcttggctgatgggaggaagttaccaccgtacatcattttgaggggaacatatatccccccggggaagtttcccagtgggatggaaattcgctgccaccggtatgggtggatgactgaagacttgatgcaggactggttggaagtggtgtggagacggaggacaggagcagtgcccaagcagcgagggatgctgatcttgaatggcttccggggccatgccacagattccgtgaagaactccatggaaagcatgaacactgacatggtgatcatcccagggggtctgacctcacagcttcaggtgctggatgtcgtggtctacaagccactgaatgacagtgtgcgggcccagtactccaactggcttctggctgggaacctggcgctgagcccaaccgggaatgctaagaagccacccctgggcctctttctggagtgggtcatggtcgcgtggaatagcatctcaagtgagtccatcgtccaagggttcaagaagtgccatatctccagcaacttggaggaggaagacgatgtcctgtgggaaatcgagagtgagttgccaggaggaggagaaccaccaaaagattgtgacaccgaaagcatggctgagagcaactgaagggaaagggaaagcaaatggaactctgatttaaacagctggggatgaaattcctcaagatgattattcctgaaagtgtggatgcgctggatgcgcagggaacatcaggaaaaggccacggggctctgaacagccccggtccagacagcagcctgtacatccatcccaggacacagcccagcccctccccacaccatacaaggtatcagaaaagtctaggacctatcatttcatcagagacatgatcagaaaagaaactgcttctgccccatttcttgttttggagattactccatctgtccatcaaaagaaacctgtaaatatgaaagaacaaaggttatttcgtggagaaaaaaaaatttattcaacaccaacaagggacatgtattgcggccggtctggaggatccacacgatc

SEQ ID NO: 65182 - DNA, 2006 bp, Homo sapiens
  misc_feature (1)...(2006): n = a,t,c or g
tgataattgaaaaactggcagaagggcttgacattcaactcaaatctccagtgcagtgtattgattatnctggagatgaagtgcaggttaccactacagatggcacagggtattctgcacaaaaggtattagtcactgtaccactggctttactacagaaaggtgccattcagtttaatccaccgttgtcagagaagaagatgaaggctatcaacagcttaggcgcaggcatcattgaaaagattgccttgcaatttccgtatagattttgggacagtaaagtacaaggggctgacttttttggtcacgttcctcccagtgccagcaagcgagggctttttgccgtgttctatgacatggatccccagaagaagcacagcgtgctgatgtctgtgattgccggggaggctgtcgcatccgtgaggaccctggacgacaaacaggtgctgcagcagtgcatggccacgctccgggggctgttcaaggagcaggaggtcccagatcccacaaagtattttgtcactcggtggagcacagacccatggatccagatggcatacagttttgtgaagacaggtggaagtggggaggcctacgatatcattgctgaagacattcaaggaaccgtctttttcgctggtgaggcaacaaacaggcatttcccacaaactgttacaggggcatatttgagtggcgttcgagaagcaagcaagattgcagcattttaagaattcggtggacccagctttcttctgtaccccagatggggaaatttgaatcacatgttaaacctcagttttataagagggggaaaaaaccgtctctacatagtaaaactgaaatgtttctaaggcgatatgataatgcaaacctatttcatcactctaaaagcactgacctcaaaaaaccttataagcacttagatttaattgcattttccataggttcaactactgctgaaagtctggatttcagaataaagcagaatgtaagtttcagttgaggccatggatttgattgttccatggctggaagttccctttagatttcacattttatatggctgatcaattttcatacattgagaaaccaagtcaatcaagcaggaatcatttaaaaaccagataaagccatgtttttcttctgtgacaatttatcagtatctttaccaatgagccttaatttttatataggtccaatattgagcttttacttaaaatttagatagaactttttttttggatacagcacaaactccagtttgacagtaaaatgaagctttctaggtattttgtattgtacatatttcctcctactgggtgttcaaaagaaatttaaattcaagtaccttttgtgataaaatgttttagaatttgtgcacccattggcaaaacaggaaagtttccagataggtattgtatcattgaggaatgcagcacagatagtgtgggcttcacactatagacacagaatatagctttttcttaaaagccaaatttgggtgataggacactttaaaatatccttaattttggcaaccactaagcaaaaaaaacttgtcagaataatttaaccaagcccctctccacttcttttatttaaaagcactgattcaattgctagggaatatttttgccagatttttctttacagtattcccttagggcaggtccactgggaaaacttgcagaaaaatgtgagctctcctggtaaatagtatacattttataagctatattttaaaggcctaagaacatggcaagtatttacttttatcttttttttaaaaacactcatgaccagaaaccagtttaataatatctcattctaaaataaaacactggttgcagggtcttcaggatgcctattttgccaagaaacttcagtatacaggttagaaatatgcttttgtttttgaccaataatatactggtttgctttaaagaagggactaaatatgactttaaagagacttcaaaatattgagtattttaaaaatttaaaag

SEQ ID NO: 65183 - DNA, 1057 bp, Homo sapiens
  misc_feature (1)...(1057): n = a,t,c or g
ttttttttttttgagacggagtctcactctgtcacccaggctggactgcaatgacgcgatcttggttcactgcaacctccgcatccggggttcaagccattctcctgcctaagcctcccaagtaactgggattacaggcatgtgtcaccatgcccagctaatttttttgtatttttagtagagatgggggtttcaccatattggccagtctggtctcgaactcctgaccttgtgatccactcgcctcagcctctcgaagtgctgagattacacacgtgagcaactgtgcaaggcctggtgtttcttgatacatgtaattctaccaaggtcttcttaatatgttcttttaaatgattgaattatatgttcagattattggagactaattctaatgtggaccttagaatacagttttgagtagagttgatcaaaatcaattaaaatagtctctttaaaaggaaagaaaacatctttaaggggaggaaccagagtgctgaaggaatggaagtccatctgcgtgtgtgcagggagactgggtaggaaagaggaagcaaatagaagagagaggttgaaaaacaaaatgggttacttgattggtgattaggtggtggtagagaagcaagtaaaaaggctaaatggaagggcaagtttccatcatctatagaaagctatataagacaagaactccccccttttttcccaaaggcattataaaaagaatgaagcctccttagaaaaaaaattatacctcaatgtccccaacaagattgcttaataaattgtgtttcctccaagctattcaattcttttaactgttgtagaagacaaaatgtggacggatatatttagttgtaaaccaagtgatgaaactgcatattgtaaaggccatttttaaaatacgttgtatatgtgggtatgcacagtaaaaatggaaactatattgacctaaaaaaaaaaaaaggaaaccacccttaggcaggcaggacatgctcttcagaactctgctcttcagagttccaaagaagggataaaacatcttttatnnccatcaaatagc

SEQ ID NO: 65184 - DNA, 256 bp, Homo sapiens
ttttttttttttaaaaaaaaagtttaattttatcccccaggtgggagggaaggggcgcaatctgggttcgttgaaccctccccctctggggttaaagaaattttgggccctaacccccccaaaaaccgggaactgttatttttgcccccccggccccggtggatttttttgatttttaagggaaaagggggttcacccgggtggcccggccgggcctaaacctccggactcaaaagaacccccctgcctggccccc

SEQ ID NO: 65185 - DNA, 984 bp, Homo sapiens
ggcacgagggtgcttcctgttcgcagctgcggcagtgacttcaaggttactgactttttatgatgtttggtggctatgagactatagaagcatacgaagatgatctttatcgagatgagtcatctagtgaactgagtgttgatagtgaggtggaatttcaactctatagccaaattcattatgcccaagatcttgatgatgtcatcagggaggaagagcatgaagaaaagaactctgggaattcggaatcttcgagtagtaaaccaaatcagaagaagctaatcgtcctttcagatagtgaggtcatccagctgtcagatgggtcagaggtcatcactttgtctgatgaagacagtatttatagatgtaaaggaaagaatgttagagttcaagcacaagaaaatgcccatggtctttcttcttctcttcaatctaatgagctggttgataagaaatgcaagagtgatattgagaagcctaaatctgaagagagatcaggtgtaatccgagaggtcatgattatagaggtcagttcaagtgaagaggaagagagcaccatttcagaaggtgataatgtggaaagctggatgctactgggatgtgaagtagatgataaagatgatgatatccttctcaaccttgtgggatgtgaaaactctgttactgaaggctgccagacaccctacttgaaggatcctgttggaacctgtggaaataatacttacaagaacgttgcagctaagctggtccgggtgcagtggtgttacaactaatggatcacaaccagtcacggatttctttgttccatctccattcccacttcttcacttgactagccttaaaaaggctcatgcctgtaatcccagcactaagggaggctcagacagaaggatcatttgagcccaggagtttgagatcagcccaggcaacatagcgagacttcatctctactaaaaataaaataaaaaaattagccaggaaaaa

SEQ ID NO: 65186 - DNA, 934 bp, Homo sapiens
tttcgtctagccttagcgaggccatgggggaaaaagtctaactggcggaactcctgggaactggggcgatgggctcttagtatcggaggattggagccatctgatttttacctgaaattccttagtctctcctgtgttggggaaatggtcaccttgccttcagggacctgggctttcagctgtccatacctggccctggttgatggcggcatgctgggcagtgcacgtgaagacgcacatgagaccgggacttgctgtgttgcccaggctggtcttgaactcctggtcttaagcaatcatactgctttggccacccaaagcactgggattacaggcgtgaaccaccacacccagctcttaaaaccacagtatttctaggtcagtataacacacctgccccagggacttacaggtgtggcagaagcttggacttctggcttttctctctcttgcacccaggcacgctgcagctaccatttcctcccttcactacgttttagattctttccttttcattcctgtcattaccatgctaacgtacatctctatccaccttgctgttgggcaggtatgagcggcttgctggctgttcttccttgccttttggtctgtttctacttagctgactcctcaattgggtagaaacattcttcatcaatactatactgttataggctgtcccttgtgatttcaaactctagtaccagatactgttctctggttggttcttatgggcatcacttgtttttctggctaaatactagatctaaggtaggaatatggcttttgttttactaagcagtggttcaagccctactgtgagcgcactgctagactggcagatctctgagaatttcagaggattcctatataatgttaagtgactaaacttaataaacttaattaaaatcaacatctcaagatattgaaaaaa

SEQ ID NO: 65187 - DNA, 422 bp, Homo sapiens
ttttttttttttgaggcagagtctcactctgtcacccaggctggagtgtagtggcgcaacctcagcctctccaagtgctgggattacaggcatgagccaccactcccagccaatagtgaattttctaagagcatgtatccctatcagtaagtaacagggatacatgaagatacttataaaatacagaaaaactgcccagcaaatcagggccctaaacagttggtagattccataaattcaactggctaccatgtatagccctcactgtaaggtaggtggttaggtttctagagagcattagtcttagaattatgaagagccatattaacccaaatgatttctaaatttagatatatattttccctgctacataaaaactctgggtaataactagaaatagacccacaatttagagacaatgt

SEQ ID NO: 65188 - DNA, 1319 bp, Homo sapiens
aggcagcacgcggaggagcgcggccgccgcaaccccaagacggggttgaccctggagcgtgtgggccctgaaagcagcccttacctcctgcggcgccaccagcgccagggccaggagggcgagcactaccacagctgcgtgcagctggccccgacgcgaggcctggaggagtctgccacggccccctgagcttgccggtggccctcgggtgggcggggtggcgccgcggccactgaagcaccgcgcatggagtggaaagtgaaggtgcgcagcgacggaacccgctacgtggccaagcggcccgtgcgagatcggctgctgaaagcccgtgccctgaagatccgggaggagcgcagcggtatgacgaccgacgacgacgcggtgagcgagatgaagatgggccgctactggagcaaggaggagcggaagcagcacctgatccgggcccgtgagcagcggaagcggcgcgagttcatgatgcagagccggctggagtgcctgcgggagcagcagaatggcgacagcaagcccgagctcaacatcattgccctgagccaccgcaaaaccatgaagaagcggaacaagaagatcctggacaactggatcaccatccaggagatgctggcccacggcgcgcgctccgccgatggcaagcgggtctacaaccctcttctctcagtcaccaccgtgtgagctgcccgggcgggtacacggcccaggcccagggaaccccctggggccccggccctcactctcctatagagattgtgtgtgtgtgtgtgtgcgcgcgcgcgtgctcgctgtgcgcacgcacacatctcgtctgggtgtgcgcacagggctttgttagcagagagaagcccctgaggagaagggacgcttttcttccttctgcccaagtaaagtgaccatgccagtggccagcactgggggcacacctgtgatgggcaccccttcagctgtgcgtgtgcattccccatcccccatgctcttgcgtgtgcttgcacgtgcacgcacacacacacccagtgctctctccacccgacccgtgtacttgcagacagggaagctgagctgaaaggagcacaagagagtgtccggcttcgctgctgagcgcggcctctccccgccgctgcgcactgcagttatttgtagacaaaggcacccctgatttttgtggtttttctccctttctgtgcttgccaatagttgttttgttttgtggacctgccctgggggctggcagctccttcaggcagcctggcagaagtggaactcccctctccactgatggctgggaagggagttggggaggaaga

SEQ ID NO: 65189 - DNA, 1591 bp, Homo sapiens
ttttttttttttagcaaaaagtagacttttattacagcagcaactgaggcgaatcgaatggccccccagggccaccactgcagcaccacctttctctcccgccccggccgccccagcgggattgtagaattcggctcccctagtgcccgtgggcctcctttccacacaggctgggcgggagccggcagatcagcgactagcccccaactagaaggcggctgctgagaaggcccaggcccacgtctgtgcaaaacaagtaaacaaagtgcagaggggaggaagagaggggaggggaaaggatgatgctcagaaccagggagcccccccagccctcctgaataataaaggagggaaggggcttcacagggtaatactgactggggggaagggacaggagggctgcagcacgtccagggacagccacagcgcagatcagggcctggcccgagtgagctctaagaggagacggtgacagcggctgagttgagggtactgttcctggcaaaattgaacttgttcaaggtctcttctagcagagaagtcaaccggctctggtcagcctcactaatgaagcccagctgcaccagctcagccgccaactcggggatattctcatttggcatcaggtcacagctcaggtgccggttcagtttgtcctccaacttcagcagaagtgtcaggtggtgtttgactccctcctccaccgactcaatgttgcactgcatcagcaccaccttgcgagtctccacctcagctggttcaggtgtcggagtcttgacagaggggggcacgacaggtgatgtcacctcctcctgctgtggctgctggggccgaggcagcccaaaggctgtcagaggatagatcccattcctgacatcttcaaggaatttatctaattccagagctggtgactgagagtacaaagtctgaactggttctcttcctggtcctgcagggatttcagccagtacggcactagtatccatgtttttggtgatctcctctagagcgttctctgggatcatgtgttggtgtcccacaatgcagtgggccgcaaggagtttgagcgagggcacttcaaacaatgctgggtggaacagaagttctctggctgttggtctgcgagcaggctcagactgcaggcacttttgaatgaactccctctgtaatgggtcttctagaagctggatggcactgctgatggcttcctgtggcacatatgaggactctccattgccctgaatctccagcactgccatctccagtgcacacatgccaaaggagtagatgtccactgctgttgtcacattagtgacttctccatactctggtgcaaagaagtgtagattcttctgctcttctcgacaagtcttcacatgattgttgatagtgtcaggagccacagagccaatcttgatgagtccgttgtgctggatgaagatggtgtcacaggtcaggttcccatggatgatgggggggtcacaggagtgcaggtagcttagggcagagaggatttgtgtgcaccaacgcttccatgccttttcattcatcgtcttgtggttctttttggtcttcttcagaaattgcttca

SEQ ID NO: 65190 - DNA, 1458 bp, Homo sapiens
ttttttttttttgagaaaaaaattgggcttttattggcaattacaaaagtaatagattttcttacataatacgttccttcagtaatatatttttcaagtattttaccgtagaatttctaaagtactttgtcattgaccccataatttattataaagtaggtcccataatcacattttttggaagttgctgaaattgagataaaaaatattgtttttttatgagaaaaactggacaaaatacagaatggccaaaactagattaactggctcagttatgtctactaggtgaaagaaaatacagaatctgttactgtagaaattttaagaggttttgagtcagttccagtataaaaataaggccaaagtgctcctgtaaaattatcattaaaagtatagagaagagatctatcattcaaattataaaaggaaacttcattcatttcatagtctaaaaaaatgccaatcttactaggaattacttgtggcagcagaataatttccctgtggcccaatacaatataattattctgactagatcgccaaattccccataatccatcctgtactaaaattggttgactcttcctccttctgggaagacagtcattacagacaccaagaatccattcaggcttgtctttcacttctacttcccagtactgcctgccacaactatatcccttagaacccagaacagctgggaggagataaaatcttcttgggttatgaggtacattttgtgttgtatttccatagcgcacagtttttctatcttctgagactataagtttacgatgtgctgtttcaggatctagaattacatctacttgaaatcgcttgataatttagtctaggccagaatattgtggaggcagatggtaaccatatttttttaatttgaataaaaacagctcagggaattttaaattcttatatctgtgatagatatccttaacatttgccagtaattccagttctgacttcacatatatgctctctatctcctttagtagatattttaatgaggaggtataatctgaaaattttgttaggctttcatttagttgtgctaaaatatccatctcttcatcttgtaattgcctaagaacagtctcttgctcattttggagaaataacctaagttgctcaaattcagacttgacttcttctgccctatgttttacctttttcttcagttccagtgatttcctggtttgcatagttatgactttttcaattagttccactctctccttccacggtgcattgtattcctccagttttttcctatgataggaggcagccttctttatgggccaaacacagtgatgctggtgatcagtggacaaactgcaccttggacataaaagctataggtctttctgacagaagaaagtcaaaacctgattatgcttcttacacacatgcttctcttcctgcctcttcctcttcttgctt

SEQ ID NO: 65191 - DNA, 1122 bp, Homo sapiens
ttttttttttttaagtttagggcatttatatatctgcaacccaataaacccctggtaccatgcagctcccccaaattcagtgcaaccaaagctgctgaaacaagtccagccccagaaggtgtagtggcactgtggtgttaccttatttttatatgacccttcaaaaaggacactgaaaacccagtgcctgtttgcagagatcatgtgtggaaattgaaaccctgtctttaaggaatgaccaaattcatgctacttaacctgaaaacttgggggcaaagtggttgtgattatctgaagggctgctatgtagatgaagtattaaacatgtcgtaggcaaggtttagaggagaatgtggtacttaaccttctatagatcccacaatgaaatgacctgccttgtgaggtagtgagctccctgtcaagagagattttcaagcaatgggtagaagaccacttggcaggagtgttgcaaaaagtgggctaaaccagatttttccaacctagtatggaggaagaggcagagtaggggaaggtcctgcccctatgagattctcctgattgcatgcaagatgacaggtaatccctgtgtggacagactagaaaagcagacagcccctaaaatagatggggagaacttttagccctgatatccacacaaactattttaggatagggtagcttggaaaactttaagcaaatgacgtcacctctcctaatgggactgttccagacacgcacagggaggcagccagcgcattgcaagatacaaagttcagctctgtgcagcaggagacccgggtttagttctgactctgccctgtatgacctggggctcctccttcccttttctgggaccctccataaaatgaaatgaacgtaggcagtccttccccttctaatgggcgttgcccctctgactggagcccccgatagcagatctagggctacagtttggggccttggggctacacttgtggacagccagagaccacctctggcggaagcaccggccacactcgaggcaggggaaaggcttctcccccgtgtgcagcagctggtgctgggccaggtggctccactgagcaaaacgcttggagcaaaggaattccaccacgctgacta

SEQ ID NO: 65192 - DNA, 735 bp, Homo sapiens
ttttttttttttaatacagagtctcactctgtcacctaggttggagtgcagtggtgtgatgtcggctcactgcaacctctgcctcccgggttcaaacgattctcctgccccagccactctagtagctggaactgcaggtgtgcaccaccacgccgggctagtttttgtattttaagtagagacggcatttcaccatattggtcaggctggtctcgaactcctgaccccaagtgttccgcccgcctctgcctcccataagtgctagaattacaggcctgagctactgcgcttggccccttgcggtacttttggcccaacctcctccactggctggggacgcggaggccgaggagagaagttcacttgtccctgggttctaacctttgaagtggttctcaagggtttggggcgaagagtccggggtggggaccgaagatgcagctctatcctgtgcccctgggtcgcaagcaggcagcccagcgcttcgcgtgttctacttggcctgtccgctgccgcctaatgagctcaggtctaggccgagcagagggggcacctggtcggactcggttgggctcgggcggccccgccctccccccgcccgccaggcgggcccttctcgacggcgcggggcgggccctgcgggcgcggggctgaaggcggaaccacgacgggcagagagcacggagccgggaagcccctgggcgcccgtcggagggctatggagcagcggccgct

SEQ ID NO: 65193 - DNA, 569 bp, Homo sapiens
ctaacagctggggaattaagtccccacagtactgtccccccttccttactgcgctacgaaccccacattgaacccccatccctccttcattctacaatctctgagcgaaaccccaccccctcactgagcctcaaaccctgtgccccttcaaaccttgtgaggcccctggcgttggccttggcattggccagccctcctgccccggagatgcacatggcccgccccggcccggcccactgtctcctccctcctagcctgcctctgccccaattctcctctcaatctcctgcgtgattcctctgtcctcagtcatacccagttgaggggctcaccccacgggttctacccgatggagggggccatgttccctgctcccgcccttcctcctcaccagtccttgcctcggtatcagcccccaggtggggagctctgctgctgcctggaccatgccctacttccctctcctcgggatgtaggaaagggagggccagccctagagctcacccaccccccacagcaagcctgtgtactgcgctctggccaccttgcttctcgcctccataacctac

SEQ ID NO: 65194 - DNA, 1231 bp, Homo sapiens
ttttttttttttgtgtgaacaagccttcattgtgcaagcgtgagcccaacaaacaaacaccaggtctgcgctggccgaagacgaagcgtcctccctggaggtgggaacaagtcacctctgaccacacctcctctgacgccatcacctcctcctggccccacccaagggctcgacacaagccccaaggtcggggggagaggggcggggcggaaccgagggcggaggccaaggtgggattccaggaaggccttccgaaggatggaggtgggtcctgtccctccaggtagcttgtgggtgtggacagcaggacttgctggctcagtgtgggcacaaggacactgtgccactggttgagtgagtggtgagggattggaggtggctcccagaggcctccatctgcatggccctggccctgtggctccagcaggctgccctggctgtgggtagcccaggagccacatgcgcttagtggggccgctctggggcaggggctctcacaggacagcatgagccactgagccgcctggggagggccaggccaggcggggagctgtggtgcaatttgctcctgtccctggaggtctgtgggcggaagctgtgggcacaggtggacatggctgtcagacgtggggtcataggctcccactccccagctcctgcctcctcacagacagaagccacggccaaggagaggagagacatggggaaggcagagatgagggaacaggaagggagaaggcaatgaggaaagagaaagggagggtaagatgcggagggcacaggtggatggggacgagggggccaagcatggacagcgggaggggagaaggcggaggggccgagaggcagctgcgcaagagggccttcaggcagagttgaggtctgtggccttgggctgggccttgcgggaggtcagctccgacagcttcttcagccgcttcttcagctccagcgggaacttctcgtagcacctcttacacacgggcttcatgtcgaactccacaaacttgttcttcagggtgagcttgctgttgcaggtggagcaggagaagcagctcacacaccaggccttgttgagggccgacaccacatcgccttcaatcacatggctgcagttgtagcagacgtccccgaagagctgtgggccgagcagctgtcagagtagctggttgtagtgagtctcgcagtaggccagggccttcttctcatagttgccgtgccccagaaatgc

SEQ ID NO: 65195 - DNA, 2545 bp, Homo sapiens
gcgcaccagcccttaaggtcatcctgcggtacacctagaccgacgcccccgccatctggtggctggacccagagctgacctatggctgcgccaagcccttcgtcttcacccagggccactccgtgtgcaaccgctccttcttcccgtgctttgacacacctgccgcgaagtgcacctactctgccgtcgtcaaggcgccatcgggggtgcaggagctgatgagtgccacccggagtgcatacatggaggaagaaggcgtcttctacttccacatggagcaccccgtgcccgcctacctcgtggccctggtggccggagacctcaagccggcagacatcgggcccaggagccgcgtgtgggccgagccatgcctcctgcccacggccaccagcaagctgtcgggcgcagtggagcagtggctgagtgcagctgagcggctgtatgggccctacatgtggggcaggtacgacattgtcttcctgccaccctccttccccatcgaggccatggagaacccctgcctcaccttcatcatctcctccatcctggagagcgatgagttcctggtcatcgatgtcatccacgaggtggcccacagttggttcggcaacgctgtcaccaacgccacgtgggaagagatgtggctgagcgagggcctggccacctatgcccagcgccgtatcaccaccgagacctacggtgctgccttcacctgcctggagactgccttccgcctggacgccctgcaccggcagatgaagcttctgggagaggacagcccggtcagcaaactgcaggtcaagctggagccaggagtgaatcccagccacctgatgaacctgttcacctacgagaagggctactgcttcgtgtactacctgtcccagctctgcggagacccacagcgctttgatgactttctccgagcctatgtggagaagtacaagttcaccagcgtggtggcccaggacctgctggactccttcctgagcttcttcccggagctgaaggagcagagcgtggactgccgggcagggctggaattcgagcgctggctcaatgccacaggcccgccgctggctgagccggacctgtctcagggatccagcctgacccggcccgtggaggcccttttccagctgtggaccgcagaacctctggaccaggcagctgcctcggccagcgccattgacatctccaagtggaggaccttccagacagcactcttcctggaccggctcctggatgggtccccgctgccgcaggaggtggtgatgagcctgtccaagtgctactcctccctgctggactcgatgaacgctgagatccgcatccgctggctgcagattgtggtccgcaacgactactatcctgacctccacagggtgcggcgcttcctggagagccagatgtcacgcatgtacaccatcccgctgtacgaggacctctgcaccggtgccctcaagtccttcgcgctggaggtcttctaccagacgcagggccggctgcaccccaacctgcgcagagccatccagcagatcctgtcccagggcctgggctccagcacagagcccgcctcagagcccagcacggagctgggcaaggctgaagcagacacagactcggacgcacaggccctgctgcttggggacgaggcccccagcagtgccatctctctcagggacgtcaatgtgtctgcctagccctgttggcgggctgaccctcgacctcccagacaccacaattgtgccttctgtgggccaggcctgccatgactgcgtctcggctctggccatgagctctgcccaggcccacaagcccctcccctgggctctcccaggcagggagaatggggagagggacctccttgtgtctggcagagacctgtggacctggcctccccactcccagctctcttgcactgcaggccctggggccagcccgcacacaccatgcctcctgtctcaacactgacagctgtgcctagccccggatgccagcacctgccaggtgccgccccggggcaagggccccagcagccctatggtgaccgccacactgtgccttaatgtctgccgggggcccaggctgtgctgtccctgcagcacgcctccttgcagggatctgagccaccctccccgcacagccctgcaccccgcccctagggttggcagcctcagttggcccctggcagaggaacaaggacacagacattccctcagtgtggggggcaggggacacagggagaggatggttgtccctggggagggccctctggccccaggcaaccttagcccctcagaacagggagtcccaggacccagggagagtgtggggacaggacagcctgtctcttgtagcttcctggggtgggaggcacaggggcaaagcaataccccagggaaagtgggaggtggtgctggtgctctctccaggcccaccatgctgggagaggcggccagagcctggggcctccagcctgggactgctgtgatggggtatcacggtgatggtcccattaaacttccactctgcaaaaaaaaaa

SEQ ID NO: 65196 - DNA, 1973 bp, Homo sapiens
tgcacggaaccgccgcgacgatccacgcgtacgcctgctgcccttgccagcctgcgcccctacacagactatgtggttgtttcggaccagattctccaggagtccgaggacttctttacgctcatcgagtctcatgaggggaagcccttgaagctgatggtgtataactccaagtcagactcctgccgggaggtgactgtaactcccaacgcagcctggggtggagagggcagtctgggatgtggcattggctatgggtatctacaccggatcccaactcagccccccagctaccacaagaagccacctggcaccccaccaccttctgctctaccacttggtgccccaccacctgatgctctaccacctggacccacccccgaggactctccttccctggagacaggttccaggcagagtgactacatggaggccctgctgcaggcacctggctcctccatggaggatccccttcctgggcctgggagtcccagccacagtgctccagaccctgatggacttccccatttcatggagactcctcttcagcccccacctccagtgcagcgagttatggacccaggcttcctggacgtgtcgggaatttctctcttggacaacagcaatgccagtgtgtggcccagcctgccctcttccacagaactgaccaccacagctgtctcaacctcagggccagaggacatctgctccagcagcagttctcatgagcggggtggtgaggctacatggtctgggtcagagtttgaggtctccttcctggacagcccaggtgcccaagcccaggcggaccacctgcctcagctgactcttcctgacagtctcacctctgcagcctcaccagaagatgggctgtccgccgagctgcttgaagctcaggctgaggaggaaccagcaagcacagagggcctagatactgggacggaggctgaggggctggacagccaggcccagatctctaccacagaataacaccctgggctgtgacaaggcccatgatgacatttcatgaggcccagatgtgggcaggcagcccgggctgcactatgcggtcaggattccttgctgctttggtgggacatgaggcctcagtgggtggtgagagggggccatgggctttgtgggaggatatcttttggccgtgtaccctcaggtccagtgcttggtcctgctctggtcactggggcttcccaggaggcagcagggtctggtcataatccagtgtgaagatgaggtgaggaaggaaggggttgctgtccagtgttggcctggtcgctttgattcttcctgcacagctcagcccaccccatctgtactggaagggaccctggagccctgggaccaccccctttcaagtcccaaacactgagtcctctgtcatgtgtccttgtccctaggctacaatgctacacttggctcaggctgatcaccatgctagtcacaggagggagagagaggcagtgtacttgcccccatctcctggagggaggtgcgttggaaattctaggcccttcagcagagacccatttgtgcccagaccacaatatttcttcttcctcagggactacatgccacagacctgtatccccagtggcaactcctgttagctcccaaacttaaacagtgatctcttctaaatatacaaggcatctacccagccccaatagtgaataaaagtcacaaatttaagttcaacaccctaagcaatttctcaaagccagtctacctgactaggtctatccacggcacggttcccaaccccaaggggaaattaggggattagattaagagtaggtaaagacccttttgttctttcctgttgtaggggaggaagctgttctccccaacccaggtgcctttgggaggttaaggctagggttaggccctgcactccacctggggacggcccctcatcacctgaagtcctctgctgtgttgactggaccctcagttcc

SEQ ID NO: 65197 - DNA, 713 bp, Homo sapiens
cagagactgggccacgtgtaacgtagagcacaggtgagggtccacaccgacgccagagagcacccctacctcccacactggtgtttgcgttgtaactgggagaaagggcgacctggccccagccggcccctacctgtacgtggggatgatctgcaggctggagtccggctttatctgaaacttcagagtcaccccctcgaacccagggtccactctctcggtgccccggcaggggttcagctgtttccggggccttctctggggtggggccgagggagtccccgggggctgcagacggcggcccttttggctgatcctggtctgtgtgtccttggaatccctgtccagcagcaggcggccctgagtccccagagccatcgggtcccagcaaggccccaggaccggggtgtcctgggcaggggactgacccagcctctccactgtctcttggaggaagcacagggcggtgaccgactcctggcatgcaggccagagggacctctcactgattctgcagcatcctggggtcctcggcttgtcctgggagggggatcctcccagccgctccaggttcagacagggcggcgccagaagctttgctgggaggggcgggacctgtgtggtgggagcgctcttggtagaggatgcgatgagccccagctgagagcgaccagcctcggcggcacctttcctctttctggcttttttcaggc

SEQ ID NO: 65198 - DNA, 647 bp, Homo sapiens
ttgtacgcgtcgacccactcgtgcgggagctgctgatgcaggtggatgatgagcacctgtcattgactgatcagaaggaccagctgagcttgcgtttgaaagccatgaagcggcaggtggaggaggctgatgaggaaatcgacagactggaaagttctaaaaagaagctgcagagggagctggaggagcagatggacatgaatgagcatctgtaggggcagctcaactccatgaagaaggacttaatactgaagaagctgccgagtaaagtgctggatgacatggatgacgacgatgacctcagcacggatgggggaagcctctatgaggcgcctgtgagctacacattctccaaggacagcaccgtcgccagccagatctgagtgctctcccgggctgtggaagtacctgtcattcctgcaggagctgcagccacccaaagtgggaggcagggaggggagcatctgtctgccactgagaccaatcacagcctctttgcacagcatgccagctcctcagtgttacattcctcgccagggtctctcagtgggtcttcgacagagagcttttgcagtttaaaatgttgggatgcctgaggaccaggagccaccacccactggggtgttgtgagagatacactttggtag

SEQ ID NO: 65199 - DNA, 901 bp, Homo sapiens
ctgatttcttcaaggtgagtcatcatccccctgctgctgcgcaccatgcctgagtccaaaaatggctggacattgcgtcaggaaatcaaaatcaccagcaagtttcgaggcaaatacctctccattatgcccctcggtaaggttaccatctttgtcagaattaatgctcctggaatgaaaggttttctggcacgatggaggaggtcactggctaaagagtcaggagacaggaggtctgattcgagcactgaccctcactaactggctttgggcaggtatttaacttttcagctatcaaatgagtgtggaggctagaaactctttaaggacccatctagtcctaaattctttatcctcttagctatatttaacgcatctctaagcactatttagaacacaagttctagcatgcattaaaaaaaaaaaattctgtctcttaactgggggggttttcttccttactttggcagtcaggttctctctgtaaatcaaaactcatgattgcaaggttaggtttcttagctaatccttccgctttctcctctccttcctcccttttcctccacctgatgggttaggtatcatttatgtaatggctgaattctaggtcactgaaactttattttaaaaagatcttacttggggctgggcacagtgcctcacccctgtaatcctagcactttgggaggccagggcaggcagattgtctgagctctggagttcaagaccagcctgggcaacatggtgaaaccctgtctttactaagaatacaaaaaaattagctgggtgtggtggtgcacacctgtagtctcagctactcgggaggctgaggcacaagaattgcttgaacccgggaggcggaggtttcagtgagctgagattgcactattgcactccagcc

SEQ ID NO: 65200 - DNA, 1689 bp, Homo sapiens
gagcgatcgaggctgcagcgcggccgccgggcgcaacatgactgccgtcggcgtgcaggcccagaggcctttgggccaaaggcagccccgccggtccttctttgaatccttcatccggaccctcatcatcacgtgtgtggccctggctgtggtcctgtcctcggtctccatttgtgatgggcactggctcctggctgaggaccgcctcttcgggctctggcacttctgcaccaccaccaaccagagtgtgccgatctgcttcagagacctgggccaggcccatgtgcccgggctggccgtgggcatgggcctggtacgcagcgtgggcgccttggccgtggtggccgccatttttggcctggagttcctcatggtgtcccagttgtgcgaggacaaacactcacagtgcaagtgggtcatgggttccatcctcctcctggtgtctttcgtcctctcctccggcgggctcctgggttttgtgatcctcctcaggaaccaagtcacactcatcggcttcaccctaatgttttggtgcgaattcactgcctccttcctcctcttcctgaacgccatcagcggccttcacatcaacagcatcacccatccctgggaatgaccgtggaaattttaggccccctccagggacatcagattccacaagaaaatatggtcaaaatgggacttttccagcatgtggcctctggtggggctgggttggacaagggccttgaaacggctgcctgtttgccgataacttgtgggtggtcagccagaaatggccggggggcctctgcacctggtctgcagggccagaggccaggagggtgcctcagtgccaccaactgcacaggcttagccagatgttgattttagaggaagaaaaaaacattttaaaactccttcttgaattttcttccctggactggaatacagttggaagcacaggggtaactggtacctgagctagctgcacagccaaggatagttcatgcctgtttcattgacacgtgctgggataggggctgcagaatccctggggctcccagggttgttaagaatggatcattcttccagctaagggtccaatcagtgcctattcttccaccagctcaaagggccttcgtatgtatgtccctggcttcagctttggtcatgccaaagaggcagagttcaggattccctcagaatgccctgcacacagtaggtttccaaaccatttgactcggtttgcctccctgcccgttgtttaaaccttacaaaccctggataaccccatcttctagcagctggctgtcccctctgggagctctgcctatcagaaccctaccttaaggtgggtttccttccgagaagagttcttgagcaagctctcccaggagggcccacctgactgctaatacacagccctccccaaggcccgtgtgtgcatgtgtctgtcttttgtgagggttagacagcctcagggcaccatttttaatcccagaacacatttcaaagagcacgtatctagacctgctggactctgcagggggtgagggggaacagcgagagcttgggtaatgattaacacccatgctggggatgcatggaggtgaagggggccaggaaccagtggagatttccatccttgccagcacgtctgtacttctgttcattaaagtgctccctttctagtccttaaaaaaaaaa

SEQ ID NO: 65201 - DNA, 666 bp, Homo sapiens
  misc_feature (1)...(666): n = a,t,c or g
tgaggcttggcatgacaaatccgccctatattttatagcatctggaggaaatggcaaaaatgcttaatcaccccagagtctacgcttttctgcacataccagtccagtctgcctccgacagcgtactcatggaaatgaaaagagaatactgtgtggctgacttcaaaagagtagtggattttctgaaagagaaagttcctggaataactattgctacagatattatctgtggttttcctggagaaacagatcaggattttcaagaaacagtgaaacttgttgaagagtacaaattcccaagcctgtttattaaccaattttacccaagaccaggaactcctgctgcaaaaatggaacaagttccagcacaagtggtgtctcttcaaaggaataaacttccttcctggccaaagccttgtggcaaagtaattgaccacagctttgacagcaacaaagatgacctcttcacatccacttccttagccctttccttccactttctgtttcaggagaagaaggaccattttnttgttattaaaatgactatgctgttctaagaatttctgactgattactccactcctgccatcagcttcttctttacggcccaactctcctaaaatatggtgctggatttgttgtgttgtagagtaaaaataatattgt

SEQ ID NO: 65202 - DNA, 1320 bp, Homo sapiens
cttagaccacgtggtggaattcgagccatggatggcggagggagcgaatccacacgagagctctccagaatctgactacccacttgttgatgaaccagggaagcattgggaaagcaaagacaatttttggaagtcagttttgctcacattcaatataattctgactatggagagaatccaccattataatatgagcacaaggcttaatccaatgagaaaaaaatcatataaatcgtttgagaagtgtttgccacctaatttagacttacttaaatataatagaagttatactgtagaaaacgcttatgaatgcagtgaatgcgggaaagccttcaaaaagaagtttcatttcattagacatgaaaaaaatcatacaaggaaaaaaccttttgaatgcaatgactgtggaaaagcctatagcaggaaggcacaccttgcaactcatcagaaaattcataatggagagagaccctttgtgtgcaatgattgtgggaaggcgtttatgcataaagcccaactcgtggtccaccagagacttcacactggagagaagccttatgagtgcagtcaatgtgggaaaacattcacttggaactcctcatttaatcaacacgtgaaatctcatacacttgagaagtcatttgaatgtaaggaatgtgggaaaaccttcaggtatagttcatccctttataaacattccagatttcatacaggagagaaaccctaccagtgtatcatatgtggcaaagcttttggcaacacatccgtgcttgttacacaccaaagaattcatacaggagagaaaccttacagttgtattgaatgtggcaaagccttcatcaagaagtcccatctcctcagacatcagataactcatacaggagagaagccctatgaatgtaacagatgtgggaaagcattttcccagaagtcaaatcttattgtacatcagaaaattcatacataatattcactttatgaatatgagaaggccttattaaatattttgctaaatcttattaaatactaaagaattcatggtgagaagtctacaatttaaatgaatttggaagagtagattcccataaaaaacaaccaatgccaatcatgttctggaagtgataataaactttttacagaaaatatgacagaaaacaactataaataatagagcataaagcttggaaagtaagcataccttaaaaaaatcaaaagaaccagttgaaaactacatttgccattcctgacttttaatttttataataaaaataattatgcaagtgtgagtttaaaatatatgccttatacattattattaaa

SEQ ID NO: 65203 - DNA, 1494 bp, Homo sapiens
  misc_feature (1)...(1494): n = a,t,c or g
ccaatatttggtatcttcatatgttatctctaggtagatttacaggttagtcatagtgcagaaatataggacagaatcagggtgctataatgtcattctctagaacccattccctttattttcattttaggaaaagcctttacctcctctcaaagacctcgacctaccagcccattttctactgacagtaacaccagtgcagccctgagtcaaagtcagaggcctcggcccactaaaaaacacaagggagggcggatggaccaacaaccagcattgcctcatcgaagggaaggaatgacagatgaggaggccttggtgccctatagcaagcccagtttcccatctccaggtggccacagctcatcaggaacagcttcttctaagggatccactggacctaggaaaaccgaggtgttgagagcaggccaccagcgcaatgccagcgaccttcttgacataggatatatgggctccaacagtcaaggacagtttacaggtgaattatagtaaatgagaggagacatacaaagctgctctgaaggaccatcaggtccggactcatggaagtgatgactctaaacagtgcaatgaacaatttatttatgtactattaaaagaactgtaaatgcaatgtaaagacacacagccacacatatcccacagatattttcattgtgttcttctcttaagtacaccacccaccttaactctttcttgtcaggagtatataaaaaagaaagaaaacaaaactcgccctacaggaagaaaaggattctcctctgtatataatttcttttgtgcattgctatgcaagctcactctttttagctctgctcatattattgtctgttcttattggtctgttgtactatatgtgaattaataggctgtggtgccatatattaacttttaattgtgtaacttttatgtttaaattttgcactgcaattttatttggtgataagcacaaatctctactcctcatgacatgaagaaaaagactgaatgtgaagggagtttctgtactgtaagctagattggataatgatggctgtaacaaatcatgttagatggttttcagttggggtgtagaaataggaagatgcaaaggaacaatggtgttggcaaagtcttctttgaatatcagggactgagtcaataaaaaaaatagtagaaaggtggcttttactattgacaaaagccggggtcaaaaaaagtagtttaagtcttaagactgaatatgcattaaagtatgcaggtagcaaagatgttaattaaatttgcttaaaaaaaagaatttaaagttttatttagaatcaattttacctgtcattgtaattgacccatctgaganttacaataagcaagaggaaattaaggtgttttgcaagagctgtatttatattaccagtttttttnaaaaacattttctgaattatccgtaattaagctctcccacttcgttaagtccaggattataatatgaagttcccc

SEQ ID NO: 65204 - DNA, 2362 bp, Homo sapiens
tctgggaaccttcaatgtattactgagaccatgaaccacaaaaataggtttgagtgaggtgtgagctagacctttctggaggctgaaagcattcacacacacacccctctgctagttacatggacacagaccttgagccacagcacacggcagccagtcgagctaggtcacaggatgattcttacaggacactgatattgatgtatttcacaaatgagaataagttgggaatgttagtgcaatttaatcaccgtaagggtgacttttaaagatacactgatagttaaaaaaaagacaattaaaaaatagcattttgttttttaaatggcacccattaaagactcaacagtcaaaatgagacaaatcagtcctttagacgttcacagacaattgaaaggcactttaaaaatccactttttaaactaccacttgagaacacatggtagcacagtcttaaattcatcctagttgatcgggaatgatgaatgagtgttggcaccagaaaatcctgcttgcagaagggggcgcaggtgtcggtccacgggacagccactggccaggctagctgccgcctcactccgcagccttctgtggctaaatggcaggacggacacacaggaatgggctttggaccacaagctctggcatatcgggaggcaaagcactcaagtactctgcagtctagatgacacatttcatggtttggaggacagaagtaggtttccacatcacatgaaaaggacagtgtcacagtggggttacccagtaaacagctaccaaagccatcatttcacgcttccctgtagttttatgagctcgccctctgcatgtggatatggggaaagccgggcatgaaggggtgtgtgaaaaagaacagcctctgtgactgactgcagtaagctcacaagtttgtcactgtcagacttagcaagtcagcctgcaaaggttgtgctgatctcttggccacactacctactcaggttcccatccatgcctcctgcctgcccccacccccagccccaccagtgagacttctgattggaagtctatagacataagaattcaactctgacccatggatgagaggatgaggcaaagaaccaatgggttatctagtaaacgatcaataactacctacccacaatgattgtcccaggccaatgtcacaagacgacattacttccaagaaccaagtcatcccttgcttctgcgggcccagtgccacgggtactgtcctgagtggtttggaaggtgggtagccgctgatacagggacaggcagatgtgcagacacttaccaccctggtccaccgatcccaccccatgcttccacctcccagagctcttgagataagaccttaagaaggatccttgggcttgcattaaaaccactttgctgtccgtggaggtctgacaggacccaatagttgttactacaaaagtgcttttgcaaatagggcaagttagaagaaggaggtaatatgaatattctttagaaaaactcaaatccatcggcttatcaatacccaaagtctgaggctacccagggcacaatttggtccatggaatgctgagtggaggaggcagctggtgtgaggctgcgcctgactcccaggagcatttagccatcctttttggcttggggagtgtcaaagagccggactgccttcctgcacagcagacagaaccagtagatctgaggagctacgaggaaggcattggccacgttgcagtagaatgggatgctgaagggtacttggagcaggcttagtccctgctggcggccataggaccagtacatgaaggggaagagaaggatccggcaggaaaggaaggtggccagcgtgaggattccattcaccttgtacagaagggtgtgctgctgctttagctgaatcagaaccctgcccagcgacacaaacggagtgctcagttctgccgtgaagatgcagccgacaaagaagtccccaaggtctccccggagcctctgtgcgactggcacaaggacaaagagaatgaccgcatgatgtgtgatcatgaggcggtttcgacttaggaagtttcgaagagtgagggagggcgcacggttctggtctctggttcggcaccattcacagaggtacatggcgtacgagtcatagatcatgtatggaatcagaaaccacacatattcccgggcaagccagtgcctgccggtgatcacgtcgtcgcaggagcgaatgatgacgatccccgagccggtggccagcacggcgtgcaccgaggaaaccagcctggtgctgatcatcacgcagtcggtgcggctccatccgggctgggagcggcgcagcgcgcaggccaaagcgcgttgcagcggggtcgat

SEQ ID NO: 65205 - DNA, 2349 bp, Homo sapiens
gaaagcgaggtaaccaccattacgccaagcttggcacgaggccagggaaaaaccctttgggcgtgatgagagtggtaatgctttcagaaataattctggccttaaagtacataaacgaatccacactggggaacgaccttacaaatgtgaagaatgtgggaaagcatacatctctctctcgagccttataaatcataaaagtgtacaccctggggagaagccctttaagtgtgacgagtgtgagaaggccttcatcacataccgaacccttacaaaccacaaaaaagttcatcttggggagaagccctacaaatgtgatgtgtgtgagaaatcttttaattacacatcgctcctttctcagcacagaagggtccacactagagagaaaccctatgaatgtgacaggtgtgagaaggtcttcagaaacaactcaagccttaaagttcataaaagaatccatactggggagaggccctatgaatgtgatgtgtgtggaaaagcctacatctcacactcaagccttattaaccataagagtacccaccctggcaagacaccccatacatgtgatgaatgtggaaaagcttttttctcaagcagaactcttataagccataaaagagtccatcttggggagaaacccttcaagtgtgttgagtgtgggaaatctttcagttacagctctctcctttctcagcacaagaggatccacacaggggagaaaccctatgtgtgtgataggtgtgggaaggccttcaggaacagctcaggcctcacagtgcataaaaggatccacacaggtgagaaaccctatgaatgtgatgagtgtgggaaggcatacatctcacactcaagtcttatcaatcataaaagtgtccaccaggggaagcagccctataattgtgagtgtgggaaatccttcaattatagatcagtccttgaccagcacaaaaggatccacactggaaagaagccataccgatgtaatgagtgtggtaaggcttttaatatcagatcaaatctcaccaagcataaaagaacccatactggagaggaatctttaaatgtgatatatgtgggaagttatagtggcacatcccagaagagaacctatgagggagggaatgccctggatgggggcaggatgaggatgcctctgtagcaggcagagcttaccaagtctctccgaactcaaatggaagaaataccttatgaatgtaagaatgtagggggtcatggcttgtaatttacacagtgtaaatgaaaccatcctagaggattatgaggaatcctttctatgtgattttcaatcatagcaagcaagaaaggctccagtgtcaaggtagttcagctcttacaggatataaaacagtccatacttgagagaaaaacttagatctgagtgatggaatgtgaagcaaatcttcaaaatcagtagacatttctggacataaaacacagatgaggaaagggcttcaattagaagttacgtaatcaccatcagaaagttcatgtttggtaaattctgttactagaaatgtaggaaattcaggtatagctttgaatcccaattacacattggtcagtgggaaaactaagggcctccaacaggcaaattcagggaggataggtttcagggaatataaatttatttaatattagtggtctttaagtataaacttgatgtaattggtttgggagggggcagtgatgatgacttctgaaacaaaatttggatttccttttaggaaaagtagaaagcatagacttacaagtctaacaggagataggagagagtcactcataaaaaatgcaaattgatgaacgtactattgtgatacattagttgaatggatgaaacttttttaaagtttcagatgaactcccataatgaatgatgaatttgtgatgagggataacctggaagtggtattcacacattatgctacaataaaaggttctaccgtggagaggattttgacacattcagtaactaatggaacacaccgtcaacatgaattcgcaccttacatgacagaagtgattcagggattcctatgaatagaaatgctgagaaggaacgcattttattgcagaagctaaaaagctaaagtaccagtcatctagagagaaggaaattaatgtttcttaataatcctgttaaatgtttgattgtttttggaatgtgttattgtaaagatgtcatgcaggacatgtatatgttgtctgttgtaaaatgttaacgaatactttgttcagggctcactctctctttgtcatgaaagccagctccttgtggcgaggtaaagtggaattccaataaagaaattccttaaatcaaaaaaaaaa

SEQ ID NO: 65206 - DNA, 1281 bp, Homo sapiens
ttttttttttttaatgtataaagaaaagagtttaagttgggcgcatatgtgtgaaggcttaaatgaaaacatggtgcgggcatctgatcaccctctaggagagccctcaggaaggttaaaatcatggtggaaggcaaagcgggtgtcggtatttcacatggtgagaatgagggcaagcgacagggaagtgctatgcacttctaaacagccagacctcaagagaagtcactattgccaggacagcaccaaggggatgacgctacatctttctcagtttgaaaaatccacttccatgattcaatcacctcccaatgggccccacctccaatacctggagattacaattccacagggatttcaagagaaggggtaaatatacaaggtatatccagtaagtaggaattattccggtggattccagaaactaggacaacgtctaaggccttggtcacattgagtttagttgtaaggctctctcccagtatgtcttattcgatgtttagtgaggcctgagcgacaaataaaagatttcccacactcattacatttataaggttttttgccagaatgaattctttggtgtttgctgagggaaaacaaccgcccaaaggctttgccacattcaatacatttgtatcttttctctccagtgtggattctctggtgacttacaagatgtgaactatgcctgaataccttgccacattcatcacatttatatggtttctttcctgcatgaattatctgatgtgcagtgaggtttgagctccgtttaaaggttttgccacactcattacatttgtaaggtctgtctccagtatgaacagtctgatgaagtctaagatggacacgctgactaaaggaattcccacactgattgcatttgtaaggtttctctccggtatgaattctctgatgtctattgagtgtggagccctgattaaaggctttgccacattcatgacatttgtatggtttctctccagtatgaactcttcgatgccctacaagatgtgaatactgactgtagaccttgccgcattcattgcatttgtaaggtttctctccactatgaattctccgatgcactgtaagacgtgaacattgactgaagaccttgccacattctttgcatttgtaaggcttctctccagtatgaattctccgatgccttgcaaaagctgaacggtcactgaagaccttgccacattctttgcatttgtaaggtttctctccagtatgaattctccgatgcactgcaagacgtgaatgttgactgaa

SEQ ID NO: 65207 - DNA, 1240 bp, Homo sapiens
ctttttataactctccttttcatgtcacatattcttctcgattctagtgattgatcaaaggacacctcttcactttcccttgtcccttggacaccctgttttatcccatcctgtttggcttttctcacacctgcaaccacagacctgcctgagtttgtgtaagggtttctgaaataatgttccttctccttgtcgtctggctgtttgttcatctccgtgtacttgccttgtaggtgggcacttcctctgtggtgtacccagcagccatgtttgccccccaggtggctgccaggggcgtgccagtggctgaatttaacacggagaccaccccagctacgaacagattcaggtactgggataccctgatgggagagggagatgtgggaggcaggtacagacatggtcatctaaacatagttgacctactcctctaatttttaaaaaagacatagggtttgtgtttttttgtttgatctgcagttgcttttatggaagaacaaaatcattcactgtagactaaggtagggtagctctgtcattgtatgcgaaatttgccgcgggacttttgtttgttcacattttgaacgctcttcttggattccttaggctttgctttcccttacatttttaagctagacttagtgatgacctgtagttgtaggttacccaaatgctccgcaagtaagcctgggagacgcccttgcagaacctcatcacctgccgttcttactgggaggccacctggcagatacccctttggtctaatcgccaaggttatttgtatctgtggccatattatgacactgatcctgcttcccaagtttgggtgggaagtgtagattgtcatagtatgcatttttagtcttattcctgggtctgttttatttcttcatccatgttctgtcttttttctcaccccaacttttttttgcttttacctctaattcttgtccatctagttaattccttttgaataagttagaatataaataagtagtaaattaatataaatgaataaaatagaaaacttcagtgaaccatcttgtcattactttaatcaacagtttccaaccttggctgcatattttaaaaatactgatgcctgggtgccacctcatgaaatttcgatgtcattgctctgagttgcagcccagacatcatcattttgataagcttcctaggtgattcctgtgtgcagccaggataggaaccactcttctaagtctaaactgggatttaa

SEQ ID NO: 65208 - DNA, 379 bp, Homo sapiens
cggcacgaggagagctagcaccatgacttcaataccctgtatctttaacctccttgttaagtttgtctcttccagaatcaaagctgtaaaacaacacatcgttcttcaaatggagccccagatgcagtccatgactaagatctaccgcggatccctggaccagcctgctagcccatgctccgatgttaatgacatcgaaggcactcctcccgaggaaatctcaaatgcacaacccctactatgccccaattaagcaggaagcagttggagcagtcgacggccaacctccccaacagcacttgggttttcctgttgagagggggtactgagagacaggactagctggatttcctaggccgactaacaatttctaagcttg

SEQ ID NO: 65209 - DNA, 453 bp, Homo sapiens
cgagattcaatgtccgtacgccggagatcgtcgtgagcggaaactgcctggtgatccccgatatagtcctaatgtggcgcatccacgctcagataacgtaggtagcgttctacatcggtgtgtaaatcggtcatacgcgttcaatccaacgctccagaagctccggcaacatcagcgcaatttcatgaagtaactgcgttccttgcccttgttgatagtgactggcatcgcgactggtaaacagcacgacacccaaatcagcatcgcttcccagcatcgacatcgccaccgatcccaccgctttcgcttccggtagcaccaccagcagctctggtccgttaagcggcccaagatagtgctgttcctgcccctaacgctgaatacgcagcggttcgaaagactgacggcttaatgccagatgagtgtggttcgacggcgcacctaagcgccagc

SEQ ID NO: 65210 - DNA, 498 bp, Homo sapiens
ataatcaatctttacacacaagctgtgaatcactccatccccagctcttttaacttacgcgtcagggtgttgcggccccagccgagtagccgcgccgcttcctgtttatgcccctgcgtatgtcgcaacgcggtcgtcagtaacgtccgctccagctctggctgcgcttcggaaagcagattttgatgaccggaacgcagcgctctgtctgcccactgcgcaagaagcgtcgcccagctgtccggttgcatttgcgaagtactctccgcaaccgttgattcaaacagttcgccgggcaaatcctgaatcaacacttcctgcccggcggccatcaccgttagccagcggcaggtgttttccagctggcgcacgttgcctggccacgccagacgcgtcagagcagcttcggtttccggatgcagtaacttcgcttatacgcccagttcgcgcgcggcaacctgtaaaaaatggcgcgccagacgggcaatatcttccttt

SEQ ID NO: 65211 - DNA, 1500 bp, Homo sapiens; identical to SEQ ID NO: 65163

SEQ ID NO: 65212 - DNA, 3994 bp, Homo sapiens
tttgtcgtggaattcggttggagtctgacgggtaggcgagacgcgcaggcgcagagagccccagccacgccggcccaggtggcctcagcgagggatgcggagacgcccctgaacgaccatggcatcggccgacgagctgaccttccatgaattcgaggaggccactaatcttctggctgacaccccagatgcagccaccaccagcagaagcgatcagctgaccccacaagggcacgtggctgtggccgtgggctcaggtggcagctatggagccgaggatgaggtggaggaggagagtgacaaggccgcgctcctgcaggagcagcagcagcagcagcagccgggattctggaccttcagctactatcagagcttctttgacgtggacacctcacaggtcctggaccggatcaaaggctcactgctgccccggcctggccacaactttgtgcggcaccatctgcggaatcggccggatctgtatggccccttctggatctgtgccacgttggcctttgtcctggccgtcactggcaacctgacgctggtgctggcccagaggagggacccctccatccactacagcccccagttccacaaggtgaccgtggcaggcatcagcatctactgctatgcgtggctggtgcccctggccctgtggggcttcctgcggtggcgcaagggtgtccaggagcgcatggggccctacaccttcctggagactgtgtgcatctacggctactccctctttgtcttcatccccatggtggtcctgtggctcatccctgtgccttggctgcagtggctctttggggcgctggccctgggcctgtcagccgccgggctggtattcaccctctggcccgtggtccgtgaggacaccaggctggtggccacagtgctgctgtccgtggtcgtgctgctccacgccctcctggccatgggctgtaagttgtacttcttccagtcgctgcctccggagaacgtggctcctccaccccaaatcacatctctgccctcaaacatcgcgctgtcccctaccttgccgcagtccctggccccctcctaggaaggcccgggtcccacaggcaacacctaagtggaccaacccctctgcctgtcctgccccccagacgatgactgaaggctcctttgacaccttgagatgattctgctactttccagacttttcttacaaagcaaacacttttattttctatgcaaaggtgattcagagaatttatataaaggcgggcgaggggcagccgagcagggagctttgggacagggctggggcccccatatcccccccgggccacctgctttccctcctatggctcccctggaacaggagggagagccaagggggcggcccagcctggacagcgcccgctcctgcctgggtgcacacacggcgggcctgagctccagcatctgagtttgggggtatgagaaacaggggagcagaaggagaagaaaactgcctgtgctgcaacacgtttcctcatttattttttctttctttttctttttttctttttttggagggagaggtccctgcaaggtcccttcccgggcaggggagggatggaaatgccgtcacagtagtagggactggagcgtctacaaggatggaggggagctactcaggcctaacgttagctacaaggaaaaaggacgccttccgtgacagatccttgaggtgtctgtgtctgccccaagtggcccggcagtggccttccctccgggcccaaggcctgcagccacctgctcttaactcttgagtggggggtccggggggggacctgcaggggctcggggacaggacagcagcaagaggcaggggccaagggacggaggcctttcccgacagtggggtggggttgtacattcaagtgtgaggtgaaccctttggtggggagggggcccctgaagccctcggcggggccaccccttccccgcggcgcctctgagtctcagggagaggggctgctgggctcggcccggccggcctggcttcacagagggtctgcggattgacactggttcttttcataaaaaaataaaattaaaaaaagcagcatgtcacgtccgttgtgaccgaggcctggtcgtcgaaggggaggccccgcctggccaggctaccttcccactggagacaggcagggggacaggtgctaagggacctggcaggcagggctggcaggccccatggcgcctgttccagcagatgacaagcccaggtcagggtagagcgggcaggaggggggacgagggctcccacaacatgattttgtgtaaaatatggcagcgacacacgctcagggccgggaggtgggggttagggtggggacggcggcaacatcgtgtaaaaaagtgtcccagttcccatagcaaagagagctgtgaccgggtgttcgagcttctccagtacaagggggaaagccgcccggcgggggcggcgggcagggacatcatttggtttcctggtgctgtcagtccgcggggcgggcccctagctcccgtagtgcatggtgttggtcgggatggacatgggcgacgccatggagatggcggggccgcccatggtgaactggctgttgactgcatagtgggcactcgtgctgccaccaccactgccctgggcgccggaggacccttggacaatccccgtgctcattatggagcccatccgggagtgggtgtgattgacaatccccgtgttggctaaaggaatcaggttgttgtggcccacgctggagccactggcaataacactgctcaagtcataggcggtcggcatccctgccacggccatcccgctgctgaggttgtaggtgctgcccgtgttccacatgttttccgagggagatgtgtagtgggagccgggtgggggtgagggcgttgtgcccgtgtatctaaagaaggggtttttcagatccaggaggttactggacttggagccggtctggtccacctgggccacaatactgatgtcgtagctctgtcttttgttggcaataagcagacatgtccctgagagcgtgtcccctgccttggcgaacagtggtgactggaacaggcaccgcacctggtaccagtgggtcaggggctctgtcggggctgtggacagccacacggtcattatggagccgatgaaagcaacgtcaaaccagaaagccaggccgtggaccagccctgaatgcagcatgtggaatttgaatgggatttctatcctgtgcaaatctccttctttggccttcctaaagaagttccaccgtgtaacttgaacagacttggcccatcaggatccggatgtcaaatgtgtcccaccacaggctgccggaaatactcatccaccgcggcacctcggagggccgacaggtccactccatggaaagatggctggtaccagaagttggccttggtgaactgctccatgtagagctgttcatccgtgaagggtgcaaggtggacgtcaccaatggtaggaaacatgtttccgctgggcttcaggtacttcttggcgtggaggtagctctccagcatgcgctcgttgaagagcatgtagcccatgggctccgagatgatgatgtccacctgctcggggagtgacacctcctccaccttgcccgggatgaccacgatgcggtccgtcaggttgttactcttcaccaagacctcagcgtgctgggccatggtgctggcctccaccgcgtagattttccgtgctccagcttgggcggcaaaaaacgacaggatcccagagccacagccaacatcaagaacgatcttgtccttgaagtcggtgtggttttgcaggatggcgcgctggtaggtgcctgtccgcacgtagtcctgcatcatgttctgctgctgggacaggtagccataaaactggaagtactgcacggcagaagactcctccgtccgctcgctgaacacagaccgctccagggtgtggccccggcaggttttcaggatgttgtagaag

SEQ ID NO: 65213 - DNA, 1627 bp, Homo sapiens
  misc_feature (1)...(1627): n = a,t,c or g
ttttttttttttttgcagattctggaaggttctcaggtctttatttgcctgctctcaaattccagggaattgacttatttaacttnaatccatcaacctctcatagcaaatattttgagaaaacaaattttatattcagattcttattttccagtaggaaagtaaaaagttgcagctcagtgcacgtaaagttgagacagaaatggagacatccagcccccccctttctgggaccaagaaagatgacttggggaggaaacacaggttcagattgggaaccaggggtccacagtgggacaccaagggtggggcctgtctctccacctcctcacattcctcaaattatgctaacaggggacgcagaacacattcagggtgccttttgcagaaaggagatgccagagggctctttgaaggtcacaaagggggagggcgtgaaggaaatccctgcattcttcagtcccttcacaaggacagcttgtctcagggctttttcaagcctgtggagagaacacataaaagcccctgggcactggtcgctggcacgccaggccctgaagagtaagctccctccttttcccacctgagctcttcctgcttacacatcacagcagcgaccacagctcccgatgaccaccaactgctagggacagcccaagcccagcaccaatgcccaccgatggggggacggtggaactgggaagatgggctccccatcttcatagtggtgaggggcttcggcaggcccctcatgctgtacatggcatgtgtatctctgctcttctccagaaggcaccacccacagctgccccactttctggaaggttctatctcctgctggtctggtctccacaagctcagtgtcctgagtttggtcctcggcatccccgctgccaggtcagtgtgatctccgcagggtagaagcccagggcccagcacctcagggtggcctcatggtcagagatggggtggtgggtcacgtgtgtctttggggggtccgcgcgctccagcgtgtccttcccgttctccaggtatctgcggagccactccacgcacgtgccctccaggtaggctctgtcctgctccgccacacgggccgcctcccactttgcgctgggtgattctgagccgcgggtgtccgccccggtccaggagtgcaggtcctcgttcagggcgatgtaatccttgccgtcgtaggcgtactggttatgcccgcggaggaggcgcccgtccggcccccacgtcgcagccgtacatgctctggagggtgtgaagacccggcctcgctctggttgtagtagccgcgcaaggttccgcaggctctctcgggtcagtcttgtgtgttggtcttgaagatctgtgtgttccgggtcccaatactccggcccctcctgctctatccacggcgcccgcggctcctctctcggactcgcggcgtcgctgtcgaacctcacgaactgcgtgtcgtccacgtagcccactgagatgaagcggggctccccgcggccgggccgggacatggcggtgtcgaaatacctcatggagtgggagccggcccaggtctcggtcagggccagggccgccgagagcagcaggaggacggttcggggcgccatgaccagcatct

SEQ ID NO: 65214 - DNA, 1031 bp, Homo sapiens
ctactactggcctgccgcagcatggactgttacctggccattgtccatgccacacgcacactgacccagcagcgccacttggtcaagttcatatgtctgggtttgaggaacctgttcctgttactgtccctacgcatcttgcttttccgaaggaccttctacccatccaatgttagcccagtctgctatgaggacatgggcaacaatacagcaaactggtggatgctgttacggatcctgccccagtcctttggcttcatcgtgccgctgcgatcatgctgttctgctacagattcaccctgcatacgctgtttaaggcccatatggggcagaagcactggaccatgtgggtcatctttgctgatgccctcattttcctgctctgctggctggcctacaacctggacctgctggcagacaccctcatgggaacccagatgaccaatgagacctgtgagcgccgcaacgacatcaaccaggccctggatgccactgagattctgggcatccttcacagctacctcaatcccctcatctacgccttcattggccagaagttttgccatggacttctcaagattatagccatacatggcttgatcagcaaggactccctgcccaaagacagcaggccttcctttgttggctcttcttcagggcacacttccactactctctaagacctcttgcctaagtgcagacccgtggggttcctcccttctcttcacagtcacattccaagcctcatgtccactagctcttcttggtctcagtgtcagtgcagcccccactgtggtcgcaggaagcagaggaggccacgttcttactagtttcccttgcatgatttagaaagcctgccctggtacctcaccccttgccataattactacatcacttgctggagctctgtccctcctgcccttgagctcatggcactctatgttctaagaagtgaaaatctacactccagtgagacagctctgcatactcattaggatggttaatgtcagaagaaagaaaatcataaaata

SEQ ID NO: 65215 - DNA, 2416 bp, Homo sapiens
  misc_feature (1)...(2416): n = a,t,c or g
ttttttttttttttttttcacaagttatattttattttaacacgaggattaacatatagttacaaggtcaatacaagcctccagtggaagctctttatttggtttaattccatctccagagacaaacaggcaactctaggacctttacagtggcgatcggcctccacnacagcaaaatgcctccaaagtttagaattagtgcaacacacatacgaacgttttaaaggtgctcaacatcaggttaaaatagaattctggacctttttaaaaagtttttggatgatataagcacaggaggcagagccaataagaaacatgaaaccaatatttctggaaaaacacttagcatgaacgtcactttttgacgtcgtgtaaactttcttctgcaatgacggatgttaccaaaaggcattgagacctttgcgctgcgctggttagacaagccgcaggcttatctccacggtgagcaggataaaaacccccaaggaacagcccatgacaaccttctgtgcctttttatactttcccatcctacaaaggaaaaactgggtaaaggacaagttcctccctttcattgcgtttctaagaacttttcagggcaggttcttttaaaattagtcatcttacaacacaacagtattctagcacggtggcgaagtgacaggcggcagatacgggggaggaaggagacgttcacgggaaattccacattctactctatgtgaactgctccagaaaaatacagacatgatttcacagtaggattcccagagtaaatgatgatacataggacaactgacctcctctaagaagcccggctggggcagcagtgagcttttcatggagccacgcagactggcccggaagcaacacccaggttcaacatttaagagcactcgctataacattctttttggacgcaggtggtggaaaagtttaaaaaacaggcggaggagtgacggggggatacaagcatatcctatactgggggtgacggtcattcaaagagcaaattactgcagcttatatcttttccactatgttgcaagaaatgaatctatcctgacccataatatgaaagatgcgacgcacatgcattcccgaggctctaaaatcccattttaaagaaccgtttcacatcctcgtggagtggagagtggtccacttgacttggtgaggtcagaagttcctgaagatccctgtcgtccccgttggcgggggagcccattgtggagctgtggggactgccacactcaccatgcacctgttggtttgcagggacagaggtgcggccttgactcttctcaccctgtgtcatccgggcttgtctttcgtctgtcaagtcagtcctcctgcgtgactgatgggtgcaccacgcttaggtcacccgttgcagggaccggaagtccatggctctgccgcaaccctgagcggtttgcagtcccccccggggaagaagcagtcagagaggctcacgctcacctactttaaaaacccaaagccacttcctcttcacctgcctgggcctcagcgtctctgcgcttgtggtttctcgtccccgagggctgactgagctgctccggaagggtggtgtgtggtcaaccttggttggctgagaggagcaatttcctggtttccacaagtaaagacagccccatcccttgggacctgtcctttccgtccctgtccctttggcttctataggacttccttgtcttagattcataaacagcaagaggaactgaggatgcttgaggggaccacctagttaccaaagccaagcaaagaataaagctgcccgacatcatccccaggcttccgtggcgctctcggtcacaggagctttaggccaatggttcctcttgactgtttttgccccaaatgagaggaggggctgctttgctttaaggcgtggcggcggggggggggtggtggccacagattaggggacctcaggttttcctcaaaaacccacacagggaaagaaacttggctctaaaagcaaactcaacgaattccacatgccctgaagagcacgtgataaaatacaagggtggtggcggcgggatccctcaaaggaccacgagaggcacggggtctttggtgatgaaagtgctaacctcggcggggtgcggtagctcacacctgtaatctcagcactttgggaggctgaggcgggcggatcacctgaggtcaggagtttgagaccagcctgaccaacacggtgaaaccctgtctctactaaaaatacaaacattagccgggcgtggtggtgcacgcctgtaatcacagctatttgggaggctgaggcaggagaatcgctggaacccaggaggtggaggttgtagtgagccgagatcatgccactgcactccagtctgaacaatagagcgagactcccgtctcaaaaaaaaaa

SEQ ID NO: 65216 - DNA, 5020 bp, Homo sapiens
aacaaaaccggtatgtcaactatagcaaaatgtgatggggaaagagatgatacaacacaaaacatcacggaggtggctgctgtgaaaagcatttcaccagaagtttctgcctctaggagaaaattagattttaattctccaggtggttcttcaccagtagaaaattctgattgttccacaaatagcagattatctttctctcctgaaaatatcctcatccaaaaccaagacattgtgagagaagctgcagtgcagggagatgggcagaagcaaaggcagcctcaggccacagatctggactccagtgggacacatggcagtgagatgcttccagccacagaagtgactgtgtcaggagggttttctgttgaagaaaccagctgtggagacacagggagatctggtggtgaggccctggctgttgcaaatgattctaccagcacaccacaaaatgctaatggactttggaaattgaaatctacaactcccggtggtgctttgcctgagtgttttggcaccacagacactactttttcttcagcattttgcagaaaacatggagagacacaggatacctcccaaagtagcctgcctggtaccttacattgttacacaggcattcgagaggggggagacgacactgaggtagagagtgaggcatttagctgcagtgaggggagcgaacagcaagatgctcctgatgactcacagaaaaatttaggagacacagatgctgctgtagccgaggtgagaccttccttagaggtaggttatttgacgtcagctctgcaagattttaacataagtactttttctgagctggatagactttccacatcagaggttgtgatgtttcttgagagctgtcagttaggggattatagttcaggggactctgtttctgaatgttctagtaaaggaaccctaagtaaagaaatgaacaaagaattaaaggcaagtgaaataggagaaaaatacagaaagcaaccctgtgaggaagaaacacttggaacctgtgaagagtggattgaatcagaggaagatgattattcgttaaaaaatacaagtcagctcactcagtgttctttggaaactctgtctgaggttctgaccaagattaggcaagaacttcaaacaaattctgaagattgcaatggtaaagatactggcagtttattgctcttaaatgtaaataacaacatgaccactgagaatttaaaagagaaaagtccatttcgggaaacgactggctcctcatcacatgcttcagaaccaaccccacaagcagctgccttggacactgagggcagctctcccatcagcggtatgcctcagaatgaaaaccctcagagcagaccagaggcccgttcagatgcaggcaggcaaaccgatggtggggaagaagacctgccagaacctgtggagccatcagccttgtgctctgactctgtgatggagccatccatagagcaaagttctaactgcgaggccgaaacaacatttcagtgtcagatagcaacagtgacctcagaagttataaacgtacttataaataaggatcagaatctagtcattgaaaagggggacaactggacaatcatcagtggtgtagctgtcttgccacatgtggaccaggtcacactgtgtgacattcctggagacatccctatttctcaggatcaaggagagctggaagctggttgcatcccagtgacttctgctgagaagtccccagaggccagtcacactggccctgcatttcaggaggctccatgtggcaataatctttcatgtccccaagaggatgtttcaagcagtggtcagagcaccaactttgataagagtcgtttgcgaaatagacccgttaagcctagtatatggattagttctcaaatctatgatcaaaacttcgagactcagattgttgcgtctgatcacacatattataactcaaaactagagccatctggcaaaaataagaatcgatcaaagatttcaaacaaagatcagtcaaacaaaccagtaaaaacttcagcgtcgagcagagttgaaactcatcagagtgaagttgctcagtcattttcaggggaaaaagctaatacaaaaactcaaagaagccaaactcagaccattttagcaaatgctgatacatccactcctacagattgttctcctgacacactgagtaaaatacggcaagaggtggggcctcctttgccgcctctgcttgctcctctgatagctacacctccaaggacttcacagccactgtctccactgatatcgagttctagtccttcctcaccagcctctcctgttggccaggtttctcccttccgtgaaaccccagtgcctcctgccatgtctccatggccagaggaccccagacgtgcctctcctccagatccttctccatctccatctgcagcttcagccagtgagagggtagtgccgtctcctctgcagttctgtgcggccacgccgaagcacgcacttcctgtgcctggccgactcccaccctgtgcatctggccacgctgctgtgggagggcctcaggagaattctgtgaaaatccttgacaccatgtatccagagttatctgccagggcccggaccctcaacatcctcaaagggaatattcaactcacacgaggtccgcctgctgactgtaagaatttaccgggacctgccagtgctatgataggattcaaaacgatcacttcagcagcaactgcttttgtcaaaactgggagcagctctggtggtgactgtaaccaagacaagtcaagagatttggggactcagcaggattcaagcgggaaaagaacactgtcaacgtctacactgagaagtgctaaaagactgcgcctggacactgggtccccagaaccagaaaccaggggagtcactgcagaaggaatccacaaaaacctcccagggaacctccctccagctgaagttgcaacaacaaatgaggaaagaagttgttctagtccagccgtcagtgcagtttcacagttgcctttaagcccaaaagaaactgtggagtcccatgataaagccatagctaatgccctgaagaaaattgcagagttttcttttgatctgttacctgtcattcgtagtcatgtgtatgtgggaaatatctccaaaaagcccgtaatgagagatcaagagaaggaagttgtttatgaatttagcacaacaaaaaagcatttagcagagtgcttgcttcactctattctctcagaactaaaaattcagaagatatctatggaccacaattacattcacgccctctgcagggtgtatgtgggtatttgtcggcaactcggagacttggaaagagctcgtttgttttgctacagcctacttaaaagaagattttccggagtctgaaaaattaactttgtttattgcaaacatgtggcatgatatatttctctctcaatcggtgattaataaagcaatgcagttagttgccaggcaacgtgctaaaggagaggttctgaactgcttgagagcttttcttaattgggaaaagaatgccccggtagatgttggcttcatggtttctaagctgcttttgaccatacagttatgtccaaaaacagaatttcaacctagtgaaaaatttggtgaagacctaagtgataacacttgggaatacatatttgccattgatctgctctgctgccatcagaaatggatctggacgcatgataacatcataagtaaggagctgtggcctgtgatggataaatggataaaatacagaaaaggacatgcaaacattgcgtatactcctgatattattatagcctcaatactgaggctgattggtcgtttaggccaattgggtttgaaagaaggatttccatctgctgtgaaaaatattagttcggttattggtatgtttatacagcatgctcacgatgaagatataccatggggtatacagttagcagccgtgtatgctctttgtgacttgagtcccagcaatccagcagaaatttccaagatcctggaagcttggcggagagaggcctccaaaagcgttccgtctgcgattgtcagctgcctagaggaagtcagtgccctgagcacagaggagcttggctgacctgggatgccactgaggcttgagaagtgccttgacacattttgaacacaaatagtttgatcagctttcagaatacaaagggaggtttcaaaacaaaaagacataaaatagataaaacagaccagaggctctccttattgtttggcaaggagacaggagaaacaagcagtcgcatagtcgtttttccctaaatctaatacgtttcacttaaggctgttgtgatctgtgacatatgggttatattattgtgtctttgtcaaacaacaaaaacttgaacttagccctttttttgctgcagaaagtgtccttttagtggcttcttaaaattgagtggcattttataatgaacttaccaatataaaaacatgatttggttcctgagctgttgttgttggacttgtgttccaatgagtgactaggaaaaaataaattggcaaaaacctagagttttctgctatctttgctggaaatgagttgcaaaagtttttctcaagatgtagtgcgtaattgatcagagcaaaacatgcagagcccttagcagaaacccactttaatgcattttcttcatatccctaaagttccttaaaaatatgtgacaatgcatcaggaagaggagaactgaagagtagaagttcccttgcagatttttttatcagtgacatgtaatgagcaattcacagatgagcgcaggcagagctctgtgtgccgtgtacatatggaccgtgctatgatgtgtctcacattggatgatattccactttgggaattttagtatttgtatatagaaaatgggtttaataactcaccatggttttgatttgtcttatattcgttatttcttaaaactcttgtatgtgtttttataataaaaaaataaaaggtaagccatgggatatt

SEQ ID NO: 65217 - DNA, 1540 bp, Homo sapiens
ttttttttttttcatatttcaaatagtttaattttaaaaatattctattcagtgctaaaatatgtcttcactcactgttgcccatttccattttcttaaacttttttgaaacaaaaaataaaatcacaaagttcaattcaacatgcagatttcaaagaaaagggagctttctagaaactgagctgaaggggtactgtgggggatgggtactgttgtcagaacctcaaattcttgctggggcagtttgtgacaagaggcagggatgctggaatgacaggtagaggtgagaacaaagctgcgtgtgtgcagatgtgtgtgctgagggcaggggatggggacggcggccacaaagggctgtcagcagctagggtgcccgtgagaggtaggaccacctcaggcatgggcagagctggcaggacagcaagaaatctagacggactctctgcccttgtgtggagaaaagcccttcccttccctccaatgtctctacccagtcctccaacagcagcctacagggcccccagtcctaggggaaagtccgggagtctacagtctccgttcaagttcaagtaacctgaggcacgctctcttctagaaggtgccttccacatctctctcttctcgcagaagctgccagcagctccgtccagagattctggagcagagactgctgcctggaggtcacagatgaatcttggggtggccgatgctccagccaacttggggtgcaaaaaagacatgagcgctcctcttctcgggagcaagtagacacaggtgccagggtcaggaagatgatgctacagccccaagtcctacgccagccttccagcccggaaggctcatgtgtgcaggctcttgaccccagtgcttgcccttaccccagcaacgcggcgcggccagaaccagaatgcaataaatagaggcagggccaggaggcggagggccgggatggtgctagctttctgacgccgtctgcggcactgtgggttggtccacacagaagcgcttcaggggcggggcacctgagtcttcctcttcctcaacgacctgtgtctctagtggaactggttcttccttggtgagggtaggaggttcatcagcaacttccgaggagggcagggagggctcctccaggatctcctggcccagcgttgggggctgggagtcatccgtgcggaagtcggaggtgtgtgctgggctcagggactcactctgctgggggctggggcttgagttggtgctgctgtccaccttaagctgatagacgtcagacacggaactctggttgctgttttcgtcctggaattcaagaaggagagaggaattggctgaggcatcagaaggaaagccattaggttctcgggctgctgaactgttcgattttgacttttctttctccttgctgtctgtcacaggaacccacttaaatatcctcagggacgtgtcacccacagtcacccacttcttctccccaacttcaacgcctgaatacgcagagcgctcagcctggcgaactgacaccactccagggctactcgct

SEQ ID NO: 65218 - DNA, 1421 bp, Homo sapiens
ttttttttttttggaaatatattattcatctattttatattaacttttaattttttaattaaatttttaatagaatattcagggaggggttcttccaaggtgccactcaaacaaaatccaagcaggttcatcataagacgaaaaaggtacactctcagattggtttaaacctcctaacttaaaggacaaggaaggatctggtttttgtcttttggaaacccatgagctatctacttgttctttacttcagccaattagaagttcaactgaagatagctattgaacatcatcttaatgatgttataaacaggcaatttaaatattttattttgcataatccccaagctgggttatcacagagaaagcatctgagcttctcccagctcgccaacctgcctggcattccgtagctactagccagtcctgttttctttccacaaagaaaacaatgatttgttgttttcttctttgtctggaagaggggcttttcacaggtgggaggtgatgagtagtacattctccaaaaaaactcctgtatgttctaactggggagaacattttcctaaagttttcttccatgaaaatgctggaggtttgtagacagcccagttccagagttctgaagcctgcctgccccacgtgtgctctgtaatctatttctgcttgtgctcccggccagtgaggcaagaaaactgatattatttacacaaccaacaggctctttgggaagccttgttagtcatttctgtgatatcccgagcctcaactttggaaataacatcagatcttttcccaagtgaatcaactttaacaccttgaaagcaagtagtcctagagaaagaagaatcagttatgttttgaacatccagtgactgagaagaagaaggctgtagcttcccaaactcaaaacatttggactgtctctctggtttcaccagagaattatgtagcgacattggtgcagaacagcgaagaggtgacaagagtctattcttgtgaggacttaattcccggtagttaagaactgaagtctctactgattccccattcagcactcctgcaacatgcttgagatgctgctctggagctttcaaccctttgtcagcattagtgagtagcaactccagattcactttgcacgcaccttctaagccgctgctctgttcatcagcatttccttctgcaaatgaagccagtgagcccactttaggtagaagtgattgttcggttacacattcttctgaaggtaagacaatgttcccattactagatggcaagtttcctaaaaaatgttttgtttgcctaggcagggatgatccaagatggagaacagagtcagcaagctcctggtcatttcccaactccaaatggggtatctgaggaggtagtttgacgttgctactgaagtgagacagtgtgtc

SEQ ID NO: 65219 - DNA, 2351 bp, Homo sapiens
  misc_feature (1)...(2351): n = a,t,c or g
aatggcctctgctgcctctgtgaccagcctggcagatgaagtcaactgcccccatctgtcagggtaccctgaaggaagccgggtcactatcgaactgcggcccaaaaacttctgccgggcctgccttaccccgctactgtgagatacccaggcccagaccctggaggagtccccctacttgccccactctgcaaagaacccttccgtccctgggagcttccggcccaactggcagctggctaacgtggtggagaacattgagcgcctccagctggtgtccacactgggtttgggagaggaggatgtctgccaagagcacggagagaagatctacttcttctgtgaggatgatgagatgcagttgtgcgtggtgtgccgggaggctggggagcacgctacccacaccatgcgcttcctggaggatgcagcgggctccctatagggaacaaatccataagtgtcttaaatgtctaataaaagagagagaggagattcaagaaatccagtcaagagaaaataaaaggatgcaagtcctcctgactcaggtgtccaccaagagacaacaggtgatttctgagttcgcacacctgaggaagtttctagaggaacagcagagcatcctcttagcacaattggagagccaggatggggacatcttgaggcaacgggatgaatttgatttgctggttgctggggagatctgccggtttagtgctcttattgaagaactggaggagaagaatgagaggccagcaagggagctcctgacggacatcagaagcactctaataagatgtgaaaccagaaagtgccggaaaccggtggctgtgtcgccagagctgggccagaggattcgggactttccccagcaggccctcccgctgcagagggagatgaagatgtttctggaaaaactatgctttgagttggactatgagccagctcacatttctctagaccctcagacttcccaccccaagctcctcttgtccgaggaccaccagcgagctcagttctcctacaaatggcagaactcaccagacaacccccaacgttttgaccgggccacctgtgttctggcccacactggcatcacaggggggagacacacgtgggtggtgagtatagacctggcccatgggggcagctgcaccgtgggcgtggtgagcgaagatgtgcagcggaagggggagcttcggctgcggccagaggagggggtgtgggctgtgaggctggcttggggcttcgtctcggctctgggctccttcccccacacggctgaccctgaaggagcagccccggcaggtgagggtgtctcttgactatgaggtgggctgggtgaccttcaccaacgctgtcacccgagagcccatctacaccttcactgcctccttcactaggaaggtcattcccttctttgggctctggggccgagggtccagtttctccctgagctcctgagaaggagcagttacctactctcctctaagtacaggactcatatcaacccaagtaccatgtggacttgatccctggctgaatcacctggatgacttggaatagaaatgactgctttagaagatgggatggggccgggtggtaagggatagaagagaggactctcaatctactgatcaagtcctttccccaatgcccagtggatggccagggtacctggggactcaggctgctgccagttctgctcaccaccatccgtgcttggcacagaagtagctgcatagaaagagcactggatttgaagtcagaagacctgggttcttgaaccagcctgtcaaccagttgtatgactttaaacaaggcatctcacctcttttcatcttgttttcttccaataatgttagagttcatgtaatcacattctctagaaccatttagtttgtgttaactatgaaccaagcagtgtggtggccactggtgacttgaaaatatagagaaaaaaaaaacctgctctatatctgaaagagctcttgggaagacagagaaacataaagaggaaattacagcacagtgtggtgggtgttacgggaagtccaaccccagcattatgggagtttagggaaaggggcatagcccagcctggaaggagagggtgagtgggggatggctttctgaaaagggtggtctaaaggatgcctatggtcaataggggaaagagggggagaagcatcttaagaagaggaaacagcagagnactggctggatgacctgtgactttggagcactgggttgtctccattgtcattatgggcagatgtgtgccatccccagccgacgccactcactgcctctttcctcctggtgttgccacttctgggtgagattaaggtgca

SEQ ID NO: 65220 - DNA, 1811 bp, Homo sapiens
aaaaactcaagaccaccaaatggcgtctttatttacatattagagcgggtcagccaaggaaaatcctgcacaaatccttgtattacagttgcatctccctcttcctcagacttgccatgcttcctctttcctcttgctacagagcctgttgcacatctcttccctctcccctttgccgagttagtctctgcttatccttctggatctccgtttaagaatcacctccgagaagccttccctggggccttcccgtgtggcttgtggctcaatcatgatgttgataagagaaggtttagttgtgtctgcctaggctctgcctcagggatttttggagttcttctggtgtttgtacaaaataccctttgcctccaaatgcagtcatgacttgctcataatgtgaatttggcagcaaacacattggagggaccactgcagtagcatcttgaaattttaacatttctttccaagtatctgtatcaaaaccttggtaaattccattgttattcactaccaacagtatgattggcaagttgtacctgcagatggtttctacctccatgccagaaaacccaaatgcactgtctccttccacacagatgatccattgcccagggcttctatctttagccaccacggcagctgcaatagcaaatcccaaaccaactcccattgttccgaaagtaccagcatcaagcctgtgacgaggaaggtagttctgaagcacagtccgtccaatgtccatagtatttgctccttcacttaccacgaaacagtctctaggtagttgttcttgaacatggtagaatactgtgtaataattcataggcagggattttttagaagctagttccttggatgcagcttcattgctcttcattttttctctcagagttttccaccacttgctctctggaggatactgccatggtgttttatcaagttcctctaaaagctgcttagtgacagcatgtatgtttcctagcaaagtaacagcgggctttacattattccccaattcttctgcacagatatcaacctggataaacttcacatctggctgatatcttggaggcagtccaaaatgtaaaatccaatttagtctggcaccaaataacacaattacatcagcaaattgcaaagccctggatctggctgcacctacacagtatggatggttgtcagggacaacacccttccccataggggtgggcaaaaatggcagtttatattgctccaccaatttcttgatactctcttctgcatgagcgtaagcagcacctttcccgatgataagaaggggttgtttggcattcctaataacagaagccgccgtgcacacagcagaggtttctgccatgctaataggaggtgacatgcagcgttccatgtactttatagaattcacattcacctgaaggttcacaaaatctgctggtatgtcaacatagcaagcacctggacgaccatagatactgcttctcactgcctacgttcattacaagtagaagaaaagatttgtaaaatctcagtcttatcatattctactcaaagataatttaaaactggaaaatgaacacttttcatttttctggacatccttgtggagaaaaaaataattatgatgaaaatcgaaatgtcctctattgactacatttttaaagattttttgtttaaaagggagagagataagaaagtattcatttagggctttaaaattcatgttctattacactttagcttgggaaattattcacccggctctgcctgccaagtttttgcactgtaatatgtactttcatctgcttcctaat

SEQ ID NO: 65221 - DNA, 832 bp, Homo sapiens
tccttctatgcttattcggaggggcggcaaggcatgtttcccagtttttaagatcttgcccccccccataatttatgaggaccgttctgtgtccgggcatcagtgatggtgcccctgcatttcggggtgctctttggagggcgtgtttgttgaaaaaccacccccaaccccctgcccgccggtcccggacctggccaccatggaaggtgctgcggatggtggatccgcgtgccaggcggctccgctcccctgatgggggtgccaggctgtgactggagggggaggcagggggcacccgtggggtgcctgagctgttttctttcccatttggcaacagtgacgggcgctcagcccccgggcgttctgtgcaaacgtaggtgttcctgcgggtcatcatgctaggagggaggttgttgggggtgctcgtgctgtccttccgccgctctgggatctctgccttgttggggttgtgggcgctgctgaccatggggctgaagggggggcagccctcgactcccactccccgcggtgctgcagctcgccttccggcctggcagccgctcctccttcagctccgcctcccccgtgctcgtcgggctgcgtttggggtgcaggggtgcaggggatgggccacctgggggagggggtaccgtttagagctggcatcaccacggaaacccagaactgactctgggggatcgttggaacctgagaattcctcacgtgggttgcaatctctgtgtgggccattctgacaatatctgtcaaaattacctcaagattaccaacgcacatatactgacttagaaactccaaatcaatgacatcatgc

SEQ ID NO: 65222 - DNA, 5863 bp, Homo sapiens
ttttttttttgctgcaggtatattcatttttattatattaatagacttagttacatataaataaacacaaaaaagcaaatatcaactgaaaggtttggttgggtagtcaactaattttgttcttttctagggcaattcaagaaggtaacatttgaaaggtttctaaatgatgcacactgtaatcattcattcttttttaaaatacaacacaaaccaacagctacaatgctttttatttttaacaaaaaggatgtaaggagggtaagaaaaacagaggacagtaagataggatgtaaagtgtgatgtatctctggacaccatccctctctgcctgccccacacccaaaagttttaaataatttaaaggataccaattacagtaccagaacaccatcaaaataattgtctttatcagggtcaaaaaatacagtgattatgaatgagctgtgaccagttacgaaattttactggaaatgtttaactgtggtcagcagtccaatggtgtgcacagtgccttcaattaatgcacttgagcatacgtaattacatttctggcagggtccacaccccccaagaaaaggtaaagctaagcatttcatttctacattctaaactctggaatcacagagcccagtttaaaagaaaagtcacagtggataagagatgtatataaaaaatacaaggtgtttttttcaaatcaggagttgtgggactaccattcttttttttttttttctttcttttcttacaaaatgcgattttagaaaaggatagagactccagttcatgttatactacagacttagacagtgaataagtatattgcatgttttggtagtcagtcttcaggcttcctttcatttcccctagccccaggtttctttagggtaaagcatgtgagtcctgaataaagatacaaaaatgcatttgcagctcttttcttgaattctgcagacttcaaagcctgcaagtcatatattccatcatcaatgaccacaatttttctttagctttgtacacctattcttgtataacaacagtgcatggcacaaatgtacaagaaaataactggttttagtctctacagtttctatatggagtaaaataagttaaaacttttctaatgagaatagctgacaggcagcatacatctttattttacattttaaagtctctgcaggcatctactttggttagttatcaacaatcataacataagcactgatcagagaactgagcagcattccaataacgttaacagatatattatttctttttgaaatactgggaaagcccagttttaaaatattattaaaatgttctaacatttacatactatgaagagttagatctaataaaataacatttcttcaaaaataatcttgcagtgctcttttaggcatgctctgagacgttatcaccaaacatccataccttgaaaatatgactatcacatatccatacatcccaactcacacacacataattccttatacagaccaaaaaacaaaaaaacccaaacccttatcccacatactgaaaaatcaatggtttttgcaaacgagtcttgatgcgtatagctgactgcatgttcatgtggatggatgattaagcatcaattgcaggttaggttttcaactgctagaaatccaagcagctttgcaggtcttcagctaaaatgaaacagccttgatttcagcctcatttcacctgcttttggttgtttcagtattggaggccattattgcaaacattcttggaattcttttctttccccagaaagtaatgtatttgtaggcatcacttttagcccttttcttttcacgtaggttaagtaattaaaaaattccttcttcacgcagttattgtgggagatattggcagctgttaaaatatcagatgtttttttctttccagatctttgtttttgatgatacagtttgacattagttacactaaaaagtagatgctgccagaaagttatcagtgaatgcaagggtcccataaaaggtgcttggttaaatattcttcatcatcttccagtttagtttctttcctaaaggcctgaagtgtctccagaatcccagtgctcacccatatttcccattggtttggcctgtgctagaagttggtatgattgcaccatgcgtagagactctcttatttccagattaagttccatcagtttgtagttggcttctgacatgtccaggttagagcctataactgcaaagcttcctgtctggcccagcgtctgatgatggaaatatatatgtaacagtgtctgtacagggtcatcttcacaactgccaaagatatcactgggccagagagatctgaaagctttgacttgtgctacagctgatataaattctttatttttcaaagtttcaattaaagaatgaatggcagtttctatagtagtttgtgcagctttggaaatgtcaatttcttcgttttcggaagcggactcagcttctttgaggatactttccagttgggcaagttcctctgacatgttgatgacctctgcttcattttttatcgtatttacttggttgataagtttacagtaggcctggaacagaagcagcaattgaaaatgcaatttgtataatcttcggcagagctccaattctgctagtatttccaattcttgtgcatctgtgtttatcctatacatgtcttctttggcaccaaatgtcctcttacaatcatctagccactgctcagcggcttctcttttcacattgtatgtatccaggtgttcttgcaactccaaaacaccaaacttgagtgtttccagcaaaccacatgacatcagtgtttcagcatccacaaagactgttgggcattttgaacacagcatcatcacttccaaggaacttttaaatttggtaccaatgcgttgcagactatctccaagaaagctgactgcctcattagttatttctccaaactttctttgaattgtctgaaacagcctagaaaacacatgaaaagtaaacactgcagaggacccgtcggtgtcagacagcatctgattgacgtggcagcgccaggcttcctcttcatcatcatatgccacgggctgaaaggcggctatgatggcagaaagaaatggtgacggcagaggcgacgtctgtacttctggaaaacccatctggctcttcttcatctggactagacagtccggagaaatccgcttcttcttcttcacatctttcatctagctctttcagagctaaggtaacatcctcttcacagactgactcggggtaactttcaggagctagaggctctggcatttcagtttcttctaaatcaagaattccttgacacacaagagattcctgctgttcttgaattatataggatccttcatcttcaaaggttgtaacatgttcctcctttaatactgaagttgtatcctcaggcagccggctgttagcattatctagagaagcctccaaagttggggtctcatccctgatttgaagcacttcctctgttgtgatgctgccagtggaatcttcagactggagaagtaagtcaggatggtctggtattgtttcatcagtggcagaatcactgtttaacatctgtgtgcgtgagagtatctggcttgctgtaagtgccgcttcttcttccgaggactcatctgtatcctcctgattggtgaggttcaggctgggggtgctactagagcactggtactcctggagggatggagtgtcccctttgtcaatactgtccagtgagcgcctgcgaactccccagttgaaattgtccatactttcaccctctgcatcttccaattcaacatctaaaaagtcaaaatccttaaaaacaccaaactgttgttcactgctattatcttccacagctacttcttcctcttgatttatgtcttctgttgtagaaattaggctagtctgttggtcaccgacttccaaatcctcattagaagaaaatacaactgatgggttctttggggaggccagattctgggaccacagagagaaagcacattcattagcttttctcttgttcttcgctgtgataactgtggccttttccaactaacaggaaccaaggcattagaattagaaccagaagaagttgaggaagtacttctagtgacagcaataacttttggtttcccatttcttccagccgcactgtgctgatcaccatatttgtttccaataattggtgtctcagatatatcaaaatgaaaatctaaggtcttcccaggcaactccttagaaacattattaaaaattttagtgaaggatatttcaggagaacctgtatctcctccataggtcttggggatatcactgggtacgacaagactcgcagagcgtgacaccaccagctttaatatgttaagggcttccttccagtaaggactctgtacatatttgccaataatctttatgatctccagattaaactgcttggctggggctgcagacaggtcaatatgactcaatagactataaataatctgtagtaatgattgctgcatactggacaatcctttctctaacagctctgcaagataagtcacaagattaaatgttgtatctgagaaggagtcatgcaggtatctgcacacgacattgatccagttagaacagtctctggaatacgtgtgtgtactgtacaaactcatcatgtgtgccagattgacaagtgttgggcatttttcttctgcacaaacctttgctattcgactagctgtttctttgcaaaactgagttgggctgtcaaaatgctggattaagtgaggcaataagcaaaggatgttaagaggaaagcctgacaattgggaaggatccaccaatgtatgtttggagacagaaatgagtttactgaggaggtgcacggtcatttcttgtgtagatgctgaggtaaaacccttaaggaagagctgctgaagtcctggaaaattagtccatttcaatttgctttgtacattttcaatcttctctcgactctctgatttatccaaaggcaaatggataagcagtttgttgagaagcctgagagccaggaggtattcatattcataatctgattctaataaagatgctgctatccaaaaaatggtggccatcaagttggtaggctcagtagtggactgcacgtcatacattcctttctctcttagagaggaaaggcttctagtccttgctaaactactgctatggtttatccgtccatccattatatccagtgtgttactccgccgccggtcacctcgtcggtcaccaatcaaacttaatctcaaagagttacttcttgcattactgttatatcccaaataactgctactattaatgggacttgtgcttagattgagttgtccagtgcttttcctgttagctgcatacttgtttcccattataggatcatgatatgaggtttgagaaagggcagaaagaagatcataatgcttcatggtttcagccaaagtatcaattgcagattccaatgtgagaagaagctcaatcacaaatccctgtgcatcttctcctggatcccctacagtttctacaagtctggagagaacatcagaaagtgtagttgcagtgagaggctgctttagggccctgaaaatctgaaaggatctcccagcatagtgtcgagaagaacaggaaagtgctgtttgcagagcaacttcactaagatgatgttccagatgaattccttctgagcttgactgcttaaaaacagaaaccacatgtttcaaaaatgtagttaactgttcagcactctttatgctaggattcttggcagaaacatcctcatggttccaaaggggccctctttttcttgaggtaatgaattccat

SEQ ID NO: 65223 - DNA, 6086 bp, Homo sapiens
ctcggttcttctatggatgcagagaatatttccataaactgttaattcagggtgattcttctggaaggttgaatatttggaacatatcagacacagctgataaacagggaagtgaagaagggctggcaatgacaacttctattagtttgcaagaggcatttgataaactgaatccttgtcctgctggaattatagatcagctgagtgtgattcccaatagtaatgaacctcttaaagtaactgcaagtgtgtacataccagcacatggacgacttgtttgtggtcgtgaagatggaagcatagttattgtacctgccacacagacggccatagtacagctgttgcaaggggaacacatgctcagaagaggttggccacctcacagaacactccgtggtcatcggaacaaagtcacatgtttgctatatcctcatcaggtctcagctcggtatgatcaaagatacctgatatctggaggtgtggatttttcagtcataatttgggacatattttctggagaaatgaaacatatcttctgtgttcatggtggtgagattactcaacttctagttccacctgaaaactgtagtgcaagagtacagcactgcatctgctctgtagccagtgaccactcagtaggacttctaagtttgcgagagaaaaaatgcataatgttggcatctcgtcacctttttcctattcaagtaatcaaatggaggccttctgatgattacctggtggtggggtgttcagatggttctgtgtacgtctggcaaatggatactggtgcattggatcgttgtgtgatggggataacagcagttgagattctaaacgcttgtgatgaagctgttcctgctgctgttgattcacttagtcatccagcagtcaacctaaaacaagctatgacgagacgtagtcttgctgctcttaaaaatatggcccatcataagctacaaacccttgcaactaacctcttggcttctgaggcatctgacaagggaaatttacctaaatattctcataactccctgatggttcaagcaataaagacaaacctaacagacccggacatacatgtgctattctttgatgtggaagcgttgattattcaactcctgactgaagaagcctctaggccgaatactgctcttatttccccagagaatttgcaaaaagcatctggcagttcagacaaagggggctcttttttaactggaaaacgagcagcagttctcttccaacaagtgaaagaaacgatcaaagagaacatcaaggaacacctccttgatgatgaagaggaggatgaggagataatgaggcagagaagggaagaaagtgatcctgaatatcggtccagcaaatcaaagccattgaccctattagaatataatttaactatggacactgcaaagctgtttatgtcctgccttcacgcctggggtttgaatgaagtactggatgaagtttgcctggatcgccttggaatgctgaaaccccactgcaccgtatcgtttggcctcttgtcaagaggaggccatatgtcactgatgctgccgggttataatcagcctgcttgtaaactgtcacatgggaaaacagaagtaggaaggaagctgccagcgtctgagggagtaggaaagggaacttacggagtgtcccgtgccgtcaccacacagcatctcctgtctatcatttctttggcaaatactttaatgagtatgaccaatgcaacttttattggtgatcatatgaagaagggtcctaccaggccacctagaccaagcaccccagacctttctaaggcaaggggttcccctccaacttccagtaatattgtgcaaggacagattaaacaagttgctgcacctgtcgtttccgctcggtctgatgctgatcactctggctctgaccctccttctgctcctgctttacatacctgtttcttagtaaatgaaggttggagtcagttagctgctatgcactgtgttatgctgccagacctactgggattggataaatttaggcctccccttctggagatgctggcccgaagatggcaagatcgatgcttggaggtgagagaagccgcacaggccctgcttctggcggaactgagaagaattgagcaggcaggcaggaaggaagccattgatgcctgggctccttacttacctcagtacatagaccacgtcatatcacctggagtcacatcagaagccgcgcagactatcaccacggctcctgatgcctcagggcctgaagcaaaagtccaggaggaagagcatgaccttgttgacgatgacatcaccactggttgcttatcaagtgtcccacaaatgaaaaaaatttctacatcttacgaggaaagacggaagcaagctaccgctattgttttacttggagtaataggagctgaatttggtgctgaaattgaacctcctaaactattgaccagacctcgaagctctagccaaattcctgagggattcgggttgactagtggtggatccaactactcgctggccagacatacttgcaaggcactgacgtttcttctgctacagcctccaagccccaaacttcctccacacagcactatccgaagaacagccattgatctgattggacgtgggttcactgtttgggagccttacatggatgtgtccgctgttctgatggggcttctcgaactttgtgccgatgccgagaaacaacttgccaacatcacaatggggttgcctctgagcccagcagctggactcggcccgctctgcgaggcatgccctctcgctcattgccaccgccagaccacccgccttcatcaccaccatagccaaagaggtacacagacatacggctcttgcagcaaatacccaatcacagcagaatatgcacacaacaactcttgcacgagctaaaggggaaattttgagagtcattgaaattcttattgaaaagatgcccacagatgttgtggatcttctcgtggaggttatggacatcattatgtactgccttgaaggatctttagttaaaaagaaaggtcttcaagaatgtttcccagccatctgcaggttctacatggtcagctattatgagcggaatcacagaatagcagttggagctcgccatggttcagtggccctgtacgacatccggactggaaaatgtcagacaatccatggacacaagggaccaatcactgcagtggcttttgctcctgatggaagatatcttgccacctactcaaacactgacagccacatttctttttggcagatgaacacgtcactgctgggaagcatcggcatgctgaactcggcacctcagctgcgctgcattaaaacctaccaggtgccccctgtgcagcccgcgtcccccggctcccacaatggccttcaagctgggcccgggtcatctggacttccaaccgcaacgtcatcctcatggcccatgacgggaaggagcaccgcttcatggtctaatgctgctgcctgccgccgtgactgcgttttagttctctaaattatccaagccgatgttgctctgtccttcctcacaccagattgttcccaggggcctgcccaccccagtgccatccagtggcacggccggccgggtcttgtcacttgtgcatgcttctcaggggcagaacccgctcgtgccatctgtcgattcagaggcacgcacacatgctctgcaggatgtggccatcctgtcaccaggtagtttttccctgccagagatggcaggggaaagccagcggttcctgggaacgctcttgttgcttggtgcaacagaagcacaaaaatcaataaacactgtgattgcactcccagcccagatcagcatttttagccatctcaaccgcacctctgaagtgctgcttgaatctggccgttctgacactgggtgttgaggtcatgtggcagtcctcacgattgaaattattgccctttgaattacctaaaatattgtttaccaaaaagattctgtgtttacatgttcttttcttctggtgattgctaggaaattactcaatccaatttcctagggtttagctaccaccttctttatcaacagctaaccaatttgagattcatgattaattatgtacacaaaaatattttccttgtagaaaatagttttccagacacttagccttctgaagtgctcatctcttgcttaaatgatagtctatttagtagtttaaaataaaaataatcactccctatgatctagttaatgtaattatccagtcactgtaactaatctcttgaagggacttttgtgataaagagccaagttcagaagcatagcgtgtaccgaaaatgaagactctcctatctactgctacagatcctgttgaagaaagagcttacccctttcccccggaaaacttgcaatcctgtagttcccatatgtgtgggcatatgtcagttatggaaattattataattcagccttcaaactactactgatcaactaaaggaaagctaataaggtatttcttttaaacaagtattctggaaaagtaataactatggcacaaatgttcaggagtgtatataaaaatatgtgggctctcgatttatttgagcaaacattgcaatgagggtgttcattatgcttctaagtaagctttaactagaccactttcttcttatgtcagattgtgctggttctagctcataataatgaaaaaaatagaattatattttgtatgaattgtttctaacaaaccttgatctgtatatacttgtgaggggttgtttggttgcctaattgttgattggttggttagttgggcaaaatcatttattacatgcaaaaatagaaaattatttgttaaattcagagaaaatatgtgaagtttacaaaggaaccaaaatgataatgggagaatttagtcttaaaagtttaggttgtcagagtttatctgatatacaaaaaagtaggatcaaagtctaggaacaaacattggttatttcactgaaacagatttttaaagagcatattaagaaattaagaccattagatcatctctttcataatgatatgatgttatttccattgacggcaaatctatactgttccttggttttagagttgggtattctttcaaaagtgaatttaggcacatgcatgtacattgtatttataaagattatatatgtagtttccaaggaagaaacaaagacctatacagtttagactttatttgtttggtgaacgtgctgttgtgtttggcatagctagagaaatgtaaggtaaaaggctcactttgttttccagtgggtccagagtcttctctatacccaacatatgtttactttatgaacttaaatggaaattaatttattgtagactacatctctatttggaatgatgaggtaaatgtataccttagcattttctttaacaaaaatgttctgtgtgtcaggaaagaggtgtgagagcggtaggcagcctgccgcaaacacacggatggctcccaccgccacgaaggttgagaacaaagccaggggacccagaggagcaatagccctgggccacaagcgtgggtaggcctttcacgtattccgtctgcacaggcaaccaaggccagtagaaagctatggctgcaaaaccctggggtggacgatgtttgatgattagacggtcatctctaactactaaactaatatctgcattcttgttaacataaatctctccttggctattttaatagccacagtcccaaacttcatcccagcttagatttctcagcactgaggtaaactctgcattgtcatcccagcgtacacctttaatgttttattgatttcactggcactgtatttgggaccctgtcccttgtatatgtagagacatatgtggtcttcattggtaatttacaagcaaaagatgacattgacgtgacacctgtatgaaaatgtgatgattgaactcccctgtgtacagcgagtgaattaaaatgtctgcctctcccagacatttttttaatgatttccctttatagactttatgtgggctgaatggtcctgtgtacatatgtgtgtttaattaaaccattgtattga

SEQ ID NO: 65224 - DNA, 2284 bp, Homo sapiens
ttttgtttgccatttcctacaggtgaaaccgccatcattaggattcactgtaacgttagtgcatattaaactcactagcatttttattaatggccgttatctacactaagctatactgcaacttggaaaaagaggacctctcagaagactcacaatctagcatgattaagcatgtcgcttggctaatcttcaccaattgcatctttttctgccctgtgggcgtttttttcatttggcaccattgatccactggcaatctcttatcaggccccggaaataatggaagtctgttactctgatattttttccattgcctgcttgcctgaatccagtcctgtatgttttcttcaacccaaagtttaaagaagactggaagttactgaagcgacgtgttaccaagaaaagtggatcagtttcagtttccatcagtagccaaggaggttgtctggaacaggatttctactacgactgtggcatgtactcacatttgcagggcaacctgactgtttgcgactgctgcgaatcgtttcttttaacaaagccagtatcatgcaaacacttgataaaatcacacagctgtcctgcattggcagtggcttcttgccaaagacctgagggctactggtccgactgtggcacacagtcggcccactctgattatgcagatgaagaagattcctttgtctcagacagttctgaccaggtgcaggcctgtggacgagcctgcttctaccagagtagaggattccctttggtgcgctatgcttacaatctaccaagagttaaagactgaactactgtgtgtgtaaccgtttcccccgtcaaccaaaatcagtgtttatagagtgaaccctattctcatctttcatctgggaagcacttctgtaatcactgcctggggtcacttagaagaaggagaggtggcagtttatttctcaaaccagtcattttcaaagaacaggtgcctaaattataaattggtgaaaaatgcaatgtccaagcaatgtatgatctgtttgaaacaaatatatgacttgaaaaggatcttaggtgtagtagagcaatataatgttagttttttctgatccataagaagcaaatttatacctatttgtgtattaagcacaagataaagaacagctgttaatattttttaaaaatctattttaaaatgtgattttctataactgaagaaaatatcttgctaattttacctaatgtttcatccttaatctcaggacaacttactgcagggccaaaaaagggactgtcccagctagaactgtgagagtatacataggcattactttattatgttttcacttgccatccttgacataagagaactataaattttgtttaagcaatttataaatctaaaacctgaagatgtttttaaaacaatattaacagctgttaggttaaaaaaatagctggacatttgttttcagtcattatacattgctttggtccaatcagtaattttttcttaagtgttttgtgattacactactagaaaaaaagtaaaaggctaattgctgtgtgggtttagtcgatttggctaaactactaactaatgtgggggtttaatagtatctgagggatttggtggcttcatgtaatgttctcattaatgaatacttcctaatatcgttggctctactaatattttccaatttgctgggatgtcacctagcaatagtttggattatatagaaagtaaactgtggtcaatacttgcatttaattagacgaaacggggagtaattatgacacgaagtacttatgtttatttcttagtgagctggattatcttgaacctgtgctattaaatggaaatttccatacatcttccccatactattttttataaaagagcctattcaatagctcagaggttgaactctggttaaacaagataatatgttattaataaaaatagaagaagaaagaataaagcttagtcctgtgtctttaaaaattaaaaattttacttgattcccatctatgggctttagacctattactgggtggagtcttaaagttataattgttcaatatgttttttgaacagtgtgctaaatcaatagcaaacccactgccatattagttattctgaatatactaaaaaaatccagctaggattgcagtttaataattaaactgtacatactgtggcatataatggatttttatcttatgtaaattatttttagaacacaagttgggaaatgtggcttctgttcatttcgtttaattaaagctacctcctaaactaaaaaaa

SEQ ID NO: 65225 - DNA, 6170 bp, Homo sapiens
atgaattcatttctgtcttttcccatctccttgtgtagtgcccggaaggcagtggatgaggaagaggaagcagttgaagaacgtcgcaatatgcgaactatctgggtgactggcagaaaaggtttaactgaaagggaagcagcagcccttatagtggaagaagccagaatgattctgcagcaggacttagttgaaatgggagtgcaatggaatccatgtgccctgttacattctagtacatgctcattgactcatagtgagtccgaagtaaaggaacacacatttatatcccaaactaagagttcttataaaaaattaacatcaaaagaacaaaagtaacacaatatttagtgattcttatattaagcattcaccaaatatagtgcaagacttaaataaaagtagagagcatacaagttcctttaattgtaatttccagaatgggaatcaagaacatcagacatgttccattttcagagcaagaaaacgggcctctttagatataaataaagagaagccaggagcctctcagaatgaggggaaaacaagtgataagaaagttgttcagactttttcacagaaaacaaaaaaggcacctttgaatttcaattcagaaaagatgagcagaagttttcgatcttggaaacgtagaaagcatctaaagcgatctagggacagcagccccctgaaagactctggagcgtgtagaatccatttacaaggacagactctgtctaatcctagtctttgtgaagacccgtttaccttagatgagaagaaaacggaatttagaaattcagggccatttgctaaaaatgtatctttgagtggtaaggaaaaagataataaaacatcattcccattacaaataaagcaaaattgttcatggaacataacactaactaatgataattttgtggagcatattgtcacaggatctcagagtaaaaatgtgacttgtcaggccactagtgtggttagtgaaaagggcagaggagtagctgttgaggcagaaaaaataaatgaagtgctgatacaaaatggttcaaaaaaccagaatgtttatatgaaacaccatgacatccatccaattaaccagtacctgcgaaagcaatctcatgaacagacaagcactattaccaaacagaaaaatataatagagagacaaatgccctgtgaagcagtcagtagttacataaatagagactcaaatgttactatcaattgtgaaaggataaagcttaatacagaggaaaataaaccaagtcattttcaggcattaggagatgatataagcagaactgtgatacccagtgaagtacttccatcagctggagcatttagcaaatcagaaggccagcatgagaattttctaaatatttctagactacaagaaaaaacaggtacttatacaacaaacaaaactaaaaataatcatgtttctgacttaggtttagtcctctgtgattttgaagatagtttctatctggatactcagtcagagaaaataatacaacagatggcaactgaaaatgccaaactaggagcaaaggacaccaacctggcagcagggataatgcagaagagcttagtccaacagaactcaatgaactcttttcagaaggagtgtcacattccttttcctgctgaacagcaccctctaggagcgactaagatagatcatttggaccttaagactgtaggtactatgaaacaaagcagtgattcacatggggttgatatcctgactccagaaagcccgattttccattctccaatactattggaggaaaatggtctttttttaaaaaagaatgaagtttctgttactgattcacaattaaatagttttcttcaaggttatcaaacacaagaaactgtgaaaccagttatacttctgattcctcaaaagagaactcccactggtgtagaaggagaatgtcttccagttcctgaaacaagtttgaatatgagtgatagtttactatttgatagcttcagtgatgactatctagtaaaagaacaattacctgatatgcaaatgaaagaaccccttccttcagaagtaacatcaaaccattttagtgattctctgtgtctacaagaagacctaattaaaaaatcaaatgtaaatgagaatcaagatacccaccagcagttgacttgttccaatgatgaatctattatattttcagaaatggattctgttcagatggttgaagctttggacaatgtggatatatttcctgtccaagagaagaatcatactgtagtatctcctagagcattagaactaagtgatccagtacttgatgagcaccaccaaggtgatcaagatggaggagatcaagatgaaagggctgaaaaatcaaaattaactgggaccaggcaaaatcattcattcatatggtcaggggcatcatttgatctaagtccaggactgcaaaggattttagataaagtatccagtcctctagaaaatgaaaagctaaaatcaatgactataaacttttccagtttgaatagaaaaaatacagagttaaatgaagaacaagaagttatttcaaacttggagacaaaacaagtgcagggaatttcattttcttctaataatgaagtaaaaagcaagattgagatgctagaaaacaatgccaatcatgatgaaacctcatccctcttacctcgtaaagaaagtaatatagttgatgataatggtctcattcctcctacacccattccaacatctgcttctaagctgacatttccagggattcttgaaacacctgtaaacccttggaaaactaataatgttttacaacctggtgaaagttatttatttggctcaccttcagatattaaaaaccacgatttaagtccagggagtagaaatgggttcaaagacaacagccctattagtgacacaagcttttcacttcagttatcacaggatggattacagttaactccagcctcaagcagttcagaaagtttgtccataattgatgtagcaagtgaccaaaatcttttccaaacattcattaaggagtggcggtgcaaaaagcgattttccatctcactggcttgtgaaaagattagaagtttgacatcttctaaaactgctactattggcagtaggtttaagcaagctagctcacctcaggaaattcctattagagatgatggatttcccattaaaggttgtgatgacaccttggtggttggactggcagtatgctggggtggaagggatgcctattatttttcactgcagaaggaacaaaagcattctgaaattagtgccagtttggttccaccttctttagatccaagcctgactttgaaagacaggatgtggtaccttcaatcttgcttgcgaaaggaatctgataaagaatgttctgttgtcatctatgacttcatccagagctataaaattcttcttctttcttgtggcatctccttggagcaaagttatgaagatcctaaggtggcatgctggttactagatccagattctcaggagccgactcttcatagcatagttaccagtttctttcctcatgagcttccactcctagaagggatggagaccagccaagggattcaaagcctggggctaaatgctggcagtgagcattctgggcgatacagagcatctgtggagtccattctcatcttcaactctatgaatcagctcaactctttgttgcagaaggaaaaccttcaagatgttttccgtaaggtggaaatgccctctcagtactgcttggccttgctagaactaaatggaattggctttagtactgcagaatgtgaaagtcagaaacatataatgcaagccaagctggatgcaattgagacccaggcctatcaactagctggccacagtttttctttcaccagttcagatgacatcgctgaggttttatttttggaattgaagttgcccccaaatagagagatgaaaaaccaaggcagcaagaaaactctgggttctaccagaagagggattgacaatggacgcaagctaaggctgggaagacagttcagcactagtaaggacgttttaaataaattaaaggcattacatcctttaccaggcttgatattagaatggagaagaatcactaatgctattaccaaagtggtctttccccttcagcgggaaaagtgtcttaatccttttcttggaatggaaagaatctatcctgtatcacagtcgcacactgctacaggacgaataacctttacagaaccaaatattcagaatgtgccaagagattttgaaatcaaaatgccaacactagtaggagaaagcccaccttctcaagctgtaggcaaaggcctacttcccatgggcagaggaaaatataagaagggtttcagcgtgaatcctagatgccaggcacagatggaggagagagctgcagacagaggaatgccattttcaattagcatgcgacatgcctttgtgcctttcccaggtggttcaatactggctgctgactactctcagcttgaactgaggatcttggctcatttatcccatgatcgtcgtctcattcaagtgttaaacactggagctgatgttttcaggagcattgcagcagagtggaagatgattgagccagagtctgttggggatgatctgaggcagcaggcaaaacagatttgctatgggatcatttatggaatgggagctaaatctttgggagagcagatgggcattaaagaaaatgatgctgcatgctatattgactccttcaaatccagatacacagggattaatcaattcatgacagagacagtgaagaattgtaaaagagacggatttgttcagaccattttgggaaggcgtagatatttgccaggaatcaaagacaacaacccttatcgtaaagctcacgctgagcgtcaagctatcaacacaatagtccaaggatcagcagctgatattgtcaaaatagccacagttaacattcagaagcaattagagaccttccactcaaccttcaaatcccatggtcatcgagagggtatgctccaaagtgaccgaacaggattgtcacgaaagagaaaactgcaagggatgttctgcccaatcagaggaggcttcttcatccttcaactccatgatgaactcctatatgaagtggcagaagaagatgttgttcaggtagctcagattgtcaagaatgaaatggaaagtgctgtaaaactgtctgtgaaattgaaagtgaaagtgaaaataggcgccagctggggagagctaaaggactttgatgtgtaactgtgctgttgatgaagtcctcccagggaagcctgtgcagatgcagtcacctggaaagaacagagattaccctttcacctacctcagcaaaacaaactttcaagtcttgatagacttagcctagtaattttatagtgagagtttcaaactatatatcagtgtctatagcatcaaaaacttctgggggcgtgggggaagtagaataccaagtataatagttacattcactttcaaagagcatctatgaatttgccttttgtaacttactgtggctttaaacatattcagaacagatgcttgaaatatgcacttagcactttggttccacatctgtctgggtaaaccatgaagaaaatgaagctgctgcctcaatcgacccagacagcagccataggcagataaagatttggtttcaccctggtggtggtaggcatcgtgtgtgactttttttcctctaatatcaattttacagtacggaaatagtattttaaaatagtattggctaataaattatgaattctataaagtagtaagacttggtatggttggagtgtaggaatgaatattcatgaaatgtttcttattgcttttccttccctaattcatacaatgaatgtatttggaatacttacatattataaaataaactatacctcttcaagaggtatcctgttctgtaagatcagatgtttttattgcaggtcaatataatactgccagagacagaaaatacccccttatcagtcccttagtgcctctttctgtttgtggcatggtgagaaaacccatgctgaaaagattgtactttgtgatcccaatcagagggatggagctaatctttttgctgttgaaataaaatgaatttatgagaaactttaaa

SEQ ID NO: 65226 - DNA, 645 bp, Homo sapiens
ttttttttttttgcactgccacatagattttaatttgcctaaagatgatagcgattttgagctgtggttagggataactgttcccacagtagacctattaccaacatgagttgctggctttcatttaataggactccaagctggcaaacaaaccccaccatcttcccaacagccacatcatgagatctagcagcaccagcctcttgaagtggcttctcagtggaaggtttgctccgtttcagtgaagcttctctctcaaagctctgacgtcaccagggtgcccctcgagggtctggatagactgtccgaaaggtcaggttcactctcggttctctagagtggtattctttgggcactcgatgctgccagtcagcttgtgtcgctccttccatgattaacaaggtcccatgatccaagggtatcttcactctttccacatatgtgtagtctccattctcttcctagaaaacagcatttgttgtaataaatgttttgcctgtgtaatcaagatgcaacagaacctgacagaggtcaaaaaaaaatggaaacctctgctcagccagactgtgggaatccatatatagctctgtcatttggcagctgcttgactgttggcaagttacctcatctctctgtaccctgact

SEQ ID NO: 65227 - DNA, 2149 bp, Homo sapiens
gctttgtttgatggtgatccacatttatccacagagaatcctgccttggttcctgatgctttgctagcctcagacacttgtctggatataagcgaagctgcctttgaccacagtttcagcgatgcctcaggtctcaacacatccacgggaacaatagatgacatgagtaaactgacattatccgaaggccatccggaaacgccagttgatggggacctagggaagcaagatatctgctcatctgaagcctcgtggggtgattttgaatatgatgtaatgggccagaatatcgatgaagatttactgagagagcctgaacacttcctgtatggtggtgaccctcctttggaggaagattctctgaagcagtcgctggcaccgtacacacctccctttgatttgtcttatctcacagaacctgcccagagtgctgaaacaatagaggaagctgggtctccagaaggatgaatctctgggatgcagagcagcagagatagtgctttctgcacttcctgatcgaagaagtgaaggaaaccaggctgagaccaaaaacagactgcctggatcccagctggctgtgctgcatattcgtgaagaccctgagtccgtttatttgccggtaggagcaggctccaacattttgtctccatcaaacgttgactgggaagtagaaacagataattctgatttaccagcaggtggagacataggaccaccaaatggtgccagcaaggaaataccagaattggaagaagaaaaaacaattcctaccaaagagcctgagcagataaaatcagaatacaaggaagaaagatgcacagagaagaatgaagatcgtcatgcactacacatggattacatacttgtaaaccgtgaagaaaattcacactcaaagccagagacctgtgaagaaagagaaagcatagctgaattagaattgtatgtaggttccaaagaaacagggctgcagggaactcagttagcaagcttcccagacacatgtcagccagcctccttaaatgaaagaaaaggtctctctgcagagaaaatgtcttctaaaagcgatacgagatcatcttttgaaagccctgcacaagaccagagttggatgttcttgggccatagtgaggttggtgatccatcactggatgccagggactcagggcctgggtggtctggcaagactgtggagccgttctctgaactcggcttgggtgagggtccccagctgcagattctggaagaaatgaagcctctagaatctttagcactagaggaagcctctggtccagtcagccaatcacagaagagtaagagccgaggcagggctggcccggatgcagttacccatgacagtgaatgggaaatgctttcaccacagcctgttcagaaaaacatgatctctgacacggaaatggaggaggagacagagttccttgagctcggaaccaggatatcaagaccaaatggactactgtcagaggatgtaggaatggacatcccctttgaagagggcgtgctgagtcccagtgctgcagacatgaggcctgaacctcctaattctctggatcttaatgacactcatcctcggagaatcaagctcacagccccaaatatcaatctttctctggaccaaagtgaaggatctattctctctgatgataacttggacagtccagatgaaattgacatcaatgtggatgaacttgatacccccgatgaagcagattcttttgagtacactggccatgatcccacagccaacaaagattctggccaagagtcagagtctattccagaatatacggccgaagaggaacgggaggacaaccggctttggaggacagtggtcattggagaacaagagcagcgcattgacatgaaggtcatcgagccctacaggagagtcatttctcacggaggatactatggggacggtctaaatgccatcattgtgtttgccgcctgttttctgccagacagcagtcgggcggattaccactatgtcatggaaaatcttttcctatatgtaataagtactttagagttgatggtagctgaagactatatgattgtgtacttgaatggtgcaacccccaagaaggaggatgccagggctaggctggatgaagaaatgctaccagatgat

SEQ ID NO: 65228 - DNA, 2683 bp, Homo sapiens
  misc_feature (1)...(2683): n = a,t,c or g
ggagaattattgacccagaggacctaaaagctttgctcaaagtgctgcatctcagaggaataagagaaaaggcattacaaaaacaaattcagaaacatttggattatattactcaagcctgcctcaagaataaggatgttgctattattgaactgaatgaaaatgaagaaaaccaagtaactcgagatattgtggagaactggtcagtagaagaacaagcaatggaaatggatttgagtgtccttcaacaggtagaagatctagaaaggagagttgcatcagcaagtttgcaagtgaagggttggatgtgtccagagcctgcatcagaaagggaggacttggtatattttgaacataaatcatttactaaattgtgcaaggagcatgatggagaatttactggcgaagacgaaagcagtgcacatgcactagaacggaagagtgacaaccccctagatatagctgtaaccaggctggctgatttggagcggaacattgaaagaagaattgaagaggatattgctccagggctcagggtatggagaagggcattatcagaagctcgcagtgctgcacaggtagctctgtgcattcagcaattacagaaatcaatagcatgggaaaaatcaattatgaaagtttactgccaaatctgtcgaaagggagataatgaagaactgcttcttctttgtgatggctgtgacaaaggctgtcatacctactgccatagacccaagattacaacaatcccagatggagactggttttgtccagcttgcattgctaaggcaagtggtcaaactctaaaaatcaaaaaacttcatgtcaaaggaaaaaagactaatgagtcaaagaaaggcaagaaggtaactttaacaggagatactgaagatgaagactctgcatctacaagtagttcactaaaaagaggaaacaaagacctcaagaaaagaaaaatggaggaaaacacttctattaacttgtcaaaacaagaaagttttacttcagttaagaaacctaaaagagatgactccaaggacctagctctttgcagtatgattctgactgaaatggaaactcatgaggatgcatggccttttctacttcctgtaaacttgaaacttgttcctggttataagaaagttattaagaagcctatggatttttccacaattagagagaaactaagtagtggacagtatccaaaccttggaaacctttgctctagatgtcaggcttgtttttgacaactgtgaaacatttaatgaagatgattctgatataggcagagctggccacaatatgaggaagtattttgaaaaaaagtggacagatactttcaaagtgagctgaagttataataatctctttatttttttccttctaaacaaggacaaatgagaccagcaatgtgaactgtatttacataaacgtgcaaggcacatacataatgactttctttttccttaagtataaaaaaaaagtatcagaagaatgataccatttttaaaggcttcattcctacaacaaccaaggccctcggttattggtttgtgtgatttatcagctaatttaggtagaacagggaagcacacccaaagaattttcaaaggaaagggtgttatagtgcaatagcaattaaaatatatcaaatcgcactgaatactcaacaccagagctctaatgtgggaaatggttctcctttccctctcaataaatatctatttttcatttttttactttgtagtttattttttagtgaatgtatttaattttatgaattatttatgattaaaccacatccagaatcttcgttttctgtgaaaaggaagaactagaaaattgctttaaatcttggaaaatacaagggaatgttttaaaatataaaacaaagccaagttaaactgtttacactggatgtgcctattaaaagcacccaaanaggaaaacttttactgtaggagttacaagtacatttatatatatatgttgctgcatcacttgtgtagttaaattgtatttcaaaacagtgaaaaaattgacatgtatatactgttcattcttgtttatattaagtcttgttttaaatatgtattatgtgtatatattgtttgcagacattattgttcatgccttagaggattgtagcattttattttcgtctgaaggtaatgatagctatacagtctgtacagtaattatcctctaccaacactgtggcgtctccttaatcttggtagtgcctgcctttgaaacagggtgtaggggatattagttttccatttttctattttgttatataattttaagccaccagggcctaaattaaagtataatcatttgtatccatgtggaataaaattgtgacaatttcctacgcacacagtattttttcatagaaacatttccctcccatttgccttgcctcagaaataaatttaaaagacgtttgtaaccactgtgttttatctactgtgtgttgtggtggcctgttggaggcaaatagatcagattttttttgtacctacgtaagagtacttgaagttttatttaaaataaaatgttgtggaaaaggtagcattctttttttaggagtgttatttttcactatgtgtggcacggatacaataaaagacttttacaaactaaaaaaaaaaaaaaggggggggccgttttttatata

SEQ ID NO: 65229 - DNA, 2865 bp, Homo sapiens
atggagcggctttggggtctattccagagagcgcaacaactgtccccaagatcctctcagaccgtctaccagcgtgtggaaggcccccggaaagggcacctggaggaggaagaggaagacggggaggagggggcggagacattggcccacttctgccccatggagctgaggggccctgagcccctgggctctagacccaggcagccaaacctcattccctgggcggcagcaggacggagggctgccccctacctggtcctgacggccctgctgatcttcactggggccttcctactgggctacgtcgccttccgagggtcctgccaggcgtgcggagactctgtgttggtggtcagtgaggatgtcaactatgagcctgacctggatttccaccagggcagactctactggagcgacctccaggccatgttcctgcagttcctgggggaggggcgcctggaggacaccatcaggcaaaccagccttcgggaacgggtggcaggctcggccgggatggccgctctgactcaggacattcgcgcggcgctctcccgccagaagctggaccacgtgtggaccgacacgcactacgtggggctgcaattcccggatccggctcaccccaacaccctgcactgggtcgatgaggccgggaaggtcggagagcagctgccgctggaggaccctgacgtctactgcccctacagcgccatcggcaacgtcacgggagagctggtgtacgcccactacgggcggcccgaagacctgcaggacctgcgggccaggggcgtggatccagtgggccgcctgctgctggtgcgcgtgggggtgatcagcttcgcccagaaggtgaccaatgctcaggacttcggggctcaaggagtgctcatatacccagagccagcggacttctcccaggacccacccaagccaagcctgtccagccagcaggcagtgtatggacatgtgcacctgggaactggagacccctacacacctggcttcccttccttcaatcaaacccagttccctccagttgcatcatcaggccttcccagcatcccagcccagcccatcagtgcagacattgcctcccgcctgctgaggaagctcaaaggccctgtggccccccaagaatggcaggggagcctcctaggctccccttatcacctgggccccgggccacgactgcggctagtggtcaacaatcacaggacctccacccccatcaacaacatcttcggctgcatcgaaggccgctcagagccagatcactacgttgtcatcggggcccagagggatgcatggggcccaggagcagctaaatccgctgtggggacggctatactcctggagctggtgcggaccttttcctccatggtgagcaacggcttccggccccgcagaagtctcctcttcatcagctgggacggtggtgactttggaagcgtgggctccacggagtggctagaaggctacctcagcgtgctgcacctcaaagccgtagtgtacgtgagcctggacaacgcagtgctgggggatgacaagtttcatgccaagaccagcccccttctgacaagtctcattgagagtgtcctgaagcaggtggattctcccaaccacagtgggcagactctctatgaacaggtggtgttcaccaattcccagctgggattgctgaggtgatccggcccctacccatgggacagcagtgcctatttccttcacggcctttgtgggagtccctgccgtcgagttctcctttatggagggacgaccagggcttacccattcctgcacacaaaggaggacacttatgagaacctgcataaggtgctgcaaggccgcctgcccgccgtggcccaggccgtggcccagctcgcagggcagctcctcatccggctcagccacgatcgcctgctgcccctcgacttcggccgctacggggacgtcgtcctcaggcacatcgggaacctcaacgagttctctggggacctcaaggcccgcgggctgaccctgcagtgggtgtactcggcgcggggggactacatccgggcggcggaaaagctgcggcaggagatctacagctcggaggagagagacgagcgactgacacgcatgtacaacgtgcgcataatgcgggtggagttctacttcctttcccagtacgtgtcgccagccgactccccgttccgccacatcttcatgggccgtggagaccacacgctgggcgccctgctggaccacctgcggctgctgcgctccaacagctccgggacccccggggccacctcctccactggcttccagggagagccgtttccggcgtcagctaggccctgcttcacctgggacgcttgcaagggggcagccaatgcgcttagcggggatgtctggaacattgataacaacttctgaggccctggggatcctcacatccccgtcccccagtcaagagctcctctgctcctcgcttgaatgattcagggtcagggaggtggctcaaagtccacctctcattgctgatcaatttctcattacccctacacatctctccacggagcccagaccccagcacagatatccacacaccccagccctgcagtgtagctgaccctaatgtgacggtcatactgtcggttaatcagagagtagcatcccttcaatcacagccccttcccctttctggggtcctccatacctagagaccactctgggaggtttgctaggccctgggacctggccagctctgttagtgggagagatcgctggcaccatagccttcatggccaacaggtggtatgtggtgaaaggggcgtggagtttcaatatcaataaacccacctgatatcaataaaaaaaaaa

SEQ ID NO: 65230 - DNA, 4917 bp, Homo sapiens
ttttttttttttatactaaaagaataaagatttttattaagcattgtaagttgcattcaatagccttcagatacaccacaccacaatccatcgacagtcaatcaaacccaacagcagttcattcttgcacaatccatgagttagggcaaaactcccttcaacttacagtaagatcctacttagctcttgcgggcaggggttggggaattacacctcatttctgatcactaatgtgatgaagagcatcagaagtatatgaaaacgataagaagtgattctgatttcaaagtacattgtttggaaacattaacaaaaacatcaaaatgatagaagtatacctgcttctactaaattcttgatgggaaagttctcaagaacaagcaatttgtttcctgctacagaaggggggggtggttttttttttttaagatcaaagggttttttttcacagaatttcatatttgctaatatgaaggcataaaacagcaacaaagaacaataatgcatacagcagtgaatacaccagggtaatgttgatattcgaaacggctagataatttttggggggctttagaataaatgcaacagaggtcaataatcacaaaattttaaggttagagcaagatcagtcaatgactaaacagagttaacatcttttataggactattactgattattagcatttttgttttgcaaatgggcacatactgttaagaatggaagaaaggacgataacatgcatattaactacacactttaaaaattatgaaccatgcagaagtttagctcaagtagtagtactaatggtctacatccgattcaaaaccacatagttcattgatcacagatgcatggtattagtcacgaaagtttcagaacacattgtgttgattttgaaaggtcatttgcatcttctatgatttcaactttatctccatttaacttgcttgtaaagtatgtatgatgtattgtatatttaaaatcagcagaacggcaatattactctataattttttagttttgatagttgcactttttttttttaacacaaaagaaccacatcaacagtgatgaaatttaagaaagaaaaactgtggttgtgccttatttctttcataatcataaaaatcaaagccttaaagaaagcttcattgtgaaacagtaatgcaaaatcaaatataatggcatacatatggtgccaaatgctaaaaattatattttaagctatatatacttaaagactgccaaaatttgttttctttatagttcaagaaacacaactataggcttttgtcataaccagtttaaactttatgtgtacttcattttaagtgcgggagtcaaatgctcttcattttctttctcttttttgttttattgtagcattttgactacaactggttaaaactaaaaatgtgttgtttaaatctctgatatcaaagagggatctgaatttccaaagtcctcatttttctcttacggaaaggacaaaatgtacataactgcaggctctctttctctccagatattcctaaatccttacccttccagcatccttcaccctctataaaaaataagtttactcttctttatttaagacagctgcctccagagcagcttctctgcggcaagcgctgtctgtacttagtgcatttaaatgaggatttgtattgcacgttttagagtcattattcaaggcactttcagagtggctgggggccctggcgtcacccgtgctcccgttcatctggggagccggcttctcctcggccatcactccgttttcagccagggacccgtctgaagacatagcagaggacttcgattccccagattttgacttaagttctttggccacttcttctgctgaagcagcataaggaggtctgccctgaattgctgcctggtttttgtaacctctgccatagtaccttccacctcttccaaatgttctaatcactggggtggaaataactcctcttggacgccctctagctggtcctccgacagaaaccacctgcagggggaaaggcccccggcccccacggccccgcctgctcccagcccaatggccaaccacagtgccagctatttttagtttgcctccctgagaaggtataggttggactccgccctgggacttgctagtcctgctgctgtcactgcctgagaaggctccgcagtgtcccgatgctgccgccacacggaaggcacggtaagggcctgttgctaccgtttccccataggggcctccaaagccacagacgcctgcaaagcctctgcccctgccctgagagggtgggacaggcccaaagtgccgggggtacgcagaggcagggtagaagggcagggcaggtggcggcgggaaagggagcgtgtggctctgcctggagaagctgagcccctcgaggacgctctggcgcatcttctctaccttggcagcctgatcagcctgaccatcacagaggtcaatgagtggggtcttttcccggctggctttgaggagtttggattggaagagcttcccatcaaaatacatccaaggacaacagtgttcccaggggattggctgtccgcatgcatcatttgcaaacaaggccatgtctactccactcatgaagagagctgatagctgaattcctcggggatctaggttctcaatcttgagctcctggagctgatcaggctcgtagagtttgggggacagcgcctgagccaggaaggcatctagctcctgacgccgaaggatgcgtgctcccggccactgcaccatgtaccgtaagacgcagcagagcaccatgaggtgagtgggcacgttggcagggttgagcatggctggggtgtccgacctcatgcaggccaggaaggccctcatcctgcggttcttgtcctctaccgccttacccaaccacagcctcttcaggttggggcaggtccactccctgaaggcaagagcttcaaccagttccggggtttgaggagactttcctttgtaagctgcccattctttaatgatcactggtgaaaattctggtggaagtctgttctttctaaaagcaagtctctcagttttctttctgctttctgccaaactaaacaggactccgtaaacatactgacgaactggcctatagagcagagcggccggaggcaggtccttgttggcttcatcttcaatagaaacagcaattttgatttcacccttcgtcaggacatggaagatgtaggggtacatcagccccttcttgtgcctgtgctcggccactctcagcacctcaggtgcgacggggggcaggggaggtgtggtgatgtccatgtggttcctggtgggcatcgacaggaggcacgggattggctggacagtgcccatctggcttcccttgccttcggctagttggcttcctgaagaggcagtggacgagccttctgcctttgtttggtctcctgggtctcctcgtgcctgaggctctgagtggcttcccgtcttctcccagccaatcttgttcccgctgatatggtttgtcgcccctccgctgccctcgtcgttgtcggaagatgacgatgtagaagagccagggaagtaggcggaatccacgtggttggggctgccgctctgggccgggttgatgggcgaggaccgctcatacagcggcgtgtgcttcccttcgtgaggaatgttgctgtagctgttctgctccgtcagattcttcccgctcgtgtccaaagtgagaggtgctggctcagagaggctgtacgggtatggaccctggcccggggcgccccctgggctgggcacctgtggggccacgggctttgcttgcagagaggtctgcggaatgttgagcatctgaggaggaacatgcggcggcaccatcccaggcattccaaacggaccgggtctggctgctaagtaatgtggtggatgaaatgacataggcttactagtcgctgaataatatccaattgctctcttaaatcgaataactttgtcatctgttctagactgtgaatgctggaaaacatctttagctatggcatccaagtcagaggtgtcctgaatgttgcgtacatagtcagcaacggctttgatcactacgtcgcaaggtggcaagaccagctggtgggcccggacctttagtgaggctagtggatgttctggaccaagtaaactccagtgaaaggaagccagatcttcatcaggcagaatgtgatttcctaagagagcagcaaaaataggaaaacgatttggattcaggtccagttgcttggcaacttcatgcatcagatattggcttgtggtgagaacttttcccgttccggctcagttttagggcatgggcactgaaatagtaggggatgttgcacagtgcataatcagagtcatacgcaaccaagccatggaaaccattctctctgcagaaaccaatcacttcctgatggtgatcctcaatgctctgtgcaaccttgacgtggaagcggatgagcgccaggcggatgcagtgggccatgcagacgggcggcaggaaccagacctttggcggcggggtgcccttgttctggacatggctgacgatctgctgtgccgtctggcgctcgttgccctgccgcttgacccactcgtgcagccgggccttctcgagcgcgccgttgaagaagacgaagagctcgatgttgccgccgaagcaggccttggccagcgccgccaggtagccaagcatgtggttccactggccgccgctgacccagtcggtgtagaagccgccgtagaggcggtgcaggcagttgtcggcgtccaccagcaggcgcagcggggtctgcgggggccgctgccgcccgccgcccaccaggctgccccgggccagcttctgcagctccaccggcaccacggcgctcgggcagtgcttctcgatgtagtc

SEQ ID NO: 65231 - DNA, 361 bp, Homo sapiens
  misc_feature (1)...(361): n = a,t,c or g
ctcacgcaangcatggnnttaacgtccctaaaancccgccggacttttctgtaagaaagtgtggcanagcaccaaccccataaangtgacacatgtacaangaagggcaagganttctctgtacgcccagggaaagcggcgttatgacaggaagcagagtggctctttgtgtgccctggcttgtgttctgaagatacagctgataggttagttgggtccagattatagaggactgagtattcagcaatggtgggtgaattatttaagtctttggtgttcatctatttacaggaatgttttcgatttaaaggattaagtcttagcacattagaaaggaaataaaaatgaagattgtactatt

SEQ ID NO: 65232 - DNA, 1501 bp, Homo sapiens
atgagccccgggctgctgctgctcggcagcgccgtcctgctcgccttcggcctctgctgcaccttcgtgcaccgcgctcgcagccgctacgagcacatccccgggccgccgcggcccagtttccttctaggacacctcccctgcttttggaaaaaggatgaggttggtggccgtgtgctccaagatgtgtttttggattgggctaagaagtatggacctgttgtgcgggtcaacgtcttccacaaaacctcagtcatcgtcacgagtcctgagtcggttaagaagttcctgatgtcaaccaagtacaacaaggactccaagatgtaccgtgcgctccagactgtgtttggtgagagactcttcggccaaggcttggtgtccgaatgcaactatgagcgctggcacaagcagcggagagtcatagacctggccttcagccggagctccttggttagcttaatggaaacattcaacgagaaggctgagcagctggtggagattctagaagccaaggcagatgggcagaccccagtgtccatgcaggacatgctgacctacaccgccatggacatcctggccaaggcagcttttgggatggagaccagtatgctgctgggtgcccagaagcctctgtcccaggcagtgaaacttatgttggagggaatcactgcgtcccgcaacactctggcaaagttcctgccagggaagaggaagcagctccgggaggtccgggagagcattcgcttcctgcgccaggtgggcagggactgggtccagcgccgccgggaagccctgaagaggggcgaggaggttcctgccgacatcctcacacagattctgaaagctgaagagggagcccaggacgacgagggtctgctggacaacttcgtcaccttcttcattgctggtcacgagacctctgccaaccacttggcgttcacagtgatggagctgtctcgccagccagagatcgtggcaaggctgcaggccgaggtggatgaggtcattggttctaagaggtacctggatttcgaggacctggggagactgcagtacctgtcccaggtcctcaaagagtcgctgaggctgtacccaccagcatggggcacctttcgcctgctggaagaggagaccttgattgatggggtcagagtccccggcaacaccccgctcttgttcagcacctatgtcatggggcggatggacacatactttgaggacccgctgactttcaaccccgatcgcttcggccctggagcacccaagccacggttcacctacttccccttctccctggggccaccgctcctgcatcgggcagcagtttgctcagatggaggtgaaggtggtcatggcaaagctgctgcagaggctggagttccggctggtgcccgggcagcgcttcgggctgcaggagcaggccacactcaagccactggaccccgtgctgtgcaccctgcggccccgcggctggcagcccgcacccccaccacccccctgc

SEQ ID NO: 65233 - DNA, 6298 bp, Homo sapiens
ggtgaaggacctgggcagcctcaatgggacgtttgtgaatgacatgcgcatcccggaccagaagtacgtcacgctgaagctcaacgatgtcatccgctttggctacgattccaacatgtatgtgctggagcgtgtgcagcaccgagtcccggaggaggcactcaagcatgaaaagtacaccagccagctgcaggtgagcgtgaagggtttggcgcccaagaggagcgaggcactgccggaaacacacaccatactgcgaggcctcgaaccccaggccggagaagggggaccggagaccaggaacagaggcagcctcttaccgcacacccctgtatgggcagccctcctggtggggtgaggacgatggtagcacgctgcctgacgcccagcgccagggagagccctacccagagcgccccaagggacccgtgcagcaggacggggagctccacggcttccgcgcccctgctgagcctcagggctgctcgttccggcgggagcccagctacttcgagatccccacgaaggagaccccgcagccgtcgcagccccccgaggtgccggcacacgagatgcccacgaaggatgcagaggcaggtgggggcggagcggcccctgtggtgcagagccacgcctccttcaccatcgagtttgatgactgcagccctggcaagatgaagatcaaggaccatatcaccaagttttccctgcgccagcggcggcccccgggcaaggaggccacacctggcgagatggtgtcggctgagaccaaggtggccgactggctggtgcagaatgacccgagcctgctgcaccgggttggccctggggatgaccgccacagcaccaagagcgacctgcctgtccacacccgcaccctgaagggccacaagcacgaggacggcacgcagagtgactcagaggaccccctggccaaggcggcctcggccgctggggtgcccttggaggccagcggggggcaggtgcggctgcagaggcagatcaagcgggacccccaggagctactacataaccagcaggcctttgtcatcgagttcttcgacgaggacacgccccgaaagaagcgctcccagtccttcacgcacagcccgtccggggaccccaaggccgacaagcgccgtggcccaacgccggccgatagggaccgccccagtgtcccagccccagtccaggcagggggccgcagctcggggccacagagggccggctcgctcaagcgggagaagacagaggaacggctgggcagcccctcgcccgcctcccgaacccctgcccgccccttcggaagcgtggggcgccgctcccgcctggcccaggacttcatggcccagtgtctgcgggagagctccccggccgcccggcccagccccgagaaggttcctccggtgctgcccgctcccctgacaccccatgggaccagccccgtgggccccccgaccccaccgcccgcccccacggacccccagctgaccaaggcacggaaacaggaggaggatgacagcctcagtgacgcagggacatacaccatcgagaccgaggcgcaggacacggaggtggaggaggctcggaagatgatcgaccaggtctttggggtgttggagtcccctgaactctccagggcatcttcggccacctttcgcccagtcatcagaggggacagagatgagtctgatgacgggggcgtggcccagcggatggcgctactgcaggagtttgcctcccggccactgggtgcggccccccaggcggagcaccagggcctcccggtgccgggctcccctgggggtcagaagtgggtgtcccgctgggccagcctggctgacagctactcagacccgggcctcacagaggatggcctgggacgtagaggcggggagccggaggggtccctgcctgtgcgcatgcggcgacggctccctcagctgcccagtgagagggctgacagccctgcgggcccagagagcagcaggaggagtgggcctgggccaccggagctggacagtgagcagcccagccgcctcttcggccaggaggagttggatcctgacagcctcagcgatgccagtgggtcggacgggggccgaggccccgagccaggggtggagccacaggacagcagacgcaggagcccccaggaggggcccacgtggagcaggggtcggcgctcaccaagggcccccggggagccaactcccgcctctttcttcattggggaccagaatggggacgctgtgttatctaggaaactgcttgcggctccaggggatggggagggcctagggcagacagcccagcccagccccccagcacgggatggcgtctatgtcagtgccaatgggagaatggtcatccagctacggcctggacggtccccagaacccgacggccctgccccagcctttctccggcaagagagcttcactaaggagccagccagtggtcccccagcgcccggcaagcccccccacatctccagccacccgcttctacaggacctggccgctacccgggccgcacgcatggacttccactcccaggacacccacctgatcttgaaggagacggagacggccctggcggccctggaggcccgactcctctctaattctgtggatgccgagtgtgaggggggcagcaccccgaggccgccggaggacgccctgtctggggactcggacgtggacacagccagcaccgtcagcctgcgtagtggcaagagcgggcccagccccacaaccccccagcctctgcgggcacagaaggagatgtcgccatccccgccagctgcacaggacccgggaggcaccgccctggtcagtgcccgtgagcagtcctcagagaggcagcatcacccacttggcccgacggacatgggccgtggagagccggtacggcgctcagccataaggcgtggccacaggccccgagggtccctggattggcccagtgaggagcgtggccctgtcctcgcccacctacccagctcagatgtgatggcctccaaccacgaaacccctgaggccaccggggcaggacggctaggttctcgccggaaaccagcggccccaccgccatccccagctgcccgggaggagcagagccgtagctcagccagctcccagaaggggccgcaggccttgacccgctccaacagcctgtccacccctcgccccacacgggcctcccggctgaggcgggcccggctgggggacgcttcagacactgaggctgcggatggtgagcgggggtccctgggcaaccctgagcccgtgggccggccagctgctgagcaggccaagaagctgtcacgcctggacatcctggccatgccccggaagcgggccggctccttcacagggactagtgaccccgaggcagcccctgcccgcaccagcttctctggccgcagtgtggagttgtgctgtgccagccgcaagcccaccatggccgaagcacgggctgtctccaggaaggctgccaacacagccaccaccacgggtccccgccagcccttcagcagggcccgctcgggcagtgcccgatacacctccaccactcagaccccgagggctggcagctccagccgggctcgttcccgggcccccggcccccgggacacggacgacgatgaggaggagcctgacccttatggtttcatcgtgcagacggcagagattgcggagattgccaggctgagccagacgctggtgaaggacgtggccatcctagcccaggagatccacgatgtggctggggacggtgacacactgggctcctcggagcctgcccacagcgcctccctcagcaacatgcccagcacccccgcctcgaccatctctgcccgggaggagctggtgcagcgcatccccgaggccagcctcaacttccagaaggtgccgcccggctcgctgaactctcgggactttgaccagaacatgaacgacagctgtgaggacgccctggccaacaagacgcggcctcggaaccgagaggaggtgatcttcgataacctgatgctgaacccggtgtcccagctgtcgcaggccatccgtgagaacacagagcaccttgccgagaagatgaagatcctctttcagaacacagggagagcttgggaggacctggaagccaggatcaacgccgagaacgaggtgcccatcctgaagacatctaacaaggaaatcagctccatcctgaaggaactgaggcgggtgcagaaacagctggaagttatcaatgccatcgtggaccccagtgggagcctggacctgctcacaggaaacaggagcttggccagctctgcacagccggggctggggaagggccgcgtggctgcccagagcccaccctcacccgcctcagccgaggccctgctgccagccctgcccctgaggaatttcccacagcgggccagctgtgggcctcccagcctcccggaccccaccttcctccctgatgccgagaggttcctgatctaggccccagacctggccaggccagcctccctgtgcgtgtgcgtctctgccttccgtccgccgcacacccgcctgcctggccgcaggtggttctccctgaagacccccacatgtgccatatccctgtgggcgggtgcctcccacgcccttgccccctcgtcagctcccagccagcaccctactcaccctgtccagccccatggccacccccacccctgcctcgccccctacaggcctctgggcccagctcctggccaggctgctgccaaggtcaagccctcaagggcattaccccgcctcctcttcatcactgttatttttgtctttagctttaaaggaaagagttgttggtgccattgcaggtgccccctccaggcctgactggctccgccaggcactaacctgccataaccctttgtgctggcctgcggccaggcagaggaagagaggtcgactgtggggtcatttggtgccaaacatggaggtgggcaggctcacctgttcctgggactgtctgagatggcagggcacttgccctggtggctcccacctgaccccaggccttttataggcaggagccccactgcttccagcctctggtgccaacacagttgccaaacccattgagcttggggctgccctgtggaggcctcctgggtatggaccaggggcttgttgagagctgagccatgcacacaggtgcagacaccccccaactcccatgcacacggctagtccaggcgcctccacgctgcaccgtgaggactgcagggcatgtccccgtgaggggctatgggcctctgtaggtgggcttccaaggtcctgggtgcagccgggtgcatggcagcccttctggcgggggtgagcgcacgaccaaagtcactggaagccgggtttccggaagctcgcagcttggcctgcaccacacgccctccccttttggcttcacgccatcaggcctcaagtgggcatgggggcagggacgggcccaggaactgttgttttctcaggattctttcagctgggaacatggcaggtgagcagagcttggtgcctctgccgtggcccctgctggggcagcccgtgttgccggagcctctaagccaaagagcccgttggccgtggttggtgggggtggacgtgggggtgtcccacctggaccagactggcgtgggtgagctccacaccctgcctggcaatggtatgagagtcggacctggacagggccagctgctgggggagcggcactggggactggaggctggaagcgggtggtgtgtgtcccctgtttacttttagctgagctggggttgggtgtacgggttctgttcctctgagccctgcggcccacctgatgtttacgtgtgtgtgtgagggggggcgggggtggcaggtgtccccccctggtccccgccccaagagcctgctgtctgtatggaggaggtgctagcccggtccaccgggctgctgcccacccctgcatgccccagttgcccaccccgcctgcccctggacatgaagtggtcacgcttcatccacggctccttcccacccctcggcagtggctgtgcaatgttttaagttcacaagttcctgctcctccccacactgagctcctttgttcctccccctccagcctttgcctgggaactggtccttgtttgccgggcttctcggagggttcactgtacattcgttctcaggtggtcttgtggctgtctttcggaaaatggttattttatatgatttgtcatggaatttgttctaataaatcattcttctatcacatggcaaaaaaaaaa

SEQ ID NO: 65234 - DNA, 4348 bp, Homo sapiens
gttacatttatgacatcctgggtggaattcttaagaaatattggactaaaatacatactttctcagcagcagttgttacagtttgctaaggaaatcagtgtgagggctaatacagaaaactggtccaaagaaacattgcaaaatacagttgatatccttctgcatcatatattccaagaacgaatggatttgttatctggaaattttctgaaagaactatctttaataccattcttatgtcctgagcgggcccccgcggaattcattagatttcatcctcaatatcaagaggtaaatggaacacttcctcttataaagttcaatggagcacaggtaaatccaaaattcaagcaatgtgatgtactccagctgttatggacatcctgccctattcttccagagaaagctacacccttaagcattaaagaacaagaaggtagtgaccttggtccacaagaacagcttgaacaagttttaaatatgcttaatgttaacctgggtcctcctctttgataaggtaatcaataactgcagaaacatatgcaacataacgacgttggatgaagaaatggtaaaaactagagcaaaagtcttaaggagcatatatgaattcctcagtgcagaaaaaagggaatttcgttttcagttgcgaggggttgcttttgtgatggtagaagatggttggaaacttctgaagcctgaggaggtagtcataaacctagaatatgaatctgattttaaaccttatttgtacaagctacctttagaacttggcacatttcaccagttgttcaaacacttaggtactgaagatattatttcaactaagcaatatgttgaagtgttgagccgcatatttaaaaattctgagggcaaacaattagatcctaatgaaatgcgtacagttaagagagtagtttctggtctgttcaggagtctacagaatgattcagtcaaggtgaggagtgatctcgagaatgtacgagaccttgcgctttacctcccaagccaggatggtagattggtaaagtcaagcatcttagtgtttgacgatgcgccacattataaaagtagaatccaggggaatattggtgtgcaaatgttagttgatctcagccagtgctacttagggaaagaccatggatttcacactaagttgataatgctctttcctcaaaaacttagacctcgattattgagcagtatacttgaagaacaattagatgaagagactcccaaagtttgtcagtttggagcgttgtgttctcttcaaggaagattgcagttactcttgtcttctgaacagttcattacaggactgattagaattatgaagcatgaaaatgataatgcttttctggccaatgaagaaaaagccataagactttgcaaagccctaagagaaggattgaaagtatcctgctttgaaaagcttcaaacaacattaagagttaaaggttttaatcctattccccacagcagaagtgaaacttttgcttttttgaagcgatttggtaatgcagtcatcttgctctacattcaacattcagacagtaaagacattaatttcctgttagcactggcaatgactcttaaatcagcaactgacaatttgatttctgacacttcatatttaattgctatgctaggatgcaatgatatttacaggattggtgagaaacttgacagtttaggagtgaaatatgactcttcggagccatcaaaactggaacttccaatgcctggcacaccaattcctgctgaaattcattacactctgcttatggacccaatgaatgttttttacccgggagaatatgttgggtaccttgttgatgctgaaggtggtgatatctatggatcataccagccaacatacacatatgcaattattgtacaagaagttgaaagagaagatgctgacaattctagttttctaggaaagatatatcagatagatattggttatagtgaatataaaatagttagctctcttgatctgtataagttttcaagacctgaggaaagctctcaaagcagggacagtgctccttctacaccaaccagccccactgagttcctcacccctggcctgagaagcattcctcctcttttctctggtagagagagccacaagacttcttccaaacatcagtcccccaaaaagcttaaggttaattctttaccagaaatcttaaaagaagtgacatctgtggtggagcaagcatggaagcttccagaatcggaacgaaaaaagattattaggcggttgtatttgaaatggcatcctgacaaaaatccagagaaccatgacattgccaatgaagtttttaaacatttgcagaatgaaatcaacagattaaaaaaacaggcttttctagatcaaaatgcagacagggcctccagacgaacattttcaacctcagcatcccgatttcagtcagacaaatactcatttcagtagattctatacttcatggaatcaagaagcaacgagccataaatctgaaagacagcaacagaacaaagaaaaatgccccccttcagccggacagacttactctcaaaggttctttgttcctcccactttcaagtcggttggcaatccagtggaagcacgcagatggctaagacaagccagagcaaacttctcagctgccaggaatgaccttcataaaaatgccaatgagtgggtgtgctttaaatgttacctttctaccaagttagctttgattgcagctgactatgctgtgaggggaaagtctgataaagatgtaaaaccaactgcacttgctcagaaaatagaggaatatagtcagcaacttgaaggactgacaaatgatgttcacacattggaagcttatggtgtagacagtttaaaaacaagataccctgatttgcttccctttcctcagatcccaaatgacaggttcacttctgaggttgctatgagggtgatggaatgtactgcctgtatcataataaaacttgaaaattttatgcaacaaaaagtgtgaagatatttaacgaaaaaaaaggtagatctttgaatgtggttgtagcacgaataaattgctgtacttcattaagcttcattgccaattagctaggaattgttaagcacattgcagattgttcttggagaattctggagttgtcatgaacatgactaccaccggaaaaccttaactgaatctaatagatgactattttgaagatggtggtgagctgcaaaatagctggatggatttgaatgattgggatgatacatcattgaactgcactttatataaccaaagcttagcagtttgttagataagagtctatgtatgtctctggttaggatgaagttaattttatgtttttaacatggtatttttgaaggagctaatgaaacactggacatataattggtttaaacataaggggaattaagtctttgtagtctgtcatttttttaagtggatcctcttggatgcgttattttctcatcagctggctctgatcatgaatttgttgtaattttatgttgtactcagtgcatttaagaaatggtagagtattttaatcctattacttgactaagagtgtgaaggtagtactttttagagtgcactgagtgcactttacatctttatttaaatttttttttaacatcttatgtttacaggcttcctgtttgatgaagatagcaacggaaaactcaaaatggtggcagttcttattaccagttgttagtattgtttctggaaactgcttgccaagacaacatttattaactgttagaacacttgctttatgtttgtgtgtacatattttccacaaatgttataatttatatagtgtggttgaacaggatgcaatcttttgttgtctaaaggtgctgcagttaaaaaaaaaacaaccttttctttcaatatggcatgtagtggagtttttttaactttaaaaacatcaaaaattgttaaaatcattgtgttatctagtagtttataattatcggcttatatttccccatgaatgatcagaactgacatttaattcatgtttgtctcgccatgcttctttactttaacatatttcttttgcagaatgtaaaaggtaatgataattagtttatataagtgtactggctgtaaatgatgctaaatatactttatgcaattaagggcttacagaacatgttgaaactttttttacttttattgggaataaggaatgtttgcacctccacattttattgcttctggatgtgaaatcatgtaattatttctgctgttatataaagtgccatacttttaataaaggaaaatgtacatatgaaaaaaaaaaaaaaggggcgcccgct

SEQ ID NO: 65235 - DNA, 2983 bp, Homo sapiens
  misc_feature (1)...(2983): n = a,t,c or g
ttttttttttttacacctaaatttaatttattttattaaaataacataattcgagggaccatcagataactgtattttgtcaggtgcaataaaaaacaaaattaaaacccaaatcatcaaaaaaacctgttttcctggcttccttggtatacacatgatgtagactagagaaacaaggctgtttgtttgttttgtttgttagagaaacgaaaggcgtgccctgcggccccgcccccatagggggcagctccctggaaagacaaaaattcaccatgatgggaaggactggctccctgaggaggggctgaggatgcgggaatttgcccgagtgccttgcctggggaaaaccatcccaatggcactgggacaccttaggaaggctgtgaaagggagggacgtgttcccctaaggaaaaagttcccatagtaccaaaggcagggttccttccgggcgggccagagttttcggcagtccttgggctgtttgggtgcctaatgtgccaaatggtctggacgctgcaccactcttctgaaaaaaagtcccgcctgttgacatgcattccttccagaaagctgattttccaaaattcccatggtgtctcccacaataaggggctgggactggcctggcttaccttacttccctctaaattatcatgtagcccacagctggggctgggccccctgcttttttgtactaacatcaacaatcccatttgcgcatcctaaagaaaggctgggcccttgagcatgggggaatgtgggggagggagcaggacacaccagcactgcaaatgggcttccttcttccagggccccaaagggaatagaaaagaaggcaacaaggagtttaaggcccctgtgaancaatcctaagaaggtcccttaacaaccagcttcctctgaaaaacatgtgttctgccctctggagaaaagggagcaagaaaagtggtgcctgctggcttctcctcctcccctggcagcctgaagacaggtgcaaagtcaactaggaagaccagccagcctcggggaacttggtcagcgtgcaagccattgatatcctcagtgtgggctgcccgatgcaagggatggctcggaagcgctccggttgatcttcggtagagagtgttggagcagctcaatggaaggccaggatctggggaaaaaagaggcctctcttcctttaactttcttcacacagtcagctaccagcctcttcattgcttttggggcagttacttatatagcttactaagatctggggaggcatatccttcggcccaccatgaagatgatctgatctcggttgttgatgtgagaataaggaagctcccccgtcatcagttcatacaatacgatgccataggagtagacatccgactggaaactgaatgggttgttatcctgcattcggatcacctctggggccatccagaggacagagccagtaggttgttcaacctgctgagaaccactccagcgtgactttactgttgccaaaccaaaatctccaattttcactgttaagccttcatggagaaatatattgttggatttcatgtctctatggatgatgttctttgcatgcaaatagtccattccctgagccgtctgccgggcaatgtcaattaagctggaacatctgaaacttggtctcctggacatgcaggtgtttgtagaggctgctgccctcgcaccactgggtcacaattgccaggttgtcctttgtcatgtaccccatgaaaagcagaatgttcacatgccgtgttttgcgcagaacagccacctcattcctgaaggcctggaattgctctggggttgggtcgacaacctttaggatctttactgcaacatctccgtgccatttacccttataaacagttccaaaagagcctgacccaatccgagtggacagcatcacttcactggcttctatttcccaataatagcttgaatctctctgtccacgaggcctaattttgtttttctcctgggtcccagatactggtgcccgctctctttgtgctggcacgggggttttcggctgtgaccagcctgttgggctcagattgttggggctactggacagggctgaaggtgaggctgattcgctgtgacttcgaattgcatccttctgcaatccggtgcgccgcagccgctgggccctggactccaccggctcctcgtccgagctctctccaacttcggcctccagctgctctgggcccagctcggactggtccgccgggcccaagggctctggtgccttctggaaagcgctggctgggacttcaccctcctccttgaagagcagaacgtgaagcttcccgcgcgccaccagcagcccgtggttggcctccagccgctgcacctgggctgcgcggcgcaccgcgcgctcttgggcggcgttggcgtgcgagctcacgcgctccgccttggccagcagctgcgccaaggtgttgctggtggtgtcgtggctgcgactcagagcgcccaggccgctctggatgcggcgcacggaccctgccaggcctccctgccttcgagccaggcctccctgccgctcccgcagagtctccagcatggaggccagcttctccagcagggtcaccaccgtcacggcgtgcacgggaccccccgccggcgcctcgggcacaggccccggctccaacgcactctccctcatgatccctgaccgctctgctccgtctgcctgcaactgctggctgcactacggtcaggggcctcctttccctggctcctccccagctccagctgtgactcaggcaggcggagttggccttctggggcggcgggagggcgcgagggcgtggggatgttggcagcggggtctcttgaaagcgtttcgccttccgctgtcccgcgccgggggcctgctgggaagcctgttggccccaaatcggccccctgcaaaccctctcactctgagtttgaggtaccctcctccgctccaaatccctggc

SEQ ID NO: 65236 - DNA, 1321 bp, Homo sapiens
cacacactgcaccacagctctcccacctctgaggccgaggagttcgtctcccgcctctccacccagaactacttccgctccctgccccgaggcaccagcaacatgacctatgggaccttcaacttcctcgggggccggctgatgatccctaatacaggaatcagcctcctcatccccccagatgccataccccgagggaagatctatgagatctacctcacgctgcacaagccggaagacgtgaggttgcccctagctggctgtcagaccctgctgagtcccatcgttagctgtggaccccctgggcgtcctgcttacccggccagtcatcctggggtatggaccactgtgggggagcccagccctgacagctgggagcctgcgcctcaaaaagcagtcgtgcgagggcagctgggaggatgtgctgcacctgggcgaggaggcgccctcccacctctactactgccagctggaggccagtgcctgctacgtcttcaccgagcagctgagccgctatgccctggtgggagaggccctcagcgtggctgccgccaagcgcctcaagctgcttctgtttgcgccggtggcctgcacctccctcgagtacaacatactggtctactgcctgcatgacactcacgatgcactcaacgtagtggtgcagctggagaagcagctgcagggacagctgatccaggagccactggtactgcacttcaaggacagttaccacaacctgcgcctatccatccacgatgtgcccagctccctgtggaagagtaagctccttgtcagctaccaggagatccccttttatcacatctggaatggcacgcagcggtacttgcactgcaccttcaccctggagcgtgtcagccccagcactagtgacctggcctgcaagctgtgggtgtggcaggtggagggcgacgggcagagcttcagcatcaacttcaacatcaccaaggacacaaggtttgctgagctgctggctctggagagtgaagcgggggtcccagccctggtgggccccagtgccttcaagatccccttcctcattcggcagaagataatttccagcctggacccaccctgtaggcggggtgccgactggcggactctggcccagaaactccacctggacagccatctcagcttctttgcctccaagcccagccccacagccatgatcctcaacctgtgggaggcgcggcacttccccaacggcaacctcagccagctggctgcagcagtggctgggactgggccagcaggacggtggcttctttcacagtgttcggaggctgagtgctgaggccgg

SEQ ID NO: 65237 - DNA, 777 bp, Homo sapiens
gggtccgctgcagggcaggttcagcagcaacagcagcggcgacaccagcagggaaaagtgacagtgaaatacgatcgtaaggagcttcggaagcggctggtgctggaggaatggatcgtggagcagctgggtcagctctacggctgcgaggaagaagaaatgccagaggtagaaattgacattgatgatctttttgatgcatacagtgatgaacagagagcttcaaaattacaggaagctcttgtagactgctacaaaccaacagaggaatttatcaaagagctgctttctcggataagaggcatgaggaaactgagcccctccgcagaagaagagtgtatgattctggaacagggtgaaactctcccagagatgaagaaagagtcctgggatttgtacttcatgaagacttttgtgaaagaataggtgtccttatgaacaacgtttttgttttttttttttcttttttgggggtaaaggtgggggggtctattagacatttattcaagagcgttcttttttgggttttaaaggtttttgttaatgtaatatttaaataccaaaaatatcttgactttagccacagcctacccagggtttatcaagggagggggaccctcagggaagggcccccccaggttgcgtttcctgcagggactcaaatgttaattcccttatgatcccggaaaaatagtttttttacaagaagttgggcaaaatttttttcctaaagttggacattggactcaattggcaaatttttcaacctggtatttt

SEQ ID NO: 65238 - DNA, 408 bp, Homo sapiens
ggcttccccaagggttcaagaactcccccaccatcttcggggaggcattgcctcaagacctccagaagtttgccaccagagacctagactgcgtgttgctccagtacgttgatgatcttttgctgggacaccccatggcagtcgggtgcaccaaaggaacagatgctctactccggcacctggaggactgtgggtataagatgtccaagaaaaaagcttagatctgccgacagcaggtacattacttaggatttactatccgaaagtgggagacagcctaggatcagaaagaaacaggtcatttgaaatctactggagcctaagaccagaaggcaggtgagagaattcttatgggctgtggggttttgaagactgtagatcccaaaatttgcagtataagccaagcct

SEQ ID NO: 65239 - DNA, 3932 bp, Homo sapiens
  misc_feature (1)...(3932): n = a,t,c or g
ttttttttttttggggtgcaggtggcgtttattttcatggatttatacacactggaaaagcctctgcgcccatgcccacgccctcctccctccccccggcgctgggtcccctcatatgaaagggaagtaacaccgaggagcacacggagatatagggtgtggggctgggggggccagcgctggggccaaaagtctgggtccccagcctcccacacgcagcccctcgggccccttgggtgtgtcaataaataacccaggtccaggctggtgtgggcctcactcctcgctgtccagcttcaggctgatgctccgtgctttgccccgtgccagggtggtgggtggtgttcccgggccctcacgctccgcctggctggggcccctcgagcgaagcagctggctctgtttgcgcaggaagtccacgggggcagccacaccatagctgctcttgcccaaggcagctctcgggggtcccgaggaggcatgcgagtgcgagcccgcttccagctggcccaggtgggccacatagccgtctgacaggaactggcactgcgcctgtagcttccgcacggcacggcccacgatgtaggtctggctcggggacagccccagcgccgcgtatacagccacatctttgggagacccataaccggccacgatgttcagtcctacctcctgcaccaggctctggagaaacattgccttctggcgtagtgggtcgtgggtgaggccgtcgcagaaggagacgacgcccgttgggggaagttgtgctgccganagccatgccaccacgcggtgcttctgcatatccggccggcctgtgacattacaccgatcaggtagccggantccnnagtcctgccagtgcctgaccacgtccacgggcgccagctcgcaccttggggtcgctgcccatgatggagacgctggcggtgaaggagccgtcgatgctgaagaccacagcctccgtgccgcgggccaccacagtcaggcagcattcggcataggtgtggtcgcccctgaccaccatgcgcacggggtagacaccaatgcccagcgcgcgttctgggggaactgggaaggtgaggcggcccgagctattggtgacttcggtgccaaagtggatccacttgcccgacagcggctgcgtcatgatgtagacatccaccttctctccagtgagcgtgacgacgtccaggggcccgtacatgaagcgcccgcttagcacctgggggcggccctcgcacaccaccgtgtcgctcgcccggtggttggaagtgacgttccggatcttgacctgcgtgcgttttcgctgccacttctccctggggaaggccgggctgtagatggacggctcctcgcattccgccagctgtggccgctccttctcgatcacctggcgcaggatgaacgccaccacgtcggcggactcccagtagctggcgtggaagaggtggggcagcgtgacggtgggaaaggcggtgagcgcctcggggcagtacagcgagtagtcgatccgcttggtcccccaccagcgctccaggatcttaaccacctcactggtggtgctgggggcggctggctgggccggggggtcagtggccaactcactgcccttccagaaggcaccgctagtagaggtgggtgttgagggcaccagcatctccagctcctccagaaagaggctggagtgcgtctgcagagtgtcggccagcagcagggatgagccatctcccagggggaacttctggtagcggggcacggtcagtggggcgatggcctggaacttcggggccagcaggggctcgaggcgtgaggcgcaggggtcggccgcgtggaagaggttgtagatctgttcacaggctgggcgcatctgggctgcctccagggcgggcatcacagttttgcgcagagccagcaccaggcccagtggggagccgaagaggaagaagccagagaccttgaagtcaaggcgggcagtgctgctggggccgtcaggtgcctcggaactggcagcgggtgggcagaaggccgtgcttgcccgccggggctcccaggaggaggtggttgcgggggctgcctgaaggctgttctgagagccctcgggctcaggactggccatgtcgctggggatgcgctggggaggcaaggccgagggttctgggctgccccgacccaggccttccacaccatctgccagggggtcccgcactgggccaaactccggagagagcagctcattgttcatgctcccacggcggctgctgccccgactcccggtgcccgcgttagcactgtggcagagtgcatcaaagcccaggatgccaccaacaccatctccaatcagtgcgacctgcccacagaagccggcaccctcaggtgagcgcaggaaggctgagtaggcctggttggtgcgggcaatgacggtggccacggcgccctggtagcgggaggatgaggtggccagcagtggcagggcagccagtggaatgtggtcttgggagcgagacaggctgtccccatcgtggctgtaagggctcaggttggagacaagggcataggcggcggcgcagatgggtggacagggcaccagtcgcagcgccacgtggcccaaggcctcagggaagtggatgcgggtgacggcctcgaaggcggagctcagcgtctgcacatccgcctgcttggagttggcgtctccagggcctgagtccaggatgttgccgctgtgcaggataaggaagagggcgtggactgcgcatgcctcagcccccagctccccggctccatccaggccctctgagtccctgggtgcttgggccccatcctcaatgcctttagctgcctcggctccaggctctggcgttccctctgcctccactggggaggcaaaggcatcaatgaagtcattggagttccacttggtcatctccttggggaagacctcctcactgtccgagaagccgtgggcatcaaagaactcttcctcggagctgttctcagagtctcgggcaatgttctgcatgcgccactcagacaagctctgggggagacacagcccctccatgttggggatgagtagggagggaacgggaaggatgagggaccactgcttcccaaagctggcatcgggggaggcatctgggcctgggggggcctcaggcccatcgggggtgccagtgttgctggccgcagaccgggcctcggtgctcggtttcccggggggctgggcctcggacccctcactgcctgtgttgcacttggccatgcgctgggccagcatgcgagcagtctcctcttccagtgcccggatgtcagccatgctcagctctgtccactcatcctgccagcaccaggcctggcggtgggcccgcagcatcacccgacgcagacctacatcatggatgaactgctcgatcttggcttgcatgccccagtagcggaactcaaccttgcacagcttataggcacacataaggggccccgtctgtgccgccgtccgtgcccagtcatcagacagtggccctcggcccgtcttgaccgagtgataaagccgggggtcctcttctgctttgtactcgcctggggccactgcatcccgcacgatgtcgatggtgtccaggatgcgctgtctcctctcggccccgctcaggttgaagacgtttggctgctgccccccatcaggcaggtaataggtctcaatttcaatggagaatttctccacgaaagggcaggtgtaccgggttcgggtgtaggggtaggcattccaggattcctcttctacctgcagggcagccttgggcagcagtgcccggaaccagcctgggatgtgggagcccacgtggtacaccttgtgtgtgtattgcccgctgcccccgggcccatccgtgtagggccggttggccaggatctccacgccgctgcccgcaccactagcc

SEQ ID NO: 65240 - DNA, 3235 bp, Homo sapiens
actcggtttagagggcttcggccggcggtggccccatggacagccctgctggcactgggcctgcctggctgggtgttggctgtctcagccacggcggctgctgtggtccccgagcagcatgcctccgtagctggccagcatcccctggactggctgctcacagaccggggccccttccaccgcgctcaggagtatgctgacttcatggagcggtaccgccagggtttcaccaccaggtacaggatttatagggagtttgcccgttggaaggtgaacaacttggctctggaaaggaaggacttcttcagtttgccattgcctcttgccccagagtttatccggaacattcgcctccttggaaggagacccaatctgcaacaggttacagaaaatctgattaaaaagtacggcactcatttcttactttctgccacccttggaggagaagagtccctgaccatttttgtggacaagcagaaactgggaagaaagacagagacaacaggaggtgcctctataatcgggggcagtgggaacagcacagctgtgtccctggagaccctgcaccagctggccgcctcctacttcatcgacagagagagcacgctgcgacggctgcaccatatccagatagccacgggggccatcaaggtcaccgagaccaggaccggtcctctgggctgcagcaactatgacaatctggactcagtcagttctgtcttggtacagagtccagagaacaaagtacagttacttggccttcaggtgctgctgcctgagtatctgcgtgagcgctttgtagctgcagcactcagctacatcacatgcagctctgagggtgagctcgtctgcaaggagaatgactgctggtgcaagtgcagccccaccttccctgaatgcaactgccctgatgctgacatccaggccatggaggacagcctgctgcagatccaggactcctgggccactcacaaccggcagtttgaagagtcagaagagttccaggccctgctgaaaaggctgcccgatgaccggttcctgaactccacagctatctcccagttctgggccatggacaccagccttcagcaccgctaccagcagctgggagctggcttgaaagtgctgttcaaaaagacccatcggatcctacgccggctcttcaacctctgcaagcgctgccatcgccagcctcgcttccgcctgcccaaggagaggtccttgtcctactggtggaaccgaatccagtccctcctctactgtggggaaagcacctttcctggcactttcctggaacagagccacagctgcacctgcccctatgaccaatcttcctgccagggccccatcccatgtgccttgggcgaagggcccgcgtgtgcccactgtgctccagacaatagcacacgctgtgggagctgcaacccgggctatgtgctggcccaggggctgtgccggccagaggtggccgagtccctggaaaactttcttgggctggagacagacttgcaggacctggagctaaagtacctgctgcagaagcaggatagccgcattgaggtacactccatcttcatcagcaatgacatgcggctgggcagctggtttgacccttcctggaggaagcgcatgctgctcaccctgaagagcaacaagtacaagcctgggctggtgcacgtgatgttggccttgtccttgcagatctgtctcaccaagaacagcaccctggagcctgtcatggccatctacgtcaacccctttgggggcagccactctgagagctggttcatgcctgtgaatgagggcagctttcctgactgggaaaggactaacgtggatgcagctgcccagtgccaaaactggactatcaccttggggaataggtggaagactttctttgagacagttcatgtttacctacggagccgaatcaagtccctggatgacagctccaatgagacaatctactatgagcccctggagatgactgatccctctaagaatttgggttacatgaaaattaacaccttggcaggtctttggctacagcctgccctttgacccagattgctatccgggacttaattctccagttggactacccatatactcaaggttcccaggactctgcactcttgcagctcattgagctcagggaccgggtgaaccagctttctccacctggcaaagtccgacttgaccttttctcctgcttgctccggcatcggcttaagctggccaacaatgaggtgggcaggatccagtcctccctgagggctttcaattctaagctgccaaaccctgtggaatatgagaccggcaaactctgtagctaatgggcagcccacttcagcactgggcaaggaggggatccatgaatctggggtacaaagataatctaagccctcaccttagtgccaacagggtgtgctcccacgagactttcagcatccagtagatgggacctcgaggctcgagctgaagcaggcgagagagaaacagctactgcgtgcgtgcgcgcacgcatacacacacacacacacacactggcacagggaggctacaactaagcagcctcagatctgtaaagttgattggtgctttctaaaatgaatgcaattgaaagaaaggagccaaggaagagattaagaaaaagaaccagctgaaccatgaaacaaacaaaaatcctaaaagtgattcttgtcattcaagaaagcaagaggggacaacaatgggaggggtcggagctcttcccttcccctctgtggagtcacttttgtattctttttaaccagatttcttaaaatgttgttgttttgtgaatcctgacattggttcttacttttgtatgctgcctcctctgtgccctcccagacgctgactgggaaacacaagaagtacaaccaacaggaaccagcgccaagggcaggcagcggcctccttgctcccctcccttactcctccctctgctgcctcctccccccaccaagtttcagggccctggattgttcccagttcccattgtggtcccttcagagctcctttccaacagcatctctctgtcgaagaaagaagctctgtcaagttagagagagacaatgtgtaggaaatgttcttttttaaaaaaaaataacaaaaacaaaacaaaactatttattttgggattgttttccttgttaatctgctccaaccacctgaacatctaagtaaacatttatctggtttaaaaaaaaaa

SEQ ID NO: 65241 - DNA, 847 bp, Homo sapiens
  misc_feature (1)...(847): n = a,t,c or g
ttttttttttttcactgttgagaaaaatttattatcaatgtctcagagccaacgacgacacgaacctacatgaacacaactcttaatttaggacccaagggtgactgtaaacatgataggagcgctgggacattgtcactgaggcagacagcagccactagtccacaatggtttaaaaagtcagtcctgtgccccctcactggaagcttccattctgggccatctgcagatattccttgtagagcttctcctgagcctcgaagagcttcttcagcttcttggcttgccctttgctgagctctttgccctccatgtcatgtgtgggcagaccattttcatcaaacttggagtatttgtcggtttctgacaagaacatctcactggggggaatcttcatcttggccagctttgctgcttcttgttcctgtttcctccgggccgcctcctctttcttcttcctcttctcctcttcaacccgtctcttttcttctctctcttttaataaggtgtttctgtctaccagtttcaccactgtgggcagtccttcgtggtcttcaaaccgcaccccaagctcgggcaggatgttgtcccgcagggcatcgctgagctgcagaatctcagggactttttgctctcgggcaatcttccgcactccttctcggaattctgataacacctgaaggtagggcatgactgtggcctcgaaactgaggcatgttaccagcccatacgaaccggaaatngccagagagctgtcctcttctaccggccccaaagatctcacacatatggtgaggtacaaggcgatgttcttcaacaagagctgggtgggaccttttccttcacg

SEQ ID NO: 65242 - DNA, 648 bp, Homo sapiens
ttttttttttttatttctgctagtcacaaagcccaactttttattgaagtataacatacacacagaaaagtgcccagatcaaaagtgtacagctccaagaatgttcacaaacggaaagcacccaggtaaccgggcaaccagatcaagaaacagaacaccccaggaagcaccacctcatgcccccttctggttactgtcttcttagggactgatctctacttggcaaccgcatgggatggaattttggctgggttttaaactttatataaatggaatcctatggtgcatttttgccttatctcgttcaacactagggttggtgaatacactccaagttgggggtggagttgcagctcattcccattgcagtctgggattccatcgtgtgaatataccctaatgtgcttatccagccaacatgggcattggggtgctttcctgttcggggttattatggagagtgtttttgtgaagatttagagcatgtctctggatgaacacatgtacacatttctgtagggtatacacctaggggtggaattgttaggtcatatatatttacatccaactcaagctctttcatgaaagaagaaagaatgtactggatggagtttgctggctcaaagaattgacagaaaactagaaggg

SEQ ID NO: 65243 - DNA, 4205 bp, Homo sapiens
  misc_feature (1)...(4205): n = a,t,c or g
ggagaactccaccgggctatgcgaacagaatcctgcgaagaggatggcattccctgtggatatgctggaaaattgcagccatgaggaattggaaaattctgctgaagattacatgtcagatttaaggtgtggggaccctgaaaatccagagtgtttttctcttctcaatattacgattcctattagcctgtcaaatgtaggctttgtacctctttatggtggagatcagacccagaaaattcttgctctctttgcacctgaagattcactgacagctgtggcactttaccttgctgatcagtggtgggctattgatgatattgtgaaaacatctgttccttcaagagaggggcttaagcaggtgagcactcttggggagagagtggttctgtatgttctgaatcgaattatttatagaaaacaggaaatggagagaaatgagatcccattcctgtgtcatagcagtactgattatgctaagattctgtggaagaaaggagaggccattgggttttattcagttaagcctacaggaagcatatgtgcctcttttcttacccaaagttaccaattgccagttcttgatacaatgtttctaagaaagaaatacagaggtaaagattttgggcttcacatgctggaggactttgttgattcctttacagaagatgcgcttggcttgcggtatccactgtcttctctcatgtatacagcttgcaagcaatactttgagaagtatccaggagaccatgaactcctttgggaagttgaaggtgttggacactggtaccagcgaataccagtcaccagagcattacaaagagaagcacttaaaattctagcactttctcaaaatgaacctaaaagacctatgtctggagaatatggtcctgcatctgttccagaatacgaagcaagaactgaagacaatcagtctagtgagatgcagctaactattgattctctaaaagatgcctttgcaagcacttccgaaggtcatgataaaacatctgtttccactcatactcgaagtggtaatctaaagcggccaaagattggaaagcggtttcaggattctgaatttagcagttctcaaggtgaagatgaaaagacctcccagacttcacttacagcttcaataaacaaattggagtctactgcacgcccatcagagagctcagaagaattcctggaagaagaacctgaacagagagggattgaatttgaggatgaaagcagtgatagagatgcacggccagcactggaaacccagccacagcaagagaagcaagatggtgaaaaggaatctgaattagagcctatgaatggtgagataatggacgattctcttaagacctcacttataacagaagaggaagactccactagtgaagttttagatgaagaattaaaattgcagccttttaattccagtgaagactctacaaatcttgttccactggtggtagaatcttcaaaaccccctgaggtagatgcaccagataagaccccacgtatacctgactcagaaatgttgatggatgaaggcacatctgatgaaaaggggcacatggaagagaaattgtccctacttccaagaaagaaagcacatcttgggagttcagacaatgttgctactatgtcaaatgaagaacgatctgatggtggttttccaaactctgtgatagctgaattttccgaaggaaccggtctctgagaatttttctcctaatactacttccctccattggaagaccagggtgaggagggggtatctgagccccaggaaacatctactgcttcttcctccagagttcttttgatagaggttgaactttgnaagacgtgccaatttttcacagaatgcaggaccagaagaatcagtcagaggagcagtctgaagcatcttccgagcaactggatcagtttacacaatcggcagaaaaagctgtggatagcagctcagaggaaatagaagtggaagtgcctgtggtagacaggcggaatttaagaagaaaggccaaagggcataaaggacctgctaagaagaaagctaagctgacctgaaggaagaagaaagtggatgataaatcctcttctttgtaacatagttgttgtttttaaaatatggtaattaataaacagcatggggcacaggacaaaaatttccaaaatttcaatttgaacttacttactatgcagttttttgcttccctttagaacgtagaattcaccattgtttttaattttccaggctatttttggtaaatgcaattttttatttttattaaccatgtttcaattttgggaaaccagatcatattatattttctttatcaggtggtacatctgaccattatttcaaaaatataattaaaaagctgtggaaagtagtaggatttccattacttataaggatcacagaaatcttttatactaagggttttaatagtaaaacttggtgagggttctagaagttttaaatttcaaaactaatcaccaattttttaaaatgtaggcatgcctaaacaaaaataagtgtcaataaattagaaaaaatataacttcaagtaaatgagagcacaaaaacagaaacttacggtcaaaggttcatgaagatattttggttttggcctcttaatcctagatatagatgcagttttttcctttgacttcactatctatggaaaggtacacataaaatctgtttctgattcattctatcatctgatgttaacagtactgtcagggatttaactgtggcatgtggggactaattatttaaaatttcatttgaagtattagtttgctgtaattttttttgtctgcatatgtgcagacgcctagaagtttagactttcacctttaatcaggtaaaaatcacaactatactttggagacatggtttaatttggacttctggtcctgatcagatagataaattaaactggagattttacttttatcccaacccagttaacatctatatttcagaagtatgaggctccttcctaaggcatctccttaaatcttgccacctccctaattctacagtcttatttatattcccccacagctttcatctacttctgtaactcatggagtgattctccaatcaacagatcttcctgcctgccggcttatgcccttgatgtccatttttgggtaggtttggaggtgcaccccacaatgttagacctatatggcaggagtaaaactgcccccagtgttagacctatatggcaggggtaaactgcctttgggggagctgtggttacaagggcttcaatcatattggaggcttcaatcatcctttgatttgtactgagtactggttgcaagctggcctgttaagtatatattgtgttgccataacaaaggcctaggaaaatttgaagaaaaaaaacactgaactgttattttttgtaatttatttaaaaatggacaaaatggttattagaatccaaagataatctaaaaacagttctactctttggaaatattatgtgtactcaaatttgcacttaagttggagaatgttttgagaccatttaaattgttttaaaaatagcttgatcttgatccttatgcaaaagaaactaagactttgtgtcattatttgaggtagctaaggactgatgttgaaagtgtattcagtctatagtaagctgatgtcaggtcagtaaaattttgtttggggatgttggtattttcgatcaagttaaaatcttaaagcagacaaaaatatgtaaacgctcctatttgtgttagattttgaacaattgtattaccctatattttctttaattagtcaaaggtaagccagattatttcattctaaatgaaaattaaagcactttggccatttattttttcaacaaatgctaatactaagtaaaaaaaaaaaagtatgactactattagtcaatttaccaaacatttatgctgttttatacattttatgaaaaacttctgtcaatatcacaaagggaaatactctgttaagattcagtaaattcttaatctttacatgttccatttcttaaatttgaaaacacttgtaaatatttaatttttacttggatttgtttaaaatactttcttttcaaattattttaaacatggaaacgcttcatgaatttgggtcatccttgcacaggggccatgctaattttccctgaattggtctaattttagtatatggg

SEQ ID NO: 65244 - DNA, 9831 bp, Homo sapiens
tttttttttttttatttttatattttttatttttattttttcctttttagagagggggtctcgctatgttgcccagactgttttctctcctttaatttttttgcatcccccagttaatttcaatacccaccccccccccttaccctagctcggggagtgccacgggagagaccttgccatgttgcctgttaaccttggcatacagtaagcgctaacaagtgattacaaatatcaaaataaacacacacggcgccgccctctgagcccgcccccgctgacttgctccccaggtgtttcctgctgaatgagattgagaaggaggagaaggagaagctctggtactactctcagctgcagggcctgtccaagcgcctggacgagctgccgcacgtggagacgcagttctcgatgcagatggacctgatccggcagcagcttgagttcgaggcccagcacatccgctcgctgatggaggagcgcttcggcacctcggacgagatggtgcagcgggcacagatccgcgcctcgcgcctggagcagattgacaaggagctgctggaggcgcaggaccgagtgcagcagacggagccccaggccttgctggcggtgaagtcggtgccggtggacgaggaccccgagacagaggtccccacacaccctgaggatggcacccctcagccgggcaacagcaaggtggaggtggtcttctggctgttgtccatgttggcgacgcgcgaccaggaggatacagcgcgcacgctgctggccatgtccagctcgcccgagagctgcgtggccatgcgccgctcgggctgtctgcctctgctgctgcaaatcctccacggcaccgaggccgcggccgggggtcgcgccggggccccaggggcaccgggcgccaaggacgcacgcatgcgcgccaacgcggcgctgcacaacatcgtcttctcgcagccggaccagggcctggcgcgcaaggagatgcgcgtcctgcacgtgctggagcagatccgggcctactgcgagacctgctgggactggctgcaggcccgagacggcgggcccgagggaggtggcgccggcagcgccccgatccccatcgagccgcagatctgccaggccacctgtgctgttatgaagctgtcctttgatgaggagtaccgccgtgccatgaacgagctaggtgggctgcaggccgtggcagagctgctgcaggttgactatgagatgcacaagatgacccgggacccgctgaacctggcgctgcgccgctacgcgggcatgaccctcaccaacctcacctttggggacgttgccaacaaggccaccctgtgtgcgcgccgcggctgcatggaggccatcgtggcccagctggcctccgacagtgaggagctccaccaggtggtgtccagcatccttcggaacttgtcctggagggccgacatcaacagcaagaaggtgctgagggaggcgggcagcgtgactgccctggtgcagtgtgtcctgcgggccaccaaggagtccaccctgaagagcgtgctgagcgccctgtggaatctgtctgcacacagcacagagaacaaggcggccatctgccaggtggatggcgccctgggcttcctggtgagcaccctgacctacaagtgtcagagcaactcgctggccatcatcgagagcggcggcggcatcctccgcaatgtgtccagcctcgtcgccacccgtgaggactacaggcaggtgctccgggatcacaactgttctgcagacgctgctgcagcatctgacttcgcacagcctgaccatcgtgagcaacgcgtgcggcacgctctggaacctgtcggcccgcagcgcccgtgaccaggagctgctgtgggacctgggcgccgtgggcatgctgcgtaatctggtgcactccaagcacaagatgatcgccatgggcagcgccgccgccctgcgcaacctgctggcccatcggcccgccaagcaccaggcggccgccaccgccgtgtccccaggcagctgcgtgcccagcctgtacgtgcgcaagcagcgggcgctggaggccgagctggacgcacggcacctcgcgcaggcgctggagcacctggagaagcagggcccgccggcagccgaggccgccactaagaagccgctgccgcccctgcgacacctggacggcctggcccaagactatgcttccgattcgggctgctttgacgacgacgatgcaccgtcatccctggctgcggccgcggccaccggggagccagccagccctgccgcgctgtccctcttcctgggcagccccttcctgcaggggcaggcgctggctcgcaccccgcccacccgccgaggcggcaaggaggcagagaaggacaccagtggggaggcagccgtggcggccaaggccaaggccaagctggcgcttgcagtggcgcgcatcgaccagctggtggaggacatctccgccctgcacacctcgtccgacgatagcttcagcctcagctctggagacccgggacaggaggcgccacgggagggccgcgcccagtcctgctcgccatgccgcggcccggagggcgggcggcgagaggcaggaagccgggcgcacccgctgctgcggctcaaggcggcccacgccagcctctccaacgacagcctcaacagcggcagtgccagcgacgggtactgcccacgcgaacatatgctgccctgcccgctggccgcactggcttcgcgccgcgaggaccccaggtgtgggcagcctcggcccagccggcttgaccttgacctgcccggctgccaggccgagcccccggcccgcgaggccacctccgccgacgcccgcgtgcgcaccatcaagctgtcgcctacctatcagcacgtgccactgcttgagggtgcctcaagggcgggtgcagagcccctcgcggggcctggaatctctccaggggcccggaagcaggcctggctgccggcagaccacctgagcaaggttcccgagaagctggcggctgccccgctgtctgtggccagcaaggcactgcagaaactggcggcgcaagaggggccactctcgctgtcccgatgcagctccctttcctcgctgtcctcggccggccgcccaggccccagcgagggtggtgacctggatgacagtgactcctccctggaggggctggaggaggccggccccagcgaggctgagctggacagcacgtggcgggcgcccggggccacctcgctgcccgtagccattccggctccccggcgtaaccgaggccggggcctgggggtggaagacgccacgccgtccagctcgtcggagaactacgtgcaggagacaccgcttgtgctgagccgctgcagctctgtgagctcgctgggcagcttcgagagcccgtccatcgccagctccatccccagtgaaccttgcagcgggcagggcagcggcaccatcagccctagcgagctgcccgacagccccggacagaccatgcctcccagccggagcaagacgccaccgctggcgcccgcgccacagggtccccccgaggccacccagttcagcctgcagtgggagagctacgtgaagcgcttcctggacatcgccgactgccgggagcgctgccggctgccatctgagctggacgcaggcagcgtgcgctttaccgtggagaagccagacgagaacttctcgtgcgcctccagcctcagcgcgctggccttgcacgagcactacgtgcagcaggacgtggagctgcggctgctgccctcggcctgccccgagcgcggcgggggcgccgggggcgccggcctccattttgcagggcaccggcggcgggaggaggggccggcgcccacgggttctcgccctcgcggcgccgcggaccaggagctggaactgctgcgggagtgcctgggagccgccgtgcctgcccggctgcgcaaggtggcctccgcgctggtgccaggtcgccgcgcactccccgtgcccgtctacatgttggtgcccgccccggccccggcccaggaggacgactcctgcactgactccgcggagggcacgccggtcaacttctctagcgccgcctcgctcagcgacgagacgctgcagggaccccccagggaccagcccgggggaccagcgggcaggcaaagacccaccggccgccccacctctgccagacaggccatggggcaccggcacaaggcgggaggcgccggccgcagcgcggagcagtctcggggcgcgggcaagaaccgagcagggctggagctgcccctgggccggcccccgagcgcccccgcagacaaggacggctcaaagcccggccggacccgcggggacggggcgctccagtcgctgtgcctcacgacgcccactgaggaggccgtgtactgcttctacggcaacgactcggacgaggagcccccggcggccgcgcccacgccaacccaccggcgcacatcggccatccctcgcgcttttacgcgggagcgtccgcagggccggaaggaggcccctgccccgtccaaggctgcaccagctgccccgccgcccgcccggacccagcccagcctcattgctgacgagaccccgccctgctactccctgagctcctccgccagctccctcagcgagcccgagccctcggagccgccggccgtccatccacgaggccgggagcccgcggtcaccaaggacccgggcccaggaggcggacgcgacagctcgcccagcccgcgggccgcggaggagcttctgcagcggtgcatcagctcggccctgcccaggcgccggccccccgtgtctggcctgcggcgccgcaagccccgagccacccggctggatgagcggcccgcagaggggtcccgggaacgcggcgaggaggcagcgggctcggaccgggcctccgacctggatagcgtggagtggcgcgccatccaggagggcgccaattcaattgtcacgtggctgcaccaggcagcagctgccacgcgggaggcctcgtccgagtccgactccatcctgtccttcgtatccgggctgtcagtgggatccaccctacagccccccaagcacaggaagggacgacaggcggagggagaaatgggcagtgcccggcggccagagaaaaggggcgcagcctcagtcaagaccagcgggagcccccgttcccctgcaggccccgagaagccacgtggcacacagaagaccacgcccggggtgccagctgtgctccggggacgaacagtgatctacgtccccagcccggcaccccgtgcccagcccaaagggacccccggcccccgcgccacaccgcggaaggtggcgcccccttgcctggcacagcccgcggctccagccaaagtcccgagccccgggcagcagcggtcgcggagcctacaccggcctgccaagacctcggagctggcgacgctgagccagccccccagaagcgccacaccgcccgcccgcctcgccaagaccccctcctccagctcctcccagacctcgcccgcctcccagcccctgcccagaaagcgccccccggtcacccaggctgctggggccctgcccggccccggagcctccccggtgcccaaaacgccggcgcgcacccttctggcgaagcagcacaagacgcagagatcgcccgtgcggatcccgttcatgcagaggccggcccggcgtgggccgccaccgctggctcgggcagtcccggagccgggccccaggggccgggcggggaccgaggcgggcccgggggcgcgcgggggccgcctgggcctggtgcgtgtggcctcagccctctccagcggcagcgagtcctccgaccgctcgggcttccggcgacagctaaccttcatcaaggagtcgccgggcttgcggcgccgccgctccgagctgtcctcggccgagtccgcggcctctgccccccagggcgcctcgccccgccgcggccggcccgcgctgcccgccgtcttcctctgctcctcgcgctgcgaagagctccgagcggcaccccggcagggcccggccccggcccggcagcggccccccgcggcccgacccagccctggcgagcgccctgcccggcgcaccacctccgagagcccgtcccgcctgcctgtgcgcgcgcccgccgcccggccggagactgtcaagcgctacgcgtcgctgccgcacatcagcgtggcccgcaggcccgacggcgccgtccccgcggcccctgcctcagccgacgccgcgcgccgcagcagcgacggggagccccggccgctccccagggtggccgcgccgggcacgacctggcggcgcatccgagatgaggacgtgccccacatcctgcgcagcacgcttcccgccacggccctgccactgcggggctccacgcccgaggacgccccggccgggcccccgccgcgcaagaccagcgacgccgtggtccagaccgaggaggtcgccgcccccaagaccaactccagcacgtccccgagcctggagaccagggagccccccggggcccccgccggcggccagctctccctcctcggcagcgacgtggacggtcccagcctcgccaaggctcccatctccgcacccttcgtgcacgagggcctgggggtcgccgtggggggcttccccgccagccggcacggctcccccagccgctcggcccgagtaccccccttcaactatgtgcccagccccatggtggtcgcagccaccaccgactcggccgcggagaaagccccggccactgcctccgccaccctcctggaatagtggcctaggccggccttctggaacgttctctcccggccctgcggcgcggtctggctgccccatgggcctgcgctgtagacgtcccccataggtcgccccagggcctctgcccacccgagccccaccactctcagaacccccgcccagcgcacggcgacctcgcgcctcaccggaagaccttgcctctgtgccgcggaggtccaggaggaaacggggcggccgctaggcctcaagtcccgaccgtggagcgctggcaagggcgtcctggcccagccctgagcgcgcggcccttcccctgtcggaagccgttgcttgaccccgggcgagggaggcggtagcctccgggtccgggtctgggtctgggtccgctgcttcgcagggacagcgctggggaggtgacggcgcccgccgcaggtggggcgaggctgggggagggcggcgccgcggcgggcctgccagctgggggcctttgcggcgcgcaggggcgaagcctgtaatcactgcagccgccggtaattcgctaatgagggctttgcagggattgttttcattctcagccccagctgtgggagtgcgggtgggggtgtggccgagccccggcaggaagccccgcccagacggtgttcagggaacccggagcccaagcgctccggcggagcccaaaagggtgggggtgggaggggcagaggccaacggatccccctgcctgtcgcaccccttggcgggagacgggaaggcagcgggctgcgtacgatgggaccctggtgcagacgccgggccggctgacatttggaccccatcccagaggagatgctggctaccagctggggcgaccccaagggtcgctggagtcagtatcggcccggcgcagccgcggcgggcgaggccaatggaaaggagactgaggggagtcccggcagtgagcccgaggccctgggacctggagcccgcgctggcctctccccagcggagcctgcacgttacggagaccatcacatgtgggcgtggtcagtgcccaggaccgcaccgctgctcatcttgtcccttttcaattcccttctggttcatgatgcataaagcgctaggccctagaactccagaaacagcacagctggggcggggacccagccttgccctccacccgaggctctgggacaaggcgggaggttcgggggccttccggcaggtgaacgcagggctggagagtatttggtgccagatgaggtgaaagcttatagaagggcctgaggggctcggctgcctcatcccctggcgggggaggctgggagctgggcctcctgcgtggggtgggactcgcaggggccgggtctccgtgactggggcaacgcctcgtcctgcagagggagccgacgacctcttttctgcagaaaagctccagcaggcgctgccttcacccacggatctgcccaggctgaaggcacacgctcaatgccccacgtgccttctccaggaggaacgaagcagggtttgagggttgggtggatggagctcagaaggaaaccccagccccaccacggatgacaccatccctcccgtcccatccccagcatgggcaaggccagcctttctggcagaaggagctgtcctcaactcagggccgctgtgagcaaagctgaccccagcccccacccccagttaacactgctgcttctctgaatgcatgtcacgctgcaccccatgctccgggcccacaccctgcaggacaaggagctccagacaggacgtccataagtcaccgaggtgtgccacccagcaggtgctggaggtgcccaatgctccctcctaggacctcgcagccaggcaaggctgtcaggttgttttgggggaagagggggtcatggatggctgagcagagagcggggaaaatgcaggctgagtggggcgacctcctgcctgccaggagccccctttcaggacacagcgggggtctcacacttgctgtccccatccatggcccgagggggaacctggtggtctcttctgagcttttggacttggggatgccaaacacgtgctcaccctcacactcgccccggcccgctgcgcccctaattgccaaagggtagggaaatggcgaagccagccaccaggtcgctggtgacagggccagggttatgcaggaaggtggtgcggcattgccttccacatatgtaagtctctgggcggcgccctcccagctccctgcctctgtttccccatgtgggccgtggggaactcccagagctacctcttgggggagcgtggtggcagcgatgatggggagacgcctggaagctcacagaacttgggtctggctggctcctgcccgtgacgccttgcccagcagcaaggtgcgcaacatggctgccagccccgcctcccacccccaccccgagtcctgagctcactttcgccttctccatcccctgccgtgggggccacagccacacctcaccgcccagtccagctgtctccagaaggggacaggcagtccgcggtctctggacaatcaactcaaggtacgcccactgcaaggcctccctcccaccgcggcccctgcctggccacctggcctctctgcaccagggtgacaaggggtcctcgtctgccccccaatgctccagggccagtcctaaggagctgagggtctgaggacgcagggagggtggaggtgtcctgaggctgatggacagtgaccgccactggcccccaacatgaccacacgtgggtgctgaactcggggcgccgtgcccaccggcatggtcctcccgagctccgacagcattacctcacccggccccatctgttgccccggtccagccctgatggcgcgcgcctggtctgtctgattcccctagccgccaccccacgtttctgtaccgggtctctgcagtgttaaacggacgtgtaaatagtggtaaatagtgaaagcctgtccttccctaaatgtaaagccatctgtccggcgtaaggacgacaccgtcagctgtccgactcgcacacatttaataaactgagctcttgcattgccaaaaaaaaaa

SEQ ID NO: 65245 - DNA, 2056 bp, Homo sapiens
aattatgttagatggccgggtgcggtggctcacgcctgtaatctcagcactttgggaggccgagatggaagacgtcatagcacggatgcaagatgaaaaaaatggaattcctattcgtacggtcaaaagctttctttccaagatacctagcgtcttctctggttcagacattgttcaatggttgataaagaacttaactatagaagatccagtggaggcgctccatttgggaacattaatggctgcccacggctacttctttccaatctcagatcatgtcctcacactcaaggatgatggcaccttttaccggtttcaaaccccctatttttggccatcaaattgttgggagccggaaaacacagattatgccgtttacctctgcaagagaacaatgcaaaacaaggcacgactggagctcgcagactatgaggctgagagcctggccaggctgcagagagcatttgcccggaagtgggagttcattttcatgcaagcagaagcacaagcaaaagtggacaagaagagagacaagattgaaaggaagatccttgacagccaagagagagcgttctgggacgtgcacaggcccgtgcctggatgtgtaaatacaactgaagtggacattaagaagtcatccagaatgagaaacccccacaaaacacggaagtctgtctatggtttacaaaatgatattagaagtcacagtcctacccacacacccacaccagaaactaaacctccaacagaagatgagttacaacaacagataaaatattggcaaatacagttagatagacatcggttaaaaatgtcaaaagtcgctgacagtctactaagttacacggaacagtatttagaatacgacccgtttcttttgccacctgacccttctaacccatggctgtccgatgacaccactttctgggaacttgaggcaagcaaagaaccgagccagcagagggtaaaacgatggggttttggcatggacgaggcattgaaagacccagttgggagagaacagttccttaaatttctagagtcagaattcagctcggaaaatttaagattctggctggcagtggaggacctgaaaaagaggcctattaaagaagtaccctcaagagttcaggaaatatggcaagagtttctggctcccggagcccccagtgctattaacttggattccaagagttatgacaaaaccacacagaacgtgaaggaacctggacgatacacatttgaagatgctcaggagcacatttacaaactgatgaaaagtgattcatacccacgttttataagatccagtgcctatcaggagcttctacaggcaaagaaaagaggggaaatctctcacgtccaagaggttaacaagccttgctcagtcttactaaacggatcatcttgtagcatgaatgcagactggagtcactgcacacactttgtagctcaatgttgtgacctggagcagaggacattagaacaagatgttgcatgagcaaaggacctaaattgttatttttgtgtgtacattccatctccaatggactcttccgtctcaatgcctccattccaaactgttgtctgctttctttctccttctactatgctggatctgtgtctcttcctttttaacaagttcaagtgaagtaaaaccttttctttttttccttctttctctctctctctctctcaaagcttcagttagacacacagttcactgaaaattcagtcagtcaaaaactggaagaactgtaaaagaaaaaagtatatatcaataagtatacatgtggcttcacatttattaaacaataaattccgcacagaaagtttcatttcaccaatgtgtcacagtcagaaacaaactcatgtcttcggtctgttgtctgtacattctccgttaatgtttctcgcatttatttttataccatatttaaagaagaaacaccttttactccaaatgtattaaagttgatcccttctctgtaaatttgtgtatgtttatattgttgttttatctttcattaaaagatgtcagaatctcaaaaaaaaa

SEQ ID NO: 65246 - DNA, 1194 bp, Homo sapiens
tattcggcacgagccgagctttacacagccctctgtatttattagacaaaagagcgagaaaagcggggggtgattgttgggtaattgtcagttggccatttggttcacaccaggcttgtgagactgcatcctttggacaataggcactaattttctcagtagataacttcaaggagcccagtgccagggagtgatgtccctcagcaaaccttttggtggcagggcagtgagtttgctcacatcctgcattcatgataaacagtttgctgtttgatcatatagcctccagcagaatgctgagttggtcacgtcccacaggcctttggctccctgcatatccccctttctgtttatgtattaattgaaagaatgtaaggctgggctgggaggctctcattctccaattggtggtccatccgattttacagacttatatctgctgccggcagactcttcccagggtcccctttcgccttgtcaatttcagttcctctgctccagcagaccttcttcattcacgtccttgaagtcccatgtttggatgctgctagttgggcgtgcttggagtccctgttctggttgccatttgtaacctgcacggacctaggtggactaaacaaaggggggtgaacacgggaataaagatgagacaaaagagtgtatttggaagaagggatcgggggcgctttgcctctaggggacaagggccctgagctttacacagccctccgtatttattaggcaaaagagataggagggtgggggggggtggaagaaggggtcggctgctcagttcagagtaggcttgcaagactgcattctctagatgtcgcagtagataacctcggtgccagggagtgattgcctccagcaaaccttatgttggcaggagcagtcctgagtttgctcacatcacgaaaacatgataaacagtttgctgtttgatcatatagcctccagcagaatgctgagtttggtcacgtcccaccaggcctttggctccctgcatatccccctttctgtttatgtattaattgaaagaatgtaaggctgggctgggaggctctcattctccaattggtggtccatccgattttacagacttatatctgctgccggcagactcttcccagggtcccctttcgccttgtcaatttcagttcctctgctccagcagaccttcttcattcacgt

SEQ ID NO: 65247 - DNA, 2535 bp, Homo sapiens
aagaagacaaaaaaggaagctggaaataagaaatccacaccagttagcattctttttggttatccactctctgagcgaaaacagatggcacttcttatgcagatgacagcaagagacaacagtccagattccacaccaaatcatccatcacaaacaacgcctgcccaaaagaaaactcccagttcttcatctcgacagaaagataaagttaataaaagaaatgaacgtggtgaaactcctttacacatggctgctattcgaggagatgtgaaacaagttaaagaattaataagtttaggggcaaatgtgaatgtgaaagattttgcaggttggacaccactgcatgaagcttgcaatgttggatattacgatgttgctaagatacttatagcagctggagcagatgttaacacacaaggattagatgatgacactccactccatgattctgctagtagtgggcacagagatatagtaaagctgttacttcgtcacggtggaaatccatttcaagctaataaacatggggagcgtccagtggatgtagcagaaacagaggagttggagttgctactaaaaagagaggtgcctttatctgatgatgatgaaagttacacagattccgaagaggctcaatctgtaaatccttctagtgttgatgaaaatattgactctgaaacagagaaagactctctcatctgtgaaagtaaacagatacttcccagtaaaacacctcttccatctgcccttgatgagtatgagttcaaagatgatgatgatgaagaaattaataagatgattgatgataggcatattcttaggaaagaacaacgaaaagaaaatgaacctgaagcagaaaaaactcatttatttgcaaaacaggagaaagccttctatcctaaatcatttaaaagtaaaaaacaaaagccatctagggtcttatattcaagtactgaaagttctgatgaagaagctcttcagaataaaaagatttctacttcatgttccgtcatccctgaaacatcaaattctgatatgcaaaccaaaaaggaatatgtagtttcaggtgaacacaaacagaaaggcaaagttaaaagaaaattgaaaaatcagaataaaaataaagagaaccaagagctaaagcaagaaaaggaaggaaaagaaaatacaagaataacaaacttgacagtaaatactggactagattgttcagaaaagaccagagaggaggggaactttaggaaatcttttagcccaaaagatgatacttcattacatttatttcatatttccactggtaaatctcccaaacattcttgtggattaagtgaaaaacagtcaacaccactaaaacaagaacatactaaaacatgtttatcaccaggaagttctgaaatgtcattacagcctgatcttgttcggtatgataatacagaatctgaattcttgccagaaagttcaagtgtaaaatcttgtaagcataaggaaaaaagcaaacatcagaaagatttccacttagaatttggtgaaaaatcaaatgccaaaataaaggatgaagatcatagtccaacatttgaaaattcagattgcacactgaaaaaaatggataaagaaggtaaaacattaaaaaaacataaattgaagcataaagagagggaaaaagaaaagcataaaaaagaaattgaaggtgaaaaggaaaaatacaaaactaaggatagtgccaaagaactgcagaggagtgtggaatttgatagagaattttggaaagagaatttttttaaaagtgatgaaactgaagatctctttttaaatatggaacatgaatccttaacattagaaaaaaaatcaaaattggaaaaaaacatcaaagatgataaatcaaccaaggaaaagcatgtgtcaaaagagaggaactttaaagaggaacgagacaagattaaaaaggaaagcgagaaatcttttagggaggaaaaaataaaagatctaaaagaagagagagaaaacatacccacagataaagactcagaatttacttctttgggtatgagtgccattgaggaatctatagggcttcatttagtggaaaaggaaatagacattgaaaaacaagaaaagcatataaaggaaagtaaagaaaaacctgagaagcgatctcaaattaaagaaaaggacattgagaagatggaaagaaaaacctttgaaaaagaaaagaagataaaacatgagcataagtcagaaaaagacaaattagatcttagtgaatgtgttgataaaaaaaaaaaaaaggacaagctatattcgcatcacacagaaaaatgccataaagaaggtgagaagagcaaaaatactgctgctattaaaaaaactgacgacagaagggaaaagtagagaaaagatggataggaaacatgacaaagaaaagcctgaaaaagagaggcatctagcagaaagcaaagaaaagcacttgatggagaaaaaaaaataaacaatcagataatagtgaatacagtaaatcagaaaaaggcaaaaaaaaaa

SEQ ID NO: 65248 - DNA, 7399 bp, Homo sapiens
aagcggcctgtatagatacaggagcaggaactctaggacagccctgagtgaagaggaggaggaagaacgggagttcagaaaacagttccccctgcatgaaaaggactttgcagatattttggtgcagccaacgttggaggagaacaaaggaacttcagatgggcaagaagaggaagcaggcacaaacccagctctcctctcccagaattcaatgcaggcagtaatgctgatacaccagcaattgtgtctcaactttgctcgatccctctggtatcaacagactctgccgccacatgaagcaaagcattacctcagcctgtttctgtcttgctatcagactggggcatcgcttgtgacacacttctaccccctgatgggagttgaactgaatgaccgactcttgggcagccaacttttggcctgtaccctctcccataacactctttttggggaggcaccctcagacctgatggtgaaacctgatgggccctatgacttctaccagcatcccaatgttccagaagcacggcagtgtcaacctgtgcttcaaggtttctcagaggctgtcagtcacttgctacaggactggccagaacacccagcgcttgaacagctcctggttgtaatggacagaattcgtagtttcccactttccagtcccatctcaaagttcctgaatggcttagagatccttctggcaaaggcacaggattgggaggaaaatgcaagtcgagctttgtctttgcggaaacatcttgatttgatcagtcagatgatcattcggtggcgtaaactggagctgaactgctggtccatgagtttggataatactatgaagcgccacaccgagaaatccaccaagcactggttctccatctatcagatgcttgagaagcacatgcaggaacaaacagaagaacaggaagatgacaaacagatgaccttgatgttgctggtcagcacattacaagcatttattgaaggatcctcgctgggagagttccatgtgcgacttcagatgttactggttttccattgtcatgtcttgctgatgccacaggttgaaggaaaggattcactttgcagtgttctatggaatttgtaccattattacaagcaattctttgaccgggtccaggccaaaattgtggaacttcgttcccccctagaaaaagaacttaaagaatttgttaagatttccaagtggaatgatgtcagcttctggtccattaagcaatctgtagaaaagacacacaggacactctttaaattcatgaagaaatttgaagcagtcctgagtgaaccctgccggtcatccctggtggagagtgacaaggaagaacagcctgactttttgcccaggccaacagatggagctgcaagtgaactgtcttccattcagaatctgaacagggcactgagggagaccctgttagcccaaccagcagctgggcaggccacaattccagagtggtgtcagggcgctgctccttccggcttggaaggggagcttctgcgtcgcttgccaaagctcaggaaacgcatgaggaagatgtgcctgacgttcatgaaggagagccccctgcctcgccttgtggagggccttgatcagttcacaggtgaagtgatttcctctgtgagtgagctgcagagcttaaaggtggaaccctctgcagagaaggagaagcagcggtcagaagccaagcacattctcatgcaaaaacagcgagctttgtcagacctctttaaacaccttgcaaaaattggtttgtcgtatcgcaaaggtcttgcttgggcccgttcaaaaaaccctcaagagatgcttcatcttcacccattagatctccagagcgcattgtccatcgtcagcagcactcaggaggctgattctaggctgcttacagaaatctcgtcttcatgggatggatgccagaagtatttttatcgctctcttgcacggcatgccaggcttaacgcagcactagcaactcctgccaaggaaatgggcatgggcaacgtggagaggtgcagagggttctcagcacatttgatgaagatgctcgtccgacagcggcgctccctgaccacgctcagtgagcagtggatcatcctcaggaacctcctcagctgtgtgcaagagattcacagcaggctgatggggccccaggcctaccccgtggccttcccccctcaggatggcgtgcagcagtggacagagcgcctgcagcacctggccatgcagtgccagatcctgcttgagcagctctcctggctcctccagtgctgccccagtgtagggccagctccaggccatggcaatgtccaggtactggggcagcctcctggcccctgcctggaaggaccagaacttagcaagggacaactttgtggagtagtgctggacctaattccttccaatctgagctacccatctccaatacctggaagtcagctgccctctggttgccggatgcggaaacaggatcacctttggcaacagtcaactacgagattaacagagatgctaaaaaccattaaaacagtgaaagctgacgtcgacaaaattagacagcagtcttgtgagactctctttcattcttggaaagattttgaagtttgctcttctgcgctgagttgcttgtcccaggtgtcagttcatttgcagggcctagagtccttgttcattcttccagggatggaggttgagcaaagagactcacaaatggcactagttgaaagtctggaatatgtaagaggagaaattagtaaagccatggctgactttactacctggaagacccatctgcttacttcagatagccaaggaggaaatcaaatgttggacgaaggatttgtggaagatttttcagagcaaatggaaattgccatccgagccatcctctgtgccatccagaacttagaagaaagaaagaatgaaaaagcagaggagaacactgaccaagcaagcccacaagaagattatgcaggctttgagagactgcaatcaggacatctaacaaaactcttagaggatgacttctgggccgatgtgagcactttgcacgtgcagaaaataatttctgccatctccgagctgttggagaggctgaaatcgtacggtgaggatggcacagcagcaaagcacctgttcttcagccaatcctgttccttgctggtgcgcctggtgccggtcctctccagctactcagacctcgtcctcttcttcctgaccatgtctttagcaactcaccgtagtactgcaaagctgctctctgtgcttgcccaggtctttacagagcttgcccagaagggattttgcttgcccaaagaatttatggaagattcagctggagagggagcaactgagttccatgactatgagggaggtggaattggagaaggcgagggcatgaaggatgtgagtgaccagatcggaaatgaagaacaggtggaagatacatttcagaagggtcaagaaaaagacaaagaggatcctgattcaaaatctgatattaagggcgaggataatgccattgagatgtcggaagattttgatgggaaaatgcatgatggggagcttgaagaacaagaagaggatgatgagaaatcagatagtgagggcggagacctggataaacacatgggcgatctcaatggtgaggaagctgacaaactagatgagaggctttggggtgatgatgatgaggaggaagatgaggaggaagaagacaataaaactgaagaaacaggaccaggaatggatgaggaagattctgaacttgttgctaaagatgacaacttggatagtggcaattcaaacaaagataaaagccagcaagataagaaggaagaaaaggaagaagcagaagctgatgatggtggacaaggtgaagacaaaattaatgaacaaatagatgagagggactatgatgaaaatgaggtggacccttaccatggcaatcaggaaaaggtgccagaacccgaggctttggaccttccagatgacttgaaccttgacagtgaagacaagaatggtggtgaggacaccgacaatgaagaaggagaagaagagaatcctttggagataaaagaaaaaccagaagaagcaggtcatgaagctgaggaaagaggagagaccgagaccgaccagaacgaaagtcagagtccacaggagcctgaggaaggccccagtgaagatgacaaggcagaaggggaagaggaaatggacacaggagctgatgaccaagatggagatgctgctcagcatcctgaagaacactctgaggagcagcagcagtctgtggaggaaaaagacaaggaagccgatgaagaaggtggagagaatggccctgctgaccaaggtttccagccccaggaggaagaagaacgggaggactctgatacagaggagcaggtgccagaggctttggagaggaaggagcatgcctcctgtgggcagactggtgtggagaacatgcagaacacacaggccatggagctggctggggccgcacctgagaaggagcaggggaaagaggaacacggaagtggagctgcagatgcaaaccaggcagaaggccatgaatcgaatttcattgcccagttggcctcccagaagcacaccaggaaaaacacacagagttttaagaggaaacctgggcaggctgacaatgaacgttccatgggtgatcacaatgagcgtgtgcacaagaggctgaggactgtggatacggacagccatgccgagcaggggccagctcagcagccccaggcccaggtggaggatgcagatgcattcgagcacattaaacaaggcagtgacgcatacgatgcacagacctatgatgtggccagcaaagaacagcaacagtctgcaaaagactctggcaaagatcaggaagaggaggagatagaggacacccttatggacacagaggagcaggaggagttcaaagcagcagacgtggagcagctgaagccagaggaaatcaagtcgggcaccacagcacccttgggctttgatgagatggaagtggagatccaaactgttaaaacagaggaagaccaagaccccagaacagacaaagcccataaggagacagaaaatgagaaaccagaaagaagccgagagtctaccattcatacagctcatcaattcctcatggacacgatcttccagccctttttaaaagatgtcaatgagctaagacaggagctggagagacagctggaaatgtggcagccacgtgaatctggaaacccagaggaggagaaggttgcagctgagatgtggcagagttacctgatcttaacagcgcctctttcacaacggttatgtgaagagcttcgtctcatattagagcctacccaggcagccaagctgaaaggagactatcgaactgggaaacgactaaacatacggaaagtcattccatacattgctagtcaatttcggaaagacaagatttggcttcgaaggaccaagcccagtaaacgccagtatcagatttgtttggctatcgatgactcttctagtatggtagacaatcataccaagcaggtttgcatttgaatctttggctgtgattggaaatgctctaaccctcctggaagtgggtcagattgcagtgtgtagttttggagaatctgtaaagctgttacacccatttcatgagcagttcagtgattactctgggtcccagattctacgtctctgcaaattccaacaaaagaaaaccaagattgctcagtttctagagtctgttgccaacatgtttgcagctgctcagcagctctcgcagaacatcagttcagaaactgcacaactcctcctggtagtctctgatgggcgaggccttttccttgagggcaaagaaagagtcctgggcagcagttcaggctgcccggaatgcaaatatctttgtcatctttgttgtattggacaatcccagttcacgggattctatcttggacattaaagtaccgatatttaaaggacctgggagagatgcctgaaatccgatcctacatgggaagagttcccattcccattactatatcattcttcgaggatgtaaacgcacttcctgagacactcagcgatgccctcagacagtggtttgagttggtgacagcctctgaccacccatagaacagaaagaagagtccaaagtgagacttaactgtggtcagaaggtcacattgcttacccaggtgctcccttttggacaactacaaaaaattttattgtaatatttttattttacaacgtgatcttacagcctacagaatgctctctggctcccggctttgcctgggctgaggtttttataccaaacctggaagcagcagcaggtgcctgaactcgtaactagagaagagttatccttcttccctgccttggaagccctggcctgggaggaggtcataccccaccgttggagcccagctgcctgttttcttttgcaggggatctgggcacctgtgccttgaggagatgctgccaggagcatgggactctgacagtcctttgtataaaggactaaagggagctgcccttttgaccctgttctaagctctgccttgccaagcccatagtgtgtgcccaaaagctgtcaagtggccaagacagctcgtttctggagagtatgagggtgtgttttcttattgtgaaaggaactaccttctcttagagggtaggaagaatgtgggtgtgtgtgtgttctcataaagcaactggacattataggtgcccaggtcatctataaaaacgatccttgggctgtgtaaaaatgaagtggcttttcagtatcctctttcacacttgctgcttcgggagactatgcaatgatgggaaggtgattgcccctttatttcattcagtgccatggtccctgttgttgtagtaatttatttgtttagttcatttttttttttcttaacagtcaaggggaagagtgattcctcacactgctttcaagctggactgagccagtctcattctgggaaagaaacgctgtgtccagaactcagcagctccatctattttttccagtcgaaaaaaactgatctatctttaggcagtttttacttggccagaaagcagtgctgaatacttgaaactgggggctctgttcctacttaatgttctgtccagaatgttccttttgtaggcagtatgtccatgatgtaatcatcctatctccttgtctgtttcccaagttacactgtgaagtctgcgacccttttgaggtggtcatcaaagacacagattccttgtttaaccaagtgtcccaaagcatgtacctgaagttatatcattttttattctaaaaagctatgcagcttatattctgaaaactattaaaacatataccactgttgttgatgtaaaaaaaaa

SEQ ID NO: 65249 - DNA, 1380 bp, Homo sapiens
tatatcaacattgatatagatccagggtacttaaaaacagccttaggcctttatagaagctgcctgctcaccgaaaataagatccgctccctaatatacaatgccttgaatcccatgcataaagagatttcccagaggtccacagccacaatgtatataattggaggctattactggcatcctttatcagaggttcacatatgggatcctttgacaaatgtttggattcagggagcagaaataccagattataccagggagagctatggtgttacatgtttaggacccaacatttatgtaactgggggctacaggacggataacatagaagctcttgacacagtgtggatctataacagtgaaagtgatgaatggacagaaggtttgccaatgctcaatgccaggtattaccactgtgcagtcaccttgggtggctgtgtctatgctttaggtggttacagaaaaggggctccagcagaagaggctgagttctatgatcctttaaaagagaagtggattcctattgcaaacatgattaaaggtgtgggaaatgctactgcctgtgtcttacatgatgttatctacgtcattggtggccactgtggctacagaggaagctgcacctatgacaaagttcagagctacaattccgatatcatcgaatggagcctcatcaccttcagtccacatccagaatatggattgtgctcagttccgtttgaaaataagctctatctagtcggtggacaaactacaatcacagaatgctatgaccctgaacaaaatgaatggagagagatagctcccatgatggaaaggaggatggagtgcggtgccgtcatcatgaatggatgtatttatgtcactggaggatactcctactcaaagggaacgtatcttcagagcattgagaaatatgatccagatcttaataagtgggaaatagtgggtaatcttcccagtgccatgcggtctcatgggtgtgtttgtgtgtataatgtctaattgaatctgcagaaatgaccaagcaatcacttttttggagtatagttttataaaaaaagaatgcagggtttgaagttccttacctgataattgtgtctggcacatgataggggatcagtaaattgtaattcctaaccctactgtactcccaaacatggtgattcatggtcaagaaaaatcttatatatatatatgtacacacatatatatgtgttcatatatatgtatacatatatgtgtatatatacgcatgtatgtatacatatatgtgtatatatgcgcatgtatgtatgcatatgtgtgtatatatgcgtatgtatgtatacatgtgtgtatatatacgtatgtatgtatgcatatgtgtgtgtatatacc

SEQ ID NO: 65250 - DNA, 3479 bp, Homo sapiens
  misc_feature (1)...(3479): n = a,t,c or g
cccaactgtgtcaaccgagatctgatagacaaggcagcaatggatttttgcatgaacatgaacacaaaagcaaacaggaagaagttggtacgggcactcttcatagttcctagacaaaggttggatttgctaccattttatgcaagattggttgctacattgcatccctgcatgtctgatgtagcagaggatctttgttccatgctgaggggggatttcagatttcatgtacggaaaaaggaccagatcaatattgaaacaaagaataaaactgttcgttttataggagaactaactaagtttaagatgttcaccaaaaatgacacactgcattgtttaaagatgcttctgtcagacttctctcatcaccatattgaaatggcatgcaccctgctggagacatgtggacggtttcttttcagatctccagaatctcacctgaggaccagtgtacttttggagcaaatgatgagaaagaagcaagcaatgcatcttgatgcgagatacgtcacaatggtagagaatgcatattactactgcaacccacctccagctgaaaaaaccgtgaaaaagaaacgtcctcctctccaggaatatgtccggaaacttttgtacaaggatctctctaaggttaccaccgagaaggttttgagacagatgcgaaagctgccctggcaggaccaagaagtgaaagactatgttatttgttgtatgataaacatctggaatgtgaaatataatagtattcattgtgtagccaacctcttagcaggactagtgctctaccaagaggatgttgggatccacgttgtggatggagtgttagcaaggtattcgattaggaatggaggttaatcaacctaaatttaatcagaggcgcatcagcagtgccaagttcttaggagaactttacaattaccgaatggtggaatcagctgttattttcagaactctgtattcttttacctcatttggtgttaatcctgatggctctccaagttccctggacccacctgagcatcttttcagaattagactcgtatgcactattctggacacatgtggccagtactttgacagaggttccagtaaacgaaaacttgattgtttccttgtatattttcagcgttatgtttggtggaagaaaagtttggaggtttggacaaaagaccatccatttcctattgatatagattacatgatcagtgatacactagaactgctaagaccaaagatcaaactctgtaattctctggaagaatccatcaggcaggtacaagacttggaacgagaattcttaataaaactaggcctagtaaatgacaaagactcaaaagattctatgacagaaggagaaaatcttgaagaggatgaagaagaagaagaaggtggggctgaaacagaagaacaatctggaaatgaaagtgaagtaaatgagccagaagaagaggagggttctgataatgatgatgatgagggagaagaagaggaggaagagaatacagattaccttacagattccaataaggaaaatgaaaccgatgaagagaatactgaggtaatgattaaaggcggtggacttaagcatgtaccttgtgtagaagatgaggacttcattcaagctctggataaaatgatgctagaaaatctacagcaacgaagtggtgaatctgttaaagtgcaccaactagatgttgccattcctttgcatctcaaaagccagctgaggaaagggcccccactgggaggtggggaaggagaggctgagtctgcaaacacaatgccgtttgtcatgttaacaagaaaaggcaataaacagcagtttaagatccttaatgtacccatgtcctctcaacttgctgcaaatcactggaaccagcaacaggcagaacaagaagagaggatgagaatgaaaaagctcacactagatatcaatgaacggcaagaacaagaagattatcaagaaatgttgcagtctcttgcacagcgcccagctccagcaaacaccaatcgtgagaggcggcctcgctaccaacatccgaagggagcacctaatgcagatctaatctttaagactggtgggaggagacgttgatccagcagcacgtgtcatttcattaggtcctgtatctgatgttgtggttagtggagtcctccagcaattgaatgagagcagtggacacatctcagcaggtcggtctagagagttgcgaatctaaacctgggacaggctggggccaggaggcagaaacaccagcctctgccaacaccggaacaagccgacgcttccagacaaggcggaaaaggccttttgtaatggaaatctcgcgagggttaatcttctcttgagaatggcagtcaagaaatgagatggttcacttgactactgagcagttacaccaaggagagcgtgaaggagatgattgagccagagaagaaacgggttgtgatggtaatggtgtgggggaaatgaacttgagctttaaacttgatttgagtttcagtgtctctgaattgaacatcccacgttggaagaagatacatttgggggctccaggactacagtagaaaagtatagagcaagcaggaaaatcttctagtaaaacttacatgcaggacaacaaaatgatgaaagatatccaaataccagataatccaccaggaaggcttttgtttaggaatttgtttcaagaggaacaagggatgagggagaaaaatccgttttatccatcagagtcagtgctataaaattgcctattaaggtaaaagaaaaatgtggagactattttactatacagagagcattaattcagatggcttagaaaagtgataccagcccaagaacagggatctaggtgagcccattgtaagtatcattgaaaacaaaacatgcccgtcaacatgtcacagaaaacgaacgaaggacaacaagaagtggatgagaatattttgttgaccttcatgggtttacagcctctgtctctaaacaaagtatggaaacaagtagagcttttattttgcttttggttttggtttggttttttttttgttttcccccactaaatagaaatgagggtccttagtctgtttctgacaatctgttaatttcttaggacagctgtctttggtttgctttccagcaggcgtagtatatttagtcggagagcacatctgtatgcgacaacttgattacatctttttttctagctattttgcattttttcttttaccatgtttcagtttctgcatgtagatttaaataaaaaacaaaacttgtaaagttgtaacatttcacatggaaatgctgcccaatcttcaccagcttcagaaatctgacctttgccgatgctgcaataaagtgttgtaatttaaaaaaaaaaacaacccattaccaaacataannttgtgccccccctgggggggggctcattttaatagccgctcctttcccccccctacgttatatatgggtttttata

SEQ ID NO: 65251 - DNA, 2578 bp, Homo sapiens
  misc_feature (1)...(2578): n = a,t,c or g
aaactcagtggacgaccctacagacacatgggagtgcttggaacttcaaaactctatgacattcggaaaactatctttactttcactccacagtttatagaccagcaacagttctacctggctctggacaacaagatgatagtggaaatgcttagaacagacctctcctacctctgtagccgctggcggatgacaggccagcccaccatcaccttccccatctcacacagcatgcttgatgaagatggaacaagcttgaattcaagtatcctggcagcactccgaaaaatgcaagatgggtattttggtggggcaagggttcaaacaggtaaattgtcagagtttttgacaacatcttgttgcacacacttgagcttcatggaccctggacctgagggtaagctgtacagtgaagattatgatgacaactatgattacctggaatctggcaactggatgaatgattatgattcaaccagtcatgctcgctgtggtgatgaagttgctcgttatttagatcaccttttggcgcacactgctccccatcctaaactagcccctacctcacagaagggagggctagatcggttccaagctgctgtgcaaacaacctgcgacttaatgtccttggtgaccaaggccaaggaactgcatgtacagaatgttcacatgtatcttcctacgaagttatttcaggcttcccggccttcattcaacttacttgattcacctcatccccgacaggagaaccaggttccctctgttcgtgtagaaatacatcttcctagagaccagtctggggaggtggactttaaagcactggttttacagttgaaggagacctcaagcttacaggaacaagctgatatcctctatatgctgtatactatgaaaggacctgactggaacactgaattgtataatgaacggagtgctacagtgagagagcttcttaccgagctgtatggcaaagtgggagaaattcgtcactggggcctgatccgatacatttctgggatcttaaggaagaaagtggaagcacttgatgaggcctgcacagaccttctctcccaccagaaacatttgacagtaggacttcctccagaacctcgagaaaagactatctctgcacctctgccctatgaggcgctcactcagctgatagatgaagccagtgaaggggatatgagcatttcaatccttacacaggaaataatggtatatctagccatgtatatgcgaacccagcctggcctctttgctgaaatgtttcgacttcgaattggtctgatcatacaagttatggcaacagaactggcccactcccttcgatgctcagctgaggaagccacagagggcctgatgaatctcagtccttcggccatgaagaatctcctgcatcacattctcagcggcaaggagtttggagtggaacgaaagccgttcgtcccactgattcaaatgtcagtcctgctatttctatccacgagattggtgctgttggagcaaccaaaacagaacgaactgggatcatgcagttaaaaagtgagataaagcaggtggaatttcgtagactgtcaatctcagctgagagtcagtcacctggaacctctatgactccaagtagtgggtcctttcctagtgcatatgatcagcagtcatctaaagatagtcgtcaaggtcaatggcaacgccgaagaaggctggatggggcactgaatagagttccagttggattttatcagaaagtatggaaagttttgcagaagtgtcacggactttctgttgaagggtttgtccttccttcctctaccactagagagatgactccaggtgagattaaattctctgttcatgtggagtcttgtcctgaatgtgttacttcgcccagagtaccgtcagctgctggttgaagccatccttgtcctcaccatgctggcagatattgaaattcatagcatcggaagcatcattgctgtggaaaaaatagtgcatattgccaatgacttgttccttcaagaacagaaaacccttgggcncagatgataccatgttggcaaaggatcccgcatctgggcatctgtactcttcgggtatgacagtgcacccagtggcaggtttggcaccatgacctacctctcccagggcagccggccacctacgtgcaggagttcctgcccccacagcatctgtgccatgcaatgagggctttggttcctggcttctgggagccttttgacagctggtccctgcctcgggtggattgtgcatggaactaaaatgttattgcctaaccaatccaacccgtgcccctttctgtcccatccttcccaagaagagagaactttttcgataaactaactactgtagaagaagtgaacacttacctggaggctcaccttgcagaaccagtgacaatcttatgagtataatgaacactcagccaggcctgtcatgattggctttatttctttcatcattcataaaagtttgcatgtgtttttattctctagatctgttaccaatatagttttctaactcctgtttggggagcaagtgttaaaaaaaacttattcct

SEQ ID NO: 65252 - DNA, 342 bp, Homo sapiens
cttgagtacacagaccagggtatgcgggcacgtgagaggctgctgatgatttatatcttccattgtgagggaggacttgcttggtcttataatatctagccaaacatgtgaatccggctctctataacaatcacacggaacttatgatccttatactttctgatcctatcaagatgctttcgaacagcaactgctttcttaagtacttggtgcagatcttcaagaagatcaggagcatgatccttagacttaagaattcttagcatgatattgcctgtcacaaaacgtacttgtgcaacaccatgtgaatctctcatgattacaccgatctgtgaaggagta

SEQ ID NO: 65253 - DNA, 2666 bp, Homo sapiens
ggatcacctggcaaaaaggaagagaaggccaagaacaaagaatcactttgcatggaaaacagtagcaacagctcttcagatgaagatgaagaagaaacaaaagcaaagatgacaccaactaagaaatacaatggtttggaggaaaaaagaaaatctctacggacaactggtttctattcaggattttcagaagtggcagaaaaaaggattaaacttttaaataactctgatgaaagacttcaaaacagcagggccaaagatcgaaaagatgtctggtcaagtattcagggacagtggcctaaaaaaacgctgaaagagcttttttcagactctgatactgaggctgcagcttccccaccgcatcctgccccagaggagggggtggcagaggagtcactgcagactgtggctgaagaggagagttgttcacccagtgtagaactagaaaaaccacctccagtcaatgtcgatagtaaacccattgaagaaaaaacagtagaggtcaatgacagaaaagcagaatttccaagtagtggcagtaatttcagtgcttaaataccccttccttacttacacctgaatcgccttcatcagtcactgtaacagaaaggcagccggcagcagtcttctgtaacagtatcagaaccactggctccaaaccaagaagaggttcgaagtatcaagagtgaaactgatagcacaattgaggtggatagtgttgctggggagctccaagacctccagtctgaaagggaatagctcgccagcaggttttgatgccagtgtgagctcaagcagtagtaatcagccagaaccagaacatcctgaaaaagcctgtacaggtcagaaaagagtgaaagatgctcagggaggaggaagttcatcaaaaaagcagaaaagaagccataaagcaacagtggtaaacaacaaaaagaagggaaaaggcacaaatagtagtgatagtgaagaactttcagctggtgaaagtataactaagagtcagccagtcaaatcagtttccactggaatgaagtctcatagtaccaaatctcccgcaaggacgcagtctccaggaaaatgtggaaagaatggtgataaggatcctgatctcaaggaacccagtaatcgattacccaaagtttacaaatggagttttcagatgtcggacctggaaaatatgacaagtgccgaacgcatcacaattcttcaagaaaaacttcaagaaatcagaaaacattatctgtcattaaaatctgaagtagcttccattgatcggaggagaaagcgtttaaagaagaaagagagagaaagtgctgctacatcctcatcctcctcttcaccttcatccagttccataacagctgctgttatgttaactttagctgaaccgtcaatgtccagcgcatcacaaaatggaatgtcagttgagtgcaggtgacagcaggacttgctaaagcactttgcacttaatggctgttgagggccactttttttttatactgcacagtggcacaaaaaaatatcagacaagcactattttatatttaaaaattgtttcttgacaagctgacttggcacttaagtgcacttttttatgaagaaaaagtacaatgaactgcttttcctcaagcaataattgtttccaacttgtctgggaattgtgtgtctggtaactggaaggccttccactgtggcaaatggaggcttttcactgcctgtagagacaatacagtaagcatagttaaggggtgggtcagaacatgttaagataacttactgtatatgtattcccttgtattttgttaaagctggaacatttgatatttttccatttatttatgaaaaaatatgaacctattttcatttgtacaaggtaattgttttttaaagcaagtcaccttagggtggctttaattgtataagtcaagcacatgtaataaattcaaaacctgcagttaacaggatattagacatcaatcctggtaaccaaatattaaagattctctttaaaaaagactgaacatgtttacaggtttgaattaggctaaaaggtcttgcagtggcttttcatggcccttcaaattggaatggaactactgtactttgccatttttctataaatcagtatttttttttaattttgatatacattgtgtgaaaaaagaaaatggctaataaactgtattaaatcttaaacaatgtataaagattgtacttagccagttcaaagtgtatatttattcataatgaattataacagttatatttttgtgttttcttgtaaatgtttcttttcccttaaatacagataattcatttgtattgcttattttattatgagctacaacaaaaggacttcaggaacaagtaatgtattagtatggttcaagattgttgataggaactgtctcaaaaggatggtggttattttaaatataaatagctaatgggggtggtaggcctataaaattaaatgccttgtataaaatccaaaatgaatgcaaaattgttttcacttgtattgactttatgttgtatgattccaatctctgttctgtttggcacttgtatttaattcttcacctttgtaagacatttgtatattgtgcatgtgttcattcaagctatttaatatctggcactgttaatacacagtactttattgt

SEQ ID NO: 65254 - DNA, 187 bp, Homo sapiens
atgggaaacctcaagggcacctttgccacactgagtgagctgcactgtgacaagctgcacgtggatcctggtctgtgtgctggcccatcactttggcaaagaattcaccccaacagtgcaggctgcctatcagaaagtggtggctggagtggctaatgccctggcccacaagtatcactaagctcgc

SEQ ID NO: 65255 - DNA, 3306 bp, Homo sapiens
cttcctctccacgcggttgagaagaccggtcggcctgggcaacctgcgctgaagatgccgggaaaactccgtagtgacgctggtttggaatcagacaccgcaatgaaaaaaggggagacactgcgaaagcaaaccgaggagaaagagaaaaaagagaagccaaaatctgataagactgaagagatagcagaagaggaagaaactgttttccccaaagctaaacaagttaaaaagaaagcagagccttctgaagttgacatgaattctcctaaatccaaaaaggcaaaaaaagaaagaggagccatctcaaaatgacatttctcctaaaaccaaaagtttgagaaagaaaaaggagcccattgaaaagaaagtggtttcttctaaaaccaaaaaagtgacaaaaaatgaggagccttctgaggaagaaatagatgctcctaagcccaagaagatgaagaaagaaaaggaaatgaatggagaaactagagagaaaagccccaaactgaagaatggatttcctcatcctgaaccggactgtaaccccagtgaagctgccagtgaagaaagtaacagtgagatagagcaggaaatacctgtggaacaaaaagaaggcgctttctctaattttcccatatctgaagaaactattaaacttctcaaaggccgaggagtgaccttcctatttcctatacaagcaaagacattccatcatgtttacagcgggaaggacttaattgcacaggcacggacaggaactgggaagacattctcctttgccatccctttgattgagaaacttcatgggggaactgcaagacaggaagagaggccgtgcccctcaggtactggttcttgcacctacaagagagttggcaaatcaagtaagcaaagacttcagtgacatcacaaaaaagctgtcagtggcttgtttttatggcggaactccctatggaggtcaatttgaacgcatgaggaatgggattgatatcctggttggaacaccaggtcgtatcaaagaccacatacagaatggcaaactagatctcaccaaacttaaccatgttgtcctggatgaagtggaccagatgttggatatgggatttgctgatcaagtggaagagattttaagtgtggcatacaagaaagattctgaagacaatccccaaacattgcttttttctgcaacttgccctcattgggtatttaatgttgccaagaaatacatgaaatctacatatgaacaggtggacctgattggtaaaaagactcagaaaacggcaataactgtggagcatctggctattaagtgccactggactcagagggcagcagttattggggatgtcatccgagtatatagtggtcatcaaggacgcactatcatcttttgtgaaaccaagaaagaagcccaggagctgtcccagaattcagctataaagcaggatgctcagtccttgcatggagacattccacagaagcaaagggaaatcaccctgaaaggttttagaaatggtagttttggagttttggtggcaaccaatgttgctgcacgtgggttagacatccctgaggttgatttggttatacaaagctctccaccaaaggatgtagagtcctacattcatcgatccgggcggacaggcagagctggaaggacgggggtgtgcatctgcttttatcagcacaaggaagaatatcagttagtacaagtggagcaaaaagcgggaattaagttcaaacgaataggtgttccttctgcaacagaaataataaaagcttccagcaaagatgccatcaggcttttggattccgtgcctcccactgccattagtcacttcaaacaatcagctgagaagctgatagaggagaagggagctgtggaagctctggcagcagcactggcccatatttcaggtgccacgtccgtagaccagcgctccttgatcaactcaaatgtgggttttgtgaccatgatcttgcagtgctcaattgaaatgccaaatattagttatgcttggaaagaacttaaagagcagctgggcgaggagattgattccaaagtgaagggaatggtttttctcaaaggaaagctgggtgtttgctttgatgtacctaccgcatcagtaacagaaatacaggagaaatggcatgattcacgacgctggcagctctctgtggccacagagcaaccagaactggaaggaccacgggaaggatatggaggcttcaggggacagcgggaaggcagtcgaggcttcaggggacagcgggacggaaacagaagattcagaggacagcgggaaggcagtagaggcccgagaggacagcgatcaggaggtggcaacaaaagtaacagatcccaaaacaaaggccagaagcggagtttcagtaaagcatttggtcaataattagaaatagaagatttatatagcaaaaagagaatgatgtttggcaatatagaactgaacattatttttcatgcaaagttaaaagcacattgtgcctccttttgaccacttgccaagtccctgtctctttcagacacagacaagcttcatttaaattatttcatctgatcattatcatttataactttattgttacttcatcagtttttccttttgaaaggtgtatgaattcattacatttttattctaatgtattatctgtagattagaagataaaatcaagcatgtatctgcctatactttgtgagttcacctgtctttatactcaaaagtgtcccttaatagtgtccttccctgaaataaatacctaagggagtgtaacagtctctggaggaccactttgagcctttggaagttaaggtttcctcagccacctgccgaacagtttctcatgtggtcctattatttgtctactgagacttaatactgagcaatgttttgaaacaagatttcaaactaatctgggttgtaatacagtttataccagtgtatgctctagacttggaagatgtagtatgtttgatgtggattacctatacttatgttcgttttgatacatttttagcttctcattataaggtgattcatgctttagtgaattcttcatagatagtatatataaaagtacattttaatagaaagccagggttttaaggaatttcacatgtataaggtggctccatagctttatttgtaagtaggctggataaatggtgcttaaatggtaatgtactccacttcttcctattggaagattaacattatttaccaagaaggacttaagggagtaaggggcgcagattagcattgctcaagagtatgtaaaaaaaaaaaaccc

SEQ ID NO: 65256 - DNA, 2003 bp, Homo sapiens
ttttttttttttgtggctcaataaacttttattgttttgttatttatttttattcaaaagaatttgtttccctatcacaaaaattagataacaccaccaagagcagcaatgtccatggagttacattgatggtggagagttggctgggtattcccaatgtcccaaaggtcataaaggagggaaaagaaaaaaagaaaaaaatattcaaaacaaatccaaaacccatgatgactttggggagagacatcacatgacattttctgtttcttctctcattgtcagctgcagatgtatttcagcaggatcaagtacaatttgacttgagttaacccttcataccaattctagcaccttaattgtaccctgactgttagcagcaatcagcacattggactccccatctggtagtgccctccagcacacagcactaacaaattcatttgtatcatcttcttcctcggtctttgtcgagaacacttttgactgtatcaaacttaaaagttagcaaagtcttagaaagtgctttatagtacaggtagagagagttattttcacttccacaagctatataatctccactggaagccaggcctacaaaagtttttttcattgaaatgacccttgaaggaacgtaggcagtatgggtttccctacattccacagttttagctgactgtctgttggggccgagacaatttcctcaccactcacaaactttgcataagagactgctttacggtgtcctttgaataccatgattggctgtttagtgttacgaagatcatagtagtggacacagtgatctgcacagccgaaagccaaatggtatctggaagaggggctgaatttaacacagcacacattagcctttgcctcaatgcttgccactgagttgtctagattggtagaccacagcttcacttttgcatcatcagaacctgaagccaagagtttaggatccatcaaattaaagtcaacactccaacacctcttctcatgctcctgatagacctttgacctctgtcctgtgaatccatcccataaaataacagtgccttcataatcactgctagctaacaggttcttatggtaactactccaactgatacagctgattttcgaattgcaggtcatttcattctcagggtaatgaatatccactgcatcctggatgacagtgtcatattcatagactttaatcttctttgtaactccagcaatcgcaaaatagtcacaatcccggtcaaattcaatactagagactatactggaaccattatagagatcactagcatatgacaatgtggctaaaggtcgtactgaattatatcgagtaaacttggacaagcattcctgaaattcatccaactggcttgcagttcgactgtcatctgagatacgagacatccttgtagaaaagtaacactgctccaagtcttcaaaatgagcagtaagtcgttttcgtcttgatgctaacgtgctattataccaaggctgtttctttgtctgagaactgccactgaaacctggaggttggctgtattctgtggaatcaataatactactgtgtgatggagaaggagcttcaaattgaggcactgtgctatcctcactgacaggagagtataagccactcatttcttccactctcttaatatcctcttccaaaacacttagctccttctggatctgttccagttgctctctcttatttcttcttgcaaccttgaggaattccataagaatctgtagttgggctgcatgtgattctgcttccagttgtttcttcttctgcactagtaactccaacataagattgacattggccaaatcaaggttatcttggtcagttcccaaccaatcttgaaatatctgccacctgtggccattggtgctactcactgagtggtccaatttgaacctcttttcctcaaatctttgcttctgtttaagaatgagttcattcaccaagaaattaggatacagatggtcggacgcgtggg

SEQ ID NO: 65257 - DNA, 4461 bp, Homo sapiens
ttttttttttttaagatttaatgctttattgctcttgatggcaaatcaaaatatgctttagaaataaagttaatttactggaaaataggagtttttgcaccaaaccataaaattgcatttcattacatcaagagaaccccctcattgtctacaatcatgcccgcttcctttcccctcagcgcccgggacacgtgaccgagatcataccctaaattcctgatccttttgcagttgccacatactgtggcttttagtacatcataaaaaagtgcttgtcctgtggcctcagctgggaggccctggcgctggggctaaggggcccaaggcaccatcccaaaggctgggaggaaagaacccaaacccaggccctcctcctgccctccagcctttgacaggcaactcatttggcatgatctgttttggtgtgtttaaaacatacatttgcatgtgtctagtgtaaagcaacaagtttgaggaaataagtggaaggagagaggaagttccagttagatggttccactagtgtctactggtaattggcaaaactatgagtgttgctaacctgggctgagggcacctctgcctgtgcaggcagctgaccaggcttggagaatgagaaagggttcccaaggacaggatgccagcgggattctttgttgcaaactgcacacagtgcaatttttgggaagcagggatggggagtgggcatgagaccgggttgttgggaccactctggggtcaggccctgggtgaggcacaggaggctgcacacaggcacttggtgggttctgccgggtcagggtgggaaggcaggagaagtgtctgtggcaggacgggaagaagcttcagtacatccctctcttgcacctctgcccactccacctgaggcgtgggctccctccccctcatcctctcaccacatgcctgaggcgtaggctcccctcatcctctcaccgcatggggcatttgctcccagcctctacttccctcaaggccttctcagcagctggggctcagtggggaaggtggtctcagaaggcccctgaagcatacgtgcttttgctgggcagaaactggcaagctggcagtgctccctggcaccagtttcacgggcgcaggccccaaggggccgtgtagagggcggggtgggcatcctggcctggcctgcagtgccaggaccccacgctgtgctgctgccccgcttcctgcttcccgtcatcccgtgtcttgaccccgcccttgctgtttctctgagtaggaaacgcagcgggaggtggtccagagggaaagcggccgaccctgagggctgccctcaccctggcagctccccgttctcattagggttcctgacccaagtgtggtgacagcaggtatctgattagcaaccctgcaaacggtgaaagtatctataagaggaccacagccacaggctgcgagttaagtaagatgatccttggagcatgccacactgtcctctccagagcggtggtcagaggccctggtgggggccttggtggcaaagggagtctcccaggggagaacctgggaaggatggactcactctgctggatgggctgttccgctcctgccactggctcctggctgaggggctggccctgtgggtgactctgctcacccagtggctttggctggcggctgggagttgggttggggtgggtccgccgaactctgagcagagcctccctgagctgggtccccagggctggctcaccttgggcaagagaggtggctatggggctcccgcagagtggggtcctgcatccccaccccttccctctgcagggtcagcagcagggaggacacctgtccaggtgctctgacttgacctggccacggggcatccgcaccaactaaaggcaccatccagttgcctctggggtgagattggtctggacgtcagcccaggggtctgggcggggcaccagggtctttggcttattgaacagggaccgtggacagtaaggacagaggaagatgataccaaaggcagaaaaccaggaaggaaatcttacaggggcggggctcctctgggaggggccctcgcagcaggtttctagcgggcatgggttgggaggcagcagctggactgggacccaggactcggagtgtggccgggctccgggccaggcctccgcggggcgtcagttcccgggcacgctgaggatgaagcccgagcgattcttggtgaagtcgggctggggctggttgagccgcgtctccacggagacggtgcacttcttcccgtgcaggctgcactgtactgggttggtgacgttccacttgaaggtggcgcttctcactcttgaaatgattcaccagcactcccaacaagttctccaattcgactctcatgggttggctgtttgctgaagaggcagacaatgaggtctttgttgtctttcgtatggaacactacaagttggtcctttccattggagacactcagaccagtcaaattgtatagagggatagtcttcatcaccttgtactgtttagtgggatccattttatacaggtgacggtcagtgacaaaaattgctctgtcttccaccttactaaatcgatttaccttacggacgtgacaggaaaagaggacattcatgtatttgtccttccgtttcaattcattagcaacagggacaaaagtgcctgaggtctgaggtgtatctggctttgaagcaagatagttgccctcccaggccctctggagcccgaggtcagccctttgacccttcaacatttccacggctgcaacctttgccctgacctggggcaggtctgaggccggaatgctcttgatgagctgggatgctctccatctattgaaaatcgtctgcagggcctcctcaaaacggcgaagaactttaggagggcttggccacttcacgtgcttcccgtagtctcgcatggtcttgacgccatggaagcgtctggccacctcgtggatgtacgacttcactttgtagcgccggtagtacctgattattgtcagagctgccttggttcttttgtaccgcatgcgggccagggtgccccgccacaccttttgtagaaagaggacaatccttatgagcatctgggcacggagttcttccaaggtaaacaatgttcggggtgttcgaatgaaaattttggtcttcccataagctacatcatcctgaaaaccacaccgttcaattagtttcttgacagcctctttgtctgaaggaaggtcatggttgggccaggtgaattcagagatcatcttatacctgtgaagaaacttctcgtatgtctggcggaaggcaaatcctgcccgacgcactctcacattttccagtagtccaagatattctacttggtgccggcagcgttcatcatcaaatatctgtggagatttcttgtcattgggtttgatgcaacgaacgtaatatggttcctttgatgcaaggttgtctactagagcaatcatagaattcttaaacaaggtagcagcagtcagaggtcgcttggtcacctctgtaatgctcagtttgccttcaggccacatattcttgagcacaggatttgaactgttatacataaggcgcttgaaatcttgaaataaagtatctttatttttgtcaataaaaccaatgacagaatagactacatcgcctgcataatgtcgaattcgaaaatctcgatcaaactccagaattttgtctgaggcacagagctttcggctggaaaaatgggcgtgtttgcccaatttactgttaagtgcttcaagaaacatttcatcggtgactttgccgacattcatgcaagcatcatcaaggattgcaatgatccctttgtgctgttgctccacgaggtcaacaatgatctgattgttgaagtagtcaatatgtttccaggggatcccttcccgctggtattcctcttgttcttgcttcagaaccagctgaataaatagctgctgcagtttctcattgcagtaattgatacagaattgttcaaaactgttgttgtcaaagatttcaaagccatagatatccaagacaccaataacagtgtttttcccatggattgtggtgtcatagttcttgacctcaataatatcattgatgcgagtaacgatccaacaaaaaaggcgctcatatattgccttggcaaaggcgtctctgccgtagctggcctcttgttctgtgtgctgcttgtcaatgatgtcacggcctgtggccacagtccggtaaagaagggctttctcaaccatatctgtcttagtagagagcaattctgctatgatagatactactttgccattctcaataagaggcgtgtcaccatctactacaaattttaaatttcccaagtgcagaatagcagccaaaatcttatacactgtttggatctcctcaggtttgaagccaatgactttcatggcatcagcaacaactctgaattcggcagcatcat

SEQ ID NO: 65258 - DNA, 6566 bp, Homo sapiens
ttttttttttttgctataaacattttatttattttttaagaaagtagcttcagaaaaagaggaaaatatctagatcatttatttatacatatatatattttttaataaaaacctttacattatcttcatgcataaagacccaggtgtggccatattgcctgagatagccctaacaccagctatctcatgccattacctggggctccctatagctgtcagcagtgtagcaaaggccctctgcctgcccctaacgcccaactccatgcctgcctcagtcatggtttgtttttgcttctggaaggggtagatggagggtgggaaatgctttggagctaacatgggatgaacagggagggttacccaacctgccattttttatccaaactctgcaggcaaatccagacagagtctcagcaagactgaaaaccagggaccaaaccaaactctgggagcttcccacagacatgtcacatgtgaccaagggttcctgcacatagtagtagcaaaggtatggtgttcatggaactctaaaggcaggaacaaaaacagccctgaagatcaatccctccgtgacaggcattcacttctgccctaagtgtgtcagaaagatcccattttgtttcctaactcaggccaaccctcctttgcctccaaaattcagtgttaactaaccaattacttaagagacggatccctcttccttctgtggatagttcatctgttaaggatccattatcacctgtctcactcctcctaaggagtcctagtataaaagggccagggtaggagtagggaagctggttggcatggagggtcacaagatccagaatggctagggatggaaaaagaataccctggttctttgggggattctgccaaaggagctttattgaccatttttttaaaggaaaaacactgaatgatcttgaggatggtaaactgtctcctcttctgggttccagaagcccttatgctacgttcagtattaagaaaagccctgaacaagtggaggatgctgcttctggcagcagggagggagggtagatgccacagccaacccagagaatggcaaacagtgccaatccaaacaaggcagggaacctctgtgtggtgtgaatgggcatgtgactgtgatgcaaagtgcctggggctcacaggctcccaacagccagttctcgcagataggactgggtaaggctgcgcagttcgtccatggcatagtcctcaggcatgggaagccggccaatgtggggagccaagaggcgcaaagggactcgctgagggtctggtgttgagtcggaggttctatcaggaggatgatgcagactcagcaccacgcgcagcaggttggctacacgtttggccatgtctgactgagccaggcgatctttagcactgtaacactgaatctgctctatccgactgcacagtgaagtcactttgatgtgtaactgctccaggtcattacctgagcaatccacctgctgtatatggcggagcatttcaatgactctaatatagtccaggtaaacaagcccagatgtttcccaatcctgaattaggctgctgcgctctggaggtgccaggtcttccaagaaccccttcaggtagtcatagttctcattaatgatggcatcagaagctaagtgtcggatgatgagcttgtggcagcggttccagtgctcagccttaaataagcaaagggcctctaagtgcttgtcagattccatgtgtgctcgcacagctttggcctcgtggatccatttggcaggtacacggagcttctgggtaaggaaagtctctttagcccaagattcaggggtctccaacagctggcagtgccgggtaagcagctctcgaacagccttctcacgtatgcctgagttgtcaatgtgcaggaggacaaagatggcccactcccagagcccctcactttcaagctggccagcgtaactggcctgtagcacaccttcacactgcgctgagagatgggtgtagttaagagccctcagcacttcccacaagtgccagcttaggcggtagtccaaaggatctgctgttatgctttcggaggctccagcaagcttggttgagatcataatgtctgtcacttgtacgagttttacgaaggtgaaagcagacatctcgaagtggtgtctggtaagttttgttcctccggctatcacacagccagaaccctccagatacgaaggaagtggggagcaggcatatctgtcactgtcagaggtattctgaaatgcttcttcatacaatgctgagcgccctagaaatggaggctgttggtggaagcaaataccaaagatggatagccagggagcgtttccaatccaactgggagcacacgtttatttgcttcttttctgagagctgccacaccggttttccagccaacagagcaaagatgcgcagtctctcatcctggatgaaggagtctgcttggagctgatgccagtccaccaactgcatggtgagcagctcccggactgactggctacccacaaactgagataaaagaagagcaagacgatgatcccctgactgctgggccagagagcaggcctcactgatccttttgcctgtgaggtagctgaatacagcctccacagggctgtttttttgggttaaggagacttcctcttcaatctgaggtgtggcagtacaggatagccagcgggagaaagctcttcttcgctccagaatttgaatgtattcacggggttcatttagctggctgtcaagctccttcaggtgggcccatagggcttcacatagtgtccatgtcaggctccagtgcttcacaatttgtgcttctggtaagtctcctgatgcttctttaacccaatctgcatagtcatgaatgacagcaactcccagattggggacaatgagaggacacagttcatccacatggacagtgctgtgttttaatttgagctccagaggtgtctgatataatttcatgtcttcatctggctttctttgtctcaaactgagtttttctaagtgaactttgaatggggactcagttaggggtttaacagctactggattgggcaggaatccaaactccatggaatcggcaatctgatgattttctagttcatgagagccattcagctgttctccactattagcaagagtccagttggggccccaaccaacacgaaatgagcgtcccatgaatagggccatgtccatcaagagttttcccttgccataggtgacagacttttcacgagggactaggcctagttgcctacgtgtacccactgttttcaacggaacctcaggggctgggctgggcattgtgaacacagaagtcaggggtggagggacagaccaagaggatgtggatgggatattcattaaagatgctgctctgggagtacgacattcttgcacagagacacttgggtgaaagaaaagctcccacttgtaaattttgattgtagtaacccaccaactagtgaacgagttttcgacgagtgggatgctgaaatggggagtctgggagaacagatttcttgagaagtatctgctttggaaggcaggcgactgaagcgttgatccagtgccatatctacatcttcttcatcagtaagcaatgatgctttcatgatctgtaagacatgtggattaattcccagtgaagatgcaatatgtgttgaggcagacacaggttcctgatcctcaggcatgctctcttctaacatggtatccaaaactggctcctgggtgatatctaccatgtcactgtccagttccacaaccctccctaactgctccacctctgggctctggctctgaggtggaggtgcaggtttgccattaagagccatctgcaagggcgtagtctggcttgcaggaggcaaaggagcagtcttcaacttctttgtactagttttagacggatgctcctcctcctcttcatcagaatcctgaaggccatacttagaaaaatgggagaccttaaacacccaagaaccagtttcaggccggtattctttgaattcagctccctgtttccttgaaactgcttccaatcttccttcatagttgatatcagcaaggcgatctgggctctttattaaacaacgagatgttttatctgttggccaaactccatccaatgtaacttcagccttcctatttagcccttcacccacaggtggtttttggttatcatctaagtagacaactacttctttcctccggatatgcacaatatcatccaaatttagatttgtcaaattcacatctccttcaaaatagattgaaccataacctttccgaccaatagtgaaatcagagacaatgcactctccaaaaacattggtaattttagcaaggtcatccatagatggaatagtatagtaaccaaccttagtgagaataatacctgctgggtgcatatggtaagaattattttctatttcttctcggtcatcctgaagtgactcatcatgaaaagacgtttcttcactgcttccttccagcccatttcgcaaagcagcacgcatgtttaatgcaacaatggtatcatccacactgttgctgttgctgtgtttatttccagcactttctggggtttgaggaataggtttggcaatagggttagtataaaaatgtgaaacaagggaatcttcatctccatcctgctggtgattctcatcaacaggtttgcttaggaaactaaatctctctccattttctggatattcagatggtgaagctagattttctgaatcacgattaacaggagaaaagagattgctattattaaggttcttcaaaaccaacttcttaatgctcttcttgggcatgaatgctccattggctagggatggttcatcgtcatccagcccatcaaagagatgtgacttggctgtgcctgttgtttgtaaagcctttggccggactctagtggcagggcggggtgtcagtttataatgagtaggtgtagtaagagccttctgggctgctggatttgttggtttcaatctctcttccttcttcttagggtctgacatcggattccggaagagaggagagtctccaaaaggtgagtatgttagactattgatgtgctgctggagaacagcctgctgggcagcagaagcatttggatctgtcaaagctactggggcctggggggctccaaagcccaaagtggctgtcgtagtattaaatccaggggccccaaaggctcctgtaccaagaggccctccaatcttaggttggttgttcccaaacaaagatgcctgtccagcaccaagagctgttccaaatcctgcaccaagcccagttccaagagtcccaggtgctggtttacttccaaaaatactattcccactggtatttgtgccaaaaccaaagagcccgccactggttgtaccaaatgaaggtgcactggttgtgctgcttccaaatgtagtaagcttgttattgccaaacagggtcgaaccaacagcaccaaatccagtattggtctgcccaaagagacctgttcctgttccaaatgctgtcccagtgctggtgtttgtagctgtcccaaaaagacctccaggctgtgaggcttgggttactccaaataatcccatggtgttggtgcttggctgtcctatggtgctggtattaccaaaggaaaagccagtgttctgggtggttgtagcctggccaaatggtttgctgaagaggctggtagtctgctgattctgttggccaaagagaccacctggatttgttccaaatccagttgtactagttccaaaggcagttttgttctgaccatatgcaaagcctgaattagtggtggaggagctgaagagtcctgttgcgctggaagtggctggagaagacccaaacaagccagttgtggtacctgctcccacctggttctgtgggcccttcctgttagcctgataatcctctaaacgaagttcctctagtgacttgctttcatattctttcatagcagtaatacactggtgcttggtacttatgttagtgctaactccagctttgaccatagtatctgtaccagttggagggttaaatttaatagtagtcccagtaggagcagctgtaaaactacttggcccaaagagggagccagatgtgctgccaaaaggattagaggtggtatttgtggttccaaagagtcctccactgctagtactggttccaaaattgccaaagccagttggtttattttgtgcaaaggcattgttttgggatgagaagagactggtccctgtgcttgcagttccaaacaaggtatttgctgttcctgttgacgtaccaaacccaaagccagtgcttgtggaggtagctggctggctaaatgaactggttccaaacaatcctcctggtttagtctgtgaatttccaaagaggcctccagtattgttgctagaaccaaatgcagatgttccaaatgcccctccactagtagtgccaaagccagtattctgtccaaatgttgaagttgtgccaaagccacctgtgccacccccaaagggtgttccaaatgatttgttaaacat

SEQ ID NO: 65259 - DNA, 6556 bp, Homo sapiens
caagggtaaaatgatgattattattttttagattttttgattttttttgttttttgtcttttttaaataaaactgtttgtgaaacagctattttatccccatggcagagtgacccctgaaagatgcactaacccctttcttaaggccataacaagatttttttggacttttttttttttttaaaactcagatatttaaaaattatacaatttacaaaacaaaacaacacaacataaagaatcacgtagcatggggctgcctatctgacaggtcctcttttcctttataaaaatgaaagcaaaaagaaaaaggggttaaatgggtgttcctggtcagcttaacccactctgatcacagcgacagtccctccccgtccctgcctacagctcacactgccagctctggcaacacaggcctggacctcctcccatccccacgggtccctgtgggtcagggcacagctgcctggaatgtgctgaggacagggggccccagaggagggtcatcccttgattttgctgctgctgtgtacacttgatggggtccttgaggtcctcaccagccacagtgacccaggacacagctatgacctcaggcatctgccaatttcacccccaaaaagaaaaaattaaaaaaaaaaaaccataaataaatagtgtttctggaaatgaaaaaaaatttatttttgtgtttaaacatcattcccctactcttgaaaacatggaccatccctgtatttccccctcccccaaaaccttcccactttgagacaaattaatgacaaaaggatggttctgctgtggtttgctttttcaatcctgggtctagtgttttctgaactggtgtgagacaggctaaagatcaacgccacacacacaccccgtccttcatgagatgagggtttgttcagttcaatctcacatttaaatttcacttgtcatcggaacaaatttggagatctttaacgagataattttaaaacagaatcaaaagggatagcgcacctttcatttaaacaaagtctttccagactaaaaatagatttatatatatatatttatccctcccttttaattccccccaccctttccccatcatcccacccctcccccctccccccacattgtcactatggagattgtgtccatggaaacagccattccaacgtcttgggtctttctttcctgtggtgtcactggtttgagtgtgatgtgagaacttaaggaagtgctggcatgggcaggcacgcgggcggggcggggcggggcagggcagggtgtggctgcacggtaggacgatttccattccatcacgagtgtccaccaccttctcatctccacagtctcacctgtgcttgctgtcctttccattcccacgagcacactgcccccctcacccccgctccgactgctctgtgctgaggctgcctttcgcggtcttgttctgcaagggggggagagggcacggaaggggaggcttgtgcttagggcacctcaccgagaagttctcctcatgtagcaaacaatctgcatcaatggcacacgggtaatggtatcggaaggagcagcctttgttgtagcagcccaaggtggcgcctgcctcctggcagtgggaacatttcatctctctggctatttccagcgcttcctgcaggccatagagcctgccacaaaccaggtagattccattggcccagagaatacaaccctcatggacccaaaattcattgctgtcaagaggtagttcagggatttgtaactccagctcagggccaccttctgaagtggtgggcacggagggcttcgagtccaaaacagtcttttcactgctgccctcagtggctgcttttttacaagggagccccctggacagggaccgagggcctccaccacagtcttccgagcggtggcgccgcttaaacctggggtgtgcgggccaggcttctctgctccttctggctgctggctgctgctcttcctcctcctcagtgtccgtcttggagccattagaagcacttttgtgccgtaccttaactttgctctgcatttctgtggccctcttaggaggtggattcttcgggagagtggctgcataatcttggggataaaaaggtccaaagaggtcacccatgttccggtaactggcccacttgccacacagacagcaaaccaggtgccccataaccgaagactctgtcacaacaggtccctgcagcataaaggacgaggccgggatgcgccttgctttcagtgctgctaggtggaggggtcagtgacctctgacccttcctgcccctcactaatttggtctgttcttcttcctcagcattgatgattgtacaaacggctccaagttcacacttatttactacatggatgtaagggtaaaaagacttgttcttggcatcagttttatccaagtggctgggtggcatattttaatttgatctcaggttcttggggttcccacaatgggaactgcttgtttggtttttcgcttcctcggctgggccccaggcttccttctctccctcctttgcctctgtttttttggctttggctctccatctgcagaaccttctggtatctgtgggggctgagggggtggaggcggtggctgctgctgtttcttttgcttattcacactaccaatgggtctccccttcttctttcctgatgggaaatatccctttggagggaaaccctcttgcttcggtgaaatcgtcactgtatcgttctccttctcttcagccttggggtttgcctcaggggccaatatgcccactggaggtacattctttgagtctggaaagattaaaggtgctgttccacccagggaaccatctggtctcccttggttactaccaggcttctgtgaggttgtggatgtcatggcaccagggggttcctttccggcagtaactgtttctgcatgtgtctctgtcttcactttgtcatccacgctgccacgccactcttctgaagaccttggaagaggtttctctacgtgcaactcctggtttgctggactgactaggtccgaagccacctcaccttttctcttctctatgtcagcatcctgaacagcaacactcccaccttcaggaggaccactcttcaaagacagtatatcatcaagcgtaaccgtgtctcccccagcctccgcactgttcgaagatgcgctcctcctaatatttggggatgtaatcttctgaactatagcttccaatttcaatccccgtcctttccgtgggggcagtattttggtcttagcagggcttgtgagggtaacagcagggcagtttctactatctggacttggaaggtccttggaggaatctctcttagggatagacttgatatcctgactgtgagaaagatgggcataggaattgaatgctttatcagcgccttcttttgatgagtgaaggaggcgacctttatcttcagtgctactgttctttacatcttgtgactgtctcttactgggaatgggagagataaaagaacgaacacgcctcctcatgattaaggggttttgagaagaatgatcctcctggcctggaagtctcagcataacactaccaggtttggatgactgtgtagcctcagctagtccatgtccatcagtctcatggggcggcccataccttttttgactggacattcctggaggaccgctgcttttggctggagaagtttgccgagaaagatcccaacaggattcttgtaacttctgggagccatgctttaattccatgcccttgttaggcagaccatcactagacattaggcagcgcccagcctcctgggcactggggtcatggtaagtccccactggtgggccatacatcataccatctttgtcatttttcagagggctccgtactctgtcaagaaactgctgctgccttggactcttccgtggcccctcctgcctgtgctgtgctgcagcaattactccctgagcagaaccgctgctccagtctttatactcctctggttgctgttggtacatctgtctcttataatgcagctgagaattcaaacctgcgttagggtccccataagcatgagcccgagtatttgcatgataagcagaggccagggtttctgagttgggagaaaagggagtgtgtaaagaactccggttagccctctctgaaaaggtcatgtgtggattcatgtgatgagggtctccccctgggcctctgctccgcccaggagacattttcaatttttctgcaaagtcatgatattgagaaggggaccgacccctcatgccctcccgaccaccaactctgccagggacccgccgcattggcgtgggtctgctgtcttgcgggccatagtctgaaagggaatcatgggttgctgctccagggctggcattgccgcggtaagactcatgcttgatgctaggaggatggcagtggtctccagatttcttgttgttgaaactagcttgagatttagactgttcaaagtcttcctcttttatctgcccgctctgggatttcagcttggtttccatggacaccaaaccaccaggaagaatgaccgactgacttaaagttggattgagacggtcattcctcccaattctggtgtcggcactcatgtgtcccagtgagtgagcccctgggtccctgacaatctgtcttagtggagaaatatcacagatcactgatcttctttcagagagggaacccccaggctcatgcgctgatgactgaggctctatttcaaactttctgggaattggatagtcagtcaaattgatctgtttcatttcaggagctgtgctgcttgatttcctttcccaggggccccagtggggattttttaatagagacccaatgcttttgttcagaaggcccctgctagctaattcattggtttgactaaccaagacattgggccttgtggttccttctaggctaccagccatcccctgatgctcttgagtaccccctagaatatctcctgtcagggtggtggtggtaaccctgaagcacttcctgcaggaggcttgggaatttttcatttctaccctttcgttccccatggccagtgaaatctcccttttcttgccctgtaggatactgaggaaagccactgacatttcgtggcacggctgacccgaaactatctttgtaactatagcgcagacttccaggagatttgctaggctcagttctgctcgtaaaaccagggcccgctgcagagtggccactctggccatttccttctccattatggttggagttgttatcgccattcttgtttcctttgctccctcctcctcctgggaggctctggctggggaagtgatgcatgactggtttcctttgccccaccattgctaggtggcctttgagtggctgcaggatcatcctcttgggagcctttatcttgtccaccaggcttttctacccgacctgtcatggcttcccgggagacaatcaccccaacagtcttctcattaacctttggggttcccgtcggatgacaatggcatgtccttagcgcctggtgaggtggcctcttctcttgcggcaggactagcattgagtctggggggttcattctgagcaccctgtgcccggggaggagccagctttctcagaggctccacccttgtaggtggtgtcagagctggtgctctgggccacttagttgccgcactctctcgccttgatcctctgaactgctggagcagcctcccatctaatgactctgccataggggacttcagctgttcttcaggttgtgaggagccttcagaatttgtgcagctatctgctttcttggaagatgagggcctcttggaggtcttcttctgaggagtcagggcatcagaaagtaacatgtgctggacagtgttaggaagattggccacttgagtactcagagcactcaaactactcaacccaggatctgtcagtcgcttttctggtaccccttctagtccaaaccctttgaagcctgcagcatgagaattaggactgggcatcattgatggggttggactgagttgaggcattaactgtaaaattctgtttctggaacccataggcacactgccttgcccacactggagattctccccagtctgcatgagaggagatggggtagaactacagcttggagactgaaccacagaggcagctggagaagggttagaaatggggctgaagttctggtgaaactgcatgggggacctcacaggaacctcaggctggttgtactgccccacttggctttgcaggggcagcttggtggcagcgttagtatactgcatcacatgctgagaagggtgttgttgttgctgcggttgctgctgctgctgcccctgttgggtcccttgtggaatctttgcctgttcaaaattcttcatagattgaggctgatagctgtaattggattgtgttccataagcctgtgcattagaacccacattgtgtccttcatactgagatccagcattcacattgtaactgccatcatagctctgtccagactggctaaaacgctgtggtgaagggaaggaggag

SEQ ID NO: 65260 - DNA, 1106 bp, Homo sapiens
tttcgtcgctgctggcggtcgggcgctcgggcggccctggggcgcgagacgagttgcatgtgttggttcagctggcgatagcggcgggagcggagccggcggggcctgtgcgaccgcctgggtttgtgaaatggctgctgacatttctgaatccagcggggctgactgcaaaggagacccaaggaacagtgccaagttagatgccgattacccacttcgagtcctttattgtggagtctgttcattaccaacagagtactgtgaatatatgcctgatgttgctaaatgtagacaatggttagagaagaattttccaaatgaatttgcaaaacttactgtagaaaattcacccaaacaagaagctggaattagtgagggtcaaggaacagcaggggaagaagaggagaagaaaaaacagaagagaggtggaaggggtcaaataaaacaaaaaaagaagaccgtaccacaaaaggttactatagccaaaattcccagagcaaagaagaaatatgtgacaagagtatgtggccttgcaacttttgaaattgatcttaaagaagcacaaagattttttgctcaaaaattctcctgtggtgcctcagtaacaggggaggatgaaattatcattcagggagattttacagatgacataattgatgtcattcaggaaaaatggccagaggtagatgatgacagcatcgaagatcttggagaagtaaagaagtgaatttgaaaatttgtctgtatttaatggcctgaactgagagttgatatggccaaagggagagaggccttttaaaatatatatatatatacacatatatatgtatatatacacatatatgtatgtatacacatatacacatgtatatatacatgtgtgtatgtatacatgtatatacatatatacatacacatatatgtatacatatatacacatatatgtatacatatatacacatatatgtatacatatatatatattctacagtaaaactgtagggctgtcctcgtccttggcattttcactgttctgtacaaggctgcttgtttttttattgccaaagtcaaataaacgggagactgtcatgctcatgcatgaataa

SEQ ID NO: 65261 - DNA, 326 bp, Homo sapiens
cgcggacgcgtcgacctctaaacagcttagagccacagttctcaaacggcctgcctgtctccaagcattggcagcagctgctgtcctcaccttaaaagcctaaaaccatctctacatgccaacctaacagtttattcaacccataacatcaaaaacatgctaactcaccacagtgtactaagtttcatctccccctcacagcttctccaactgtatgctctattcataaaaactccccaaatcaccgtgctaaccagctctcgtctaaacccagccatgctcttacctgaaatttctacctgacaagaccctgcacacttctgtgt

SEQ ID NO: 65262 - DNA, 399 bp, Homo sapiens
ggcacgaggcataaagtctgattctcttactgtctgcatggagttttttcacttctgtgtggccttggaaactgtgtcatccttatatttgggttctgggatattgctggtgataatcttggtgctgcatatcggtgactccagcccatctcaatgaccttgcttgtattattccattacttggacatggcctcctgtattccctgagaggtcccgacccctttacagacatcctgcacttcagactatttgtcggagcacggatctaccactccattgcatatttgacacccctttcccagccaaatagagctttgagattttttgttggatatggagttacctctttccatggcttacaggttgcttaaaagtatattggacctgtaaagaaaatcg

SEQ ID NO: 65263 - DNA, 631 bp, Homo sapiens
tttttttttacagatatccaattttttaatttaattaaaactttacaattgtatttacataatccatggaaggagagaaaggggatgaaacttgaaggaaccaggactctggaggatgcaggatgctgtttctctggatgagatgtactctgccactgtgctctctgggcactttcagatgatggggtctgagatgtctcctcaggctgcatcagctgtcttcagtctccagaacagaaagagcctgacccaggggcatcttgggtggccaccagaaccaggtttctgggagagagttcaggactgaagatggggcaggagctcagcatggaaaccctgttcctgaaggtacagcagccggtccagtagaataagcgtctccaccagtggggcaagcagtagagccaggctgaagaaggccaccacacggttctcctgggccacgtgggcctgaagggcagccagattcagtggcagctggggatctagccccactcgctgtagcccccgctgcacatatctgtgggatcagtcacattcagcactcagtttggttttaagaactgtcacctctcacttaaactttgcttgttcctaattcagttccaactttgctttattttctcgtgcc

SEQ ID NO: 65264 - DNA, 405 bp, Homo sapiens
ggcacgagagctggaaaatgagcttccagggcttgggtggcgtcgggacattgccggcgaacctgaaaggaagcccttctgccttttctcgtgaagatgggaatttgctttcctgggttgaacttcaaagccacactggtgatgcaaaacctctgaccattgaggcctggctgatcactagacacgtgacctagatgagcttcacactgcttgcagacaacctctgtgcgagctgatcctaacgaggaatccaaaggcttaagatccctgggtggctttatcagagccagacgtaccctgagccttggaaaacgaaagccacccaatgccagagcagtactttttctcagaactgtgaagacataaacgatactacagctgctaatgacactgcaattaacagcg

SEQ ID NO: 65265 - DNA, 460 bp, Homo sapiens
ggcacgagggactatccacgcattgtgaaccacctggaccacacctatgtcactgcgccccaagccttcatgatgttccagtactttgtgaaggtggtgcccactgtgtacatgaaggtggacggagaggtactgacgacaaatcagatctatgtgaccagacatgagaaggctgcctatgtgctgatgggcgaccaaggccttcccggagtcttcatcctctatgagctctcgcccatgatggtgaacctgacggagatacacacgttcttctctctcttcctgacaattgtgggcgctcaccataggtggcatgttctttgagcattttgtcattaattacttaacccataagtgggggcttgggttctatttcaaaaatgaaaactctttacagggtggccataggactttatatggagtgaacttttttatgtattggagtttacgggggggctct

SEQ ID NO: 65266 - DNA, 5240 bp, Homo sapiens
cagaaaaatcaccaaagtcacctaattcagtgaaagcagaaaaagcatccagttatcagatgaagtcagaaaaagtaccaagttcaccagcagaagcagaaaagggacccagtttactgttgaaagacatgagacagaagacagaattacaacagattggaaaaaaaattccaagctcctttacttctgtggacaaagtgaatattgaagctgtagggggagaaaaatgtgctctgcaaaactcaccacgatctcagaagcaacagacatgtacagataatactggtgattctgatgatagtgcttcaggaattgaagacgtatcggacgatttaagtaaaatgaagaatgatgaatctaataaagaaaattcttcagagatggactacttagaaaatgccactgtgatagatgaatctgcattgacacctgagcagaggctggggttgaaacaagcagaagaacgcttagaaagagatcacatctttcgacttgaaaaacgatcaccagaatataccaattgtcggtatctatgcaaactttgcttaattcacattgaaaatatccagggggctcataaacatataaaggagaaacgacataagaaaaatattttggaaaaacaagaagaaagtgagcttcgttctctgccacctccttcccctgcccacttggctgctttaagtgttgcagtcattgaattagcaaaagaacatggaataacagatgatgacctcagagtccgtcaggaaattgtggaggaaatgtcaaaggttataacgacatttttaccagaatgttcacttaggttgtatggctcatctctgactagatttgctctgaaaagtagtgatgttaatatagatataaaatttcctcccaagatgaatcatccagatcttctgataaaagtacttgggattttaaagaaaaatgtattatatgtagatgtggaatctgattttcacgctaaagttcctgttgtggtgtgcagagatcgaaaaagtggtttactttgtagagtgagtgcaggaaacgatatggcatgtctcactactgatttacttactgcccttggcaaaatagaacctgtctttattcccttggtgttagcctttcgctactgggctaagttgtgctatattgactcccaaactgatggtggaatcccttcttactgttttgctttaatggtgatgttttttctacaacagagaaaaccccctcttcttccttgcttacttggaagttggattgaaggctttgacccaaaaagaatggatgactttcagctgaagggcatagtagaagagaagtttgtgaagtgggaatgtaattcaagtagtgcaactgagaaaaactcaattgctgaggaaaacaaagctaaggcagaccaaccaaaagatgataccaagaagacagaaacagacaaccaaagtaatgccatgaaggaaaaacatggcaaatctcctttagcattggaaacaccaaatcgggtatccttgggacagttatggttagagctgcttaaattctacacactggattttgctttggaggaatatgtcatatgtgtacggatacaagatattttaacaagagaaaataaaaactggcctaaaaggcgaatagccattgaagatccattttcagtcaagaggaatgttgcacggagcttaaacagccagctggtttacgaatatgttgtggagagatttagggtagcttatcggtattttgcctgtcctcagacgaagggtggaaataagtctacagtggatttcaagaaaagagagaaggggaaaataagcaataagaaaccagtcaagtcgaacaatatggcaaccaatggttgtattctgcttggggaaaccacagaaaaaataaatgcagaaagagagcaacctgttcaatgtgatgaaatggactgtacatcacagagatgtattattgacaacaacaatttgttggtaaatgaactagattttgctgaccacggacaggactcttcatctctttctaccagcaaaagcagtgaaatagagccaaaattagataagaaacaagatgatttagcgccttcagaaacttgtttaaaaaaagagctcagccaatgtaattgcattgatttgtctaagtcgcctgacccagataaatctactggaacagactgcaggtcaaatttagaaacagagagttcacatcagagtgtgtgcaccgacacatctgctacctcttgcaactgcaaagctacagaagatgcttctgaccttaatgatgatgataacctccccacccaggaattatattatgtgtttgataagtttattttaacctctggcttgcagaggttcaaaataaacttatcaaacacataatatgcagcatctgcaaaaaggatggccattcaaagaatgattgcccagaggattttaggaaaattgatttaaaacctctaccaccaatgacaaaccgatttcgggaaatacttgatttagtatgtaaaacatgttttgatgagttatcaccaccttgttctgaacaacacaacagggagcaaattttaattggcttggaaaagtttattcaaaaagaatatgatgaaaaggcaaggttgtgcttatttggctcttctaagaatggatttggatttcgtgatagtgatctggatatttgtatgaccctggaaggccatgaaaatgcagagaaattaaattgtaaggaaataattgaaaatttggcaaaaattcttaagagacatccaggtttaagaaacattttgcctataactactgccaaagtgcctatagtaaaatttgaacacaggcgaagtgggttagaaggcgatatcagtttatataatacgttggctcaacataacacaagaatgctagctacttatgcagctattgatcctagagtgcagtatttgggatatactatgaaagtgtttgctaagcgatgtgacattggggatgcttccagggggaagtttatcttcatatgcatatatccttatgggtgctgtactttctgcagcagaggaaagccacctgttatcccagttctacaagagatctttggatgggaaaacagattccacagagaatggttgatggatggaatgctttcttctttgataaaacagaagaactgaaaaagcgtttaccttcacttggaaagaacacagaatcattaggggagctttggctgggactgcttcgtttctatactgaagagtttgatttcaaggaatatgtaattagcattcggcagaaaaagctgttgacaacttttgagaagcagtggacttccaagtgcattgcaattgaagacccttttgacttgaatcataaccttggtgctggagtttccagaaaaatgaccaatttcatcatgaaagcatttatcaatggaaggaaactttttggtacccctttttatccactcattggcagagaagctgagtacttctttgattccagagtattaacagatggagaactggctcccaatgatagatgttgccgtgtgtgtggaaaaataggccactacatgaaagactgccctaaaaggaaaagtttactgtttagactaaagaagaaagacagtgaagaagagaaggaagggaatgaagaagagaaagattcccgagatgttcttgacccccgagacctccacgatactcgagactttagagacccgagagacctcagatgttttatatgtggagatgctggacatgtacgaagggagtgcccagaggtcaagctggcccgtcagaggaatagcagtgtggcagcagcccagctggtccgcaaccttgtaaatgctcaacaggtggctggttcagctcagcaacagggtgatcagtccataaggactagacagtcatcagaatgttctgaatcaccatcttattctcctcagcctcagccatttccacagaactcttcccagtcagctgctattactcagccttcatctcagccaggatcccaacctaagcttggcccacctcagcagggagcccaacctccccatcaggtccagatgccactgtataactttccccagtcaccaccagctcagtattctcccatgcacaatatgggattgttgccaatgcaccctctccagatccctgccccgtcctggcccatccatggcccagtgatccactctgcaccaggcagtgcccccagcaatattggcctaaatgatcccagcatcatctttgcacagcctgctgccagacctgtggcaatccctaacacgtctcacgatggacactggccccgtactgtggctccaaattccctggtaaacagtggtgcagtggggaattcagagccaggctttcgaggactgactcctccaattccttgggaacatgcaccgcgtccccatttcccccttgtcccagcttcgtggccttatggtttgcatcaaaacttcatgcatcagggaaatgcccgattccagcccaacaaacctttctatactcaagacagatgtgccacccgtcggtgtagagagcgttgtccccacccaccaagaggaaacgtgtcggagtaatgcgagtccattttctttcagctggtctaccgatgcacagcaaccagccaatcctgctgtctcaagggtatccgtacctcaatgtcagttacattcagcagaaaaagtgacatttaatggaaagcaaaacaaatcaggtcctgatttaaaattttaacacgtttagatagcttatttaaattctaagactgtttttacagactgtattatttgtatataaatatgaactatagtttttactagtatcaccaaattgagtgatacaaatttcatctattttattaccctatttttaagggaattttatgttttgtttaaccttgatgaattgtataaagagagaatttaaaaaattacattctttattttctattagctgtattcatactttggttgcttcagactttatatatattgttcttaagaattaggaaaggatttcatgtgttttaaatttgtcacttctattctttacagaaccttgtagtgccaaaaactttttaaaaggtaaaaaaataaaataaaattacaacatgaagattcaaaaaatttttttcttttacatacttgtatattgaatatattcaaacttgaatggaaagttgcttttttgtctgtatttgaagtacttctattttaagttaataaatctttttgacaag

SEQ ID NO: 65267 - DNA, 2440 bp, Homo sapiens
ggtgcaggcaggtgcgatgggccagcttgaggcacactgaggggacgcggggctgggcagtggcgtgcgctcgggccgccgccgccgctgcctcggcgggtcctcggcctcttcaggcaaccagccgcctcaggagctggggcttggggagctgctggaggagttctcccggactcagtaccgggccaaggatggcagcgggaccggcggctctaaggttgagcgcattgagaagagatgtctggagctgtttggccgatactactgtttcagcgtgattccaaacacgaatggggatatctgtggccactatccccggcacatcgtgttcctggagtatgagagttctgagaaggagaaagacacgtttgagagtaccgtacaggtgagcaagttgcaagacctcatccaccgcagcaagatggcccggtgcagaggacggtttgtctgcccagtaatcctgttcaagggcaagcacatttgcaggtcggccacactggctggatggggagagctgtatggacgctcaggctacaactattttttctcagggggtgcagatgatgcctgggcagatgtggaggacgtcacggaggaggactgtgctcttcgaagtggtgacacgcatctttttgataaggtcagaggctatgacatcaagctgcttcgatacctgtcagtcaaatacatctgtgacctgatggtggagaacaagaaggtgaagtttggcatgaatgtaacctcctctgagaaggtggacaaagcccagcgctatgccgacttcactctcctctccatcccgtatccaggctgtgaatttttcaaggaatataaagatcgggattacatggcagaagggctcatatttaactggaagcaggactacgttgatgccccattgagcatccccgacttcctgactcactctctgaacattgactggagccagtatcagtgttgggatctggtgcaacaaacacaaaactacctgaagctgctgctttccttagttaacagtgatgatgacagcgggctgctggtacactgtatctcaggctgggatcggacccccctcttcatctccctcctgcgcctttccttgtgggctgatgggctcatccacacgtccctgaagcccactgagatcctctacctcactgtggcctatgactggttcctcttcgggcacatgttggtagatcggctcagcaaaggggaggagattttcttcttctgcttcaattttttgaagcatattacctccgaggagttctctgctctgaagacccagaggaggaagagtttgccagcccgggatggaggcttcaccctggaagacatctgcatgctgagacgaaaggaccgtggcagcaccaccagccttggcagcgacttctccctggtcatggagagttccccaggagccactgggagcttcacctatgaggccgtggagctggtcccagcaggagcgccaactcaggcagcttggaggaagagccactcatcctctccacagagtgtcctctggaaccggccacaaccctcagaggaccgcttgccttcccagcaggggctggcggaagccaggtcttccagctcctcttcctcaaaccattctgataactttttcaggatgggtagcagtcccctggaggtccccaaacccagatcagtggaccatcccctgcccggatcctctctctccacagactatggcagctggcagatggtaacgggctgtggcagtattcaggagcgggctgtcctgcacacagactcctctctccctttcagcttcccggatgagctccctaacagttgtctgcttgcagccctgagtgatcgagagactcggctgcaggaggtgcgctcagccttcttggctgcgtacagcagcacagtggggcttcgggcagtagcccccagtccttccggtgccatcgggggcctgctggagcaatttgcccgtggtgttggactccggagcatcagcagcaatgccttgtgaagaagccagcccatgacattttcctgctcctctctcagctgagcccttagcagagaatcaaagccatgcctggccgaaggggtacttccaggtcaggggaaatttcagtcccccatctccatcatgaacatggcagccccaaagctgagcaaggccaaagacagggttttccaacccccagcctcttgactggtgaccaccaccccttcttgtcactgtctcccacccaccccatctttgctgggattcccatcaactctcagaactgtgtggggtttccctggggccttgtggaagccatgacttcacaaagaccctacctgtcagttcttgtttctggggaggagggatcacctgcactgagaatgaggcagtttgacacagatcacaaaataaaatcaaagtctttttgaatagccaaaaaaaaaa

SEQ ID NO: 65268 - DNA, 2529 bp, Homo sapiens
ttttttttttttagtacaacaaagctctcaaccagttttatttttcctcacaatgaacggaagaaaaaggcagaaataaatggtagggtcatttgctagtagaaaagaaagctgggattccccatttactttggaaactgaggagaaagaactgctttccccactcgtgtctgggcaaagggtgtgcccagatgttggcaaaggaaccagacaaaatcaacagccagcagttttctgttccaaacagttagctcctctacagtccagagggaagctattcctgagttcattcaaggtgacagcagaagtgtttctctctttctgcttggcccaactgtgcctgagggctgatggatccagaccttgtaaacattcagctaggtgtaacataaccagaaaggctgaaggaaggctcttggccttcccagcttgagaagtaggggcctcatgtgtatctggtggcctgcagagcccaaagcagagagctatgatgaataaaatatttttattgcttttctaaaataactcctttcatatacaaggattccttcagttaggtcatctattatcctaaatgctctctggtcatgagcaggtgaggttctatttagccaagataagtggctgcctcagagtttctcatagggaaaactgaaatctgattattttcttttcttcacatagtctctaggttgagaactccaagtagtaagaggcacaggataaggatgggagagactgagcatttttgagagaatactcctctgctgaatgccactttgaagggaaagaagtcgaatggccatttccagtccattttgggttggccccttggaggctgtggcttctgggtaatgtccacaaagttcacaagagttgtcaaagatacttctgtaacttgctgagaatcctgtatagactggcactggtataggaatcgaactcctgatacatgagcttgcgggttggacaggagacctacatatgcccacaatacctggatctccagggaaactggtatgagacagcaggaagtacagtttatagctgaaatgctgcagtgcctgttgaggatcctggtccaccctcctttctgggctgggtcagcattaccaaagatggcaacatactctggtctgggccttccatgaagagtctgataaatctcctgctgcaagtggctgcagtctgccttcttcaacctgagcttgcatccagatattgcattcactccaaactgcacttcatgtcttttaacagagcaacttccattaccctggctctgtaagagggtcattgagtaacttatatcatcagtcagagccaagagtggcttcccaactatatagccaggattcccacttctaggactggtgagagaagcagctgtgctctgttgaaaagccctgaagcgaaggatgaagtgttgctgtaaggaagcgcctggctcaacagtcaggttggtttgtcccaaactgacagaaactttctggattccaaaagtcccattggtctctatctcataggtgacctgagaaactacattctgacaagtgtttccagccaacagaggagcattagcctgtgaggtaagtattacaggaacctggaactccatattctgtggatcagtcatgcttcttggaacctttaagactgtgaagttatagtaagaggcagcattgagggctgaatccaaggtacagctactagccaggttcttgaaaaaacgagtgcaagttgtacttttactctctaggaaacctgcaggattgctttcagcacagagtcccccagctccaactcctgcaggttgtctcagcaagcttattacagaccacttggggaagtaagtaagaatggggtccccagccctgtaaaaagatggtggtgattgtgtttggaatgttgaagtgaatgattcgcctccaaactctgcagccagggcctggaagttggttgcattgaccttttgaagcttctggaaatagtttaagtttgagttgttcacatggacacaaaactgcctgattccattagaatccatgaaaactcttgaaggaaacggggaattactcctgaagataacagagttgtctacacaaacccagcttgaagaccttacgctgcctggaaggcagaaggagaaaactgtcctcggatggagaagatagcagtccctgtcgcagcagcaatttatatcgcaggctccaggagtcaagtcacagacacagatcggtaagactgggaagaggtccacagtcctattcccaggggccgagggagccacgagagtagggaccactgtagggagtccaggcacggccgggcgagttgcagtcgcctctgaaggggactggagggttccgccatccgtccctcgctgcagctccaaagacgtgggcactgcccctgatggggaggaagagggctgaggccgccacgccatcggggaacaccagaaagaacacttgcaggagcgcgagctgtggggtgcgcatggggcattcagggcctccgggtcccccc

SEQ ID NO: 65269 - DNA, 4332 bp, Homo sapiens
aaatggcgaagatcgccaagactcacgaagatattgaagcacagattcgagaaattcaaggcaagaaggcagctcttgatgaagctcaaggagtgggcctcgattctacaggttattatgaccaggaaatttatggtggaagtgacagcagatttgctggatacgtgacatcaattgctgcaactgaacttgaagatgatgacgatgactattcatcatctacgagtttgcttggtcagaagaagccaggatatcatgcccctgtggcattgcttaatgatataccacagtcaacagaacagtatgatccatttgctgagcacagacctccaaagattgcagaccgggaagatgaatacaaaaagcataggcggaccatgataatttccccagagcgtcttgatccttttgcagatggagggaaaacccctgatcctaaaatgaatgctaggacttacatggatgtaatgcgagaacaacacttgactaaagaagaacgagaaattaggcaacagctagcagaaaaagctaaagctggagaactaaaagtcgtcaatggagcagcagcgtcccagcctccatcaaaacgaaaacggcgttgggatcaaacagctgatcagactcctggtgccactcccaaaaaactatcaagttgggatcaggcagagacccctgggcatactccttccttaagatgggatgagacaccaggtcgtgcaaagggaagcgagactcctgggagcaaccccaggctcaaaaatatgggatcctacaacctagccacacaaccagcggggagcttgctactcctgggacgaggtgatacaccagggccatgccgacaccagggccatgggaggcgcaacttccagttgcttcgttaaaaacagatggggattgaaacccccaaaacagagagagatactcctgggcatggaagtggatgggctgagactcctcgaacagatcgaggtggagattctattggtgaaacaccgactcctggagccagtaaaagaaaatcacggtgggatgaaacaccagctagtcagatgggtggaagcactccagttctgacccctggaaagacaccaattggcacaccagccatgaacatggctacccctactccaggtcacataatgagtatgactcctgaacagcttcaggcttggcggtgggaaagagaaattgatgagagaaatcgcccactttctgatgaggaattagatgctatgttcccagaaggatataaggtacttcctcctccagctggttatgttcctattcgaactccagctcgaaagctgacagctactccaacacctttgggtggtatgactggtttccacatgcaaactgaagatcgaactatgaaaagtgttaatgaccagccatctggaaatcttccatttttaaaacctgatgatattcaatactttgataaactattggttgatgttgatgaatcaacacttagtaccagaagagcaaaaagagagaaaaataatgaagttgcttttaaaaattaagaatggaacaccaccaatgagaaaggctgcattgcgtcagattactgataaagctcgtgaatttggagctggtcctttgtttaatcagattcttcctctgctgatgtctcctacacttgaggatcaagagcgtcatttacttgtgaaagttattgataggatactgtacaaacttgatgacttagttcgtccatatgtgcataagatcctcgtggtcattgaaccgctattgattgatgaagattactatgctagagtggaaggccgagagatcatttctaatttggcaaaggctgctggtctggctactatgatctctaccatgagacctgatatagataacatggatgagtatgtccgtaacacaacagctagagcttttgctgttgtagcctctgccctgggcattccttctttattgcccttcttaaaagctgtgtgcaaaagcaagaagtcctggcaagcgagacacactggtattaagattgtacaacagatagctattcttatgggctgtgccatcttgccacatcttagaagtttagttgaaatcattgaacatggtcttgtggatgagcagcagaaagttcggaccatcagtgctttggccattgctgccttggctgaagcagcaactccttatggtatcgaatcttttgattctgtgttaaagcctttatggaagggtatccgccaacacagaggaaagggtttggctgctttcttgaaggctattgggtatcttattcctcttatggatgcagaatatgccaactactatactagagaagtgatgttaatccttattcgagaattccagtctcctgatgaggaaatgaaaaaaattgtgctgaaggtggtaaaacagtgttgtgggacagatggtgtagaagcaaactacattaaaacagagattcttcctcccttttttaaacacttctggcagcacaggatggctttggatagaagaaattaccgacagttagttgatactactgtggagttggcaaacaaagtaggtgcagcagaaattatatccaggattgtggatgatctgaaagatgaagccgaacagtacagaaaaatggtgatggagacaattgagaaaattatgggcaatttgggagcagcagatattgatcataaacttgaagaacaactgattgatggtattctttatgctttccaagaacagactacagaggactcagtaatgttgaacggctttggcacagtggttaatgctcttggcaaacgagtcaaaccatacttgcctcagatctgtggtacagttttgtggcgtttaaataacaaatctgctaaagttaggcaacaggcagctgacttgatttctcgaactgctgttgtcatgaagacttgtcaagaggaaaaattgatgggacacttgggtgttgtattgtatgagtatttgggtgaagagtaccctgaagtattgggcagcattcttggagcactgaaggccattgtaaatgtcataggtatgcataagatgactccaccaattaaagatctgctgcctagactcacccccatcttaaagaacagacatgaaaaagtacaagagaattgtattgatcttgttggtcgtattgctgacaggggagctgaatatgtatctgcaagagagtggatgaggatttgctttgagcttttagagctcttaaaagcccacaaaaaggctattcgtagagccacagtcaacacatttggttatattgcaaaggccattggccctcatgatgtattggctacacttctgaacaacctcaaagttcaagaaaggcagaacagagtttgtaccactgtagcaatagctattgttgcagaaacatgttcaccctttacagtactccctgccttaatgaatgaatacagagttcctgaactgaatgttcaaaatggagtgttaaaatcgctttccttcttgtttgaatatattggtgaaatgggaaaagactacatttatgccgtaacaccgttacttgaagatgctttaatggatagagaccttgtacacagacagacggctagtgcagtggtacagcacatgtcacttggggtttatggatttggttgtgaagattcgctgaatcacttgttgaactatgtatggcccaatgtgtttgagacatctcctcatgtaattcaggcagttatgggagccctagagggcctgagagttgctattggaccatgtagaatgttgcaatattgtttacagggtctgtttcacccagcccggaaagtcagagatgtatattggaaaatttacaactccatctacattggttcccaggacgctctcatagcacattacccaagaatctacaacgatgataagaacacctatattcgttatgaacttgactatatcttataattttattgtttattttgtgtttaatgcacagctacttcacaccttaaacttgctttgatttggtgatgtaaacttttaaacattgcagatcagtgtagaactggtcatagaggaagagctagaaatccagtagcatgatttttaaataacctgtctttgtttttgatgttaaacagtaaatgccagtagtgaccaagaacacagtgattatatacactatactggagggatttcatttttaattcatctttatgaagatttagaactcattccttgtgtttaaagggaatgtttaattgagaaataaacatttgtgtacaaaaaaaaaaaaaagggggggccttttaaaagaatccttggggggcccaattttaagggggattggaaaagtaaattttt

SEQ ID NO: 65270 - DNA, 2490 bp, Homo sapiens
tacggctgcgagaagacgacagaagggggacactcatacaatgcacttccacaacacaatggatcagaggatacaaatcactcactttgtctaagtgacttgagccttctgtccacagattctgaattgcgagaaaattccagtacgacccagggccaggacctcagcacaatttcaccagcaatcatctttgaatcaatgttccagaattcagatgatacggcaattcaggaagatcctcaacagacagcttccttgactgaaagttttaatggtgatgcagagtcagtcagtgatgttccgccatccacaggaaattcagcatctttatctcttccacttgtactgcaacctggcctctccgagccaccccagcctctactacctgcctcagctccgtctgctcctccgcctgctccctccctaggacctggctcccagcaagctgcatttggcaacccccctgctctcttacaacctccagaagtgcctgttccccacagcacacagtttgctgctaatcatcaagagtttcttccgcacccccaggcaccgcagcccattgtaccaggactttctgttgttgctggggcttctgcatcagcagcggcagtggcatcagctgtggcagcaccagccccaccacaaagtactactgagcccctgccagccatggtccagactctgcccctgggtgccaactctgtcctaactaataatcccacaataaccatcaccccaactcccaacacagctatcctgcagtccagcctagtcatgggagaacagaacttacaatggatattaaatggtgccaccagttctccacaaaaccaagaacaaattcagcaagcatctaaagttgagaaggtgttttttaccactgcagtaccagtagccagtagcccagggagctctgtccagcagattggcctcagtgttcctgtgatcatcatcaaacaagaagaggcatgtcagtgtcagtgtgcatgccgggactctgcaaaggagcgggcatccagcaggagaaagggctgctcctccccaccccctccagagccgagcccccaggctcctgatgggcccagcctgcagctcccagcgcagactttctcttcagcccctggttcccgggtcatcatcctctaccttgccctcctcctgtgagcaaagccgacaagcagagactccttcagaccctcagacagaaacattaagtgccatggatgtgtcagagtttctatccctccagagcctggacaccccgtccaatctgattcccattgaagcactactgcagggggaggaggagatgggcctcaccagcagcttctccaagtgaagggcccatgtgtgctcacctctgggaaaagcgggtgagcaggaggcatgaggtacaatgcctgccatcatgggtcagaaatttgaaggatgaagaaatctactgtttgaaatcctcacctttcagacgtattttctttattcacatcccaggagcatccattttaaggaactattctttggaaaaaaccgaaaaacataaaaaacaacaaaaaaagctaagttataagtgaactgtttggctgcactgtatgtcacttttgcttgttgtcatgtgaacttggaaactaaggttactcgtgtgcataaaaattctaaatgaaagggtgtggtttccatcaatctgatgctgcccatcgcttgcactggggtctttgtggatcgggcaggagttttcagtgtgttgggtgttgctccttcctatgtgtcttttgaatctgaggctgacatttgcttggaaggccagacccttgctccatcagagagggcagtggcaaaggccagtgaggcagctgtgagttggacagggttccaggtggagatggtgttgtcatttgtgcttactgttggtggtgctcagggtggataacacgggtcgttctggcagcccgcttcagcacaaataggcagcttaaggcctggctcacaaggctgtggggttaaatctggctctgcagaggccctaggccagcttgttgaactgctgtctggttgaatgaacgtgtgtgcaaagcaaggctcttagcaaacatgatcactgtccttgccttcctggttctttctctcggttggttgccagggcttgcagatcgcagtgaattttccttggggaacatcgctgttttgtcctagagtgaacttgtggcttatggccagtgctgtttggtggtctgccttctttttaatggtattttcttcctcagagcagaagggctgcattttgcttatcagaagaaggtgcagatttaagggaattcatatgaggtggcatgtaattggcaggccaggtgtcctggttccaggttccagccaggctttgggttgccccctccatctctgcccccctctggattttgcatacagcctcatacagtgcaaacaaggatgtgacttgctcagcttagtcatgtgatttatttaaaaaaaaaa

SEQ ID NO: 65271 - DNA, 835 bp, Homo sapiens
  misc_feature (1)...(835): n = a,t,c or g
ttttttttttttaactggaaagtataccaatttcactttattagcctaatttaggaataggatgaggagagcggggttgaggtcaggcatgaaggaagagggtaaaaacttgtgatggttaagatcccttcagaactctggtgcagtcctcaatcactgcagctttactgtcagtcagtggagctgcaatccaaaagacggaaaatcgactcctgttttccatttctgtgtccagtgactcttcagttacagtgtgatgaggtctaccaggttgcctttaggaggagtcatgctgtcaggaaagaaatttactaaggtgtcaaagagctgagttctttgagcataggtgtgatccacatcagaaaagcccagagctgtaaaatctgaaccagatttgaatagagctgatgccaggagctgaaactcttttgtctcttctgggtctgaatgatccacagttatataaagatcattttgtaaatatttcagagcactaaggggatccacttgggccttttcttcaaacctgtgttttcttatgaggtacttgcaatgcctcagtaaataatcttttgaaggtctacacaacttcagtgaccagaagtcatctaatctcatctttggagagcaagattttcctggattcccaccaaataagtaatgaaccttgtgtagctcatcgtatacaagctgatgggcaaaccttggacatggttcttcttcctgaagacttttagttggattatcctttgcagcttgatcantcttatagacacaagacctgcaagacattgcaactatncctcacaatgtcataaatccagaatgaatttct

SEQ ID NO: 65272 - DNA, 1398 bp, Homo sapiens
ggcacgaggagctggcacaggctgcactgcgcaggcacaagggcatgctgggtaagcgatacattgaactcttccggagcactgcagccgaagtgcagcaggtcttgaaccgctatgcatccggcccactccttcctacactgactgccccactgctgcccatccccttcccactggcacctgggactgggagggactgtgtacgcctccgaggcctgccctacacggccaccattgaagacatcctgagctttctgggggaggcagcagctgacattcggccccacggtgtacacatggtgctcaaccagcagggccggccatcgggcgatgccttcattcagatgacatcagcagagcgagccctagctgctgctcagcgttgccataagaaggtgatgaaggagcgctacgtggaggtggtcccctgttccacagaggagatgagccgagtgctgatggggggcaccttgggccgcagtggcatgtcccctccaccctgcaagctgccctgcctctcaccacctacctacaccaccttccaagccaccccaacgctcattcccacggagacggcagctctatacccctcttcagcactgctcccagctgccagggtgcctgctgcccccacccctgttgcctactatccagggccagccactcaactctacctgaactacacagcctactacccaagtgttgtcccagtcaggagccttggtccgcatgcagggtgtcccatacacggctggtatgaaggatctgctcagcgtcttccaggcctaccagctacccgctgatgactacaccagtctgatgcctgttggtgacccacctcgcactgtgttacaagcccccaaggaatgggtgtgtttgtaggagagaaagccaggaggtaagagccagctgatatcctcggcgaacatgtctctcctgagtccagaagaccagcaccctcaacctggtagcttctttctggcttgtcaaagctctcagaaggtacctagaggagcccaagccccagctccatcctccacttattctgcctgtttcccccaaagacaatggctggaccctgcatgcagggctgggggtggaatggggctaaccagctcctgatggcctgagccaggcatcttgactggcacctggagagcccttaagtctgtcctggctgtggcccatgccgacagatatcgtggggctgacaggtccacggcaggcttgctttcttttataaaatggaagctctggtaccttcaatgtatgactcctgggagaatcaagggtccatctgagcctctgagtaaagatcccaatgttctacctctccctgtccctcttgtaggggatagggaggcagagagagccagcccctaccctcagagtatctgg

SEQ ID NO: 65273 - DNA, 1760 bp, Homo sapiens
attcggcgcgaggcagcgtttatgcagatacccatttgtttggaggttttttttaaatggattgtggatcttattgaggaacgagccatctattttgatggagactttggtcagattgctcgatatggtgagattccagctgaattaagggcggcggccactgaccaccggcaggagctaattgaatgtgttgccaattcagatgaacagcttggggagatgtttctggaagaaaaaaatcccctcgatttctgatttaaagctagcaattcgaagagctactctgaaaagatcatttactcctgtatttttgggaagcgccttgaagaacaaaggagttcagcctcttttagatgctgttttagaatacctcccaaatccatctgaagtccagaactatgctattctcaataaagaggatgactcaaaagagaaaaccaaaatcctaatgaactccagtagagacaattcccacccatttgtaggcctggcttttaaactggaggtaggtcgatttggacaattaacttatgttcgcagttatcagggagagctaaagaagggtgacaccatctataacacaaggacaagaaagaaagtacggttgcaacggctggctcgcatgcatgccgacatgatggaggatgttgaggaagtatatgccggagacatctgtgcattgtttggcattgactgtgctagtggagacacattcacagacaaagccaacagcggcctttctatggagtcaattcatgttcctgatcctgtcatttcaatagcaatgaagccttctaacaagaacgatctggaaaaattttcaaaaggtattggcaggtttacaagagaagatcccacatttaaagtatactttgacactgagaacaaagagacagttatatctggaatgggagaattacacctggaaatctatgctcagaggctggaaagagagtatggctgtccttgtatcacaggaaagccaaaagttgcctttcgagagaccattactgcccctgtcccgtttgactttacacataaaaaacaatcaggtggtgcaggccagtatggaaaagtaataggtgtcctggagcctctggacccagagggactacactaaattggaattttcagatgaaacattcggatcaaatatttccaaagcagtttgtgcctgctgtagaaaaggggtttttagatgcctgcgagaagggccctctttctggtcacaagctctctgggctccggtttgtcctgcaagatggagcacaccacatggttgattctaatgaaatctctttcatccgagcaggagaaggtgctcttaaacaagccttggcaaatgcaacattatgtattctttgaacctattatggctgtggaagttgtagctccaaatgaatttcaggggacaagtaattggcaggaattaaccgacgccatggggtaatcactgggcaagatggagttgaggactattttacactgtatgcagatgtaagtagtcttggtcattggcagtcctgcttttattaaccatagaaggaaatccaggttagcttttgtttttgcaaatggacacatttccttgctgaatttgtggctttatacatgtggcattttctgtaatttgctattaaagcaactcttaagtgcagaagttaaaaataagatttattttatcttgaccttttgtgaatgtgtcattttcttagatgtatattatctctctttcttgaataagcacagatggacaaatt

SEQ ID NO: 65274 - DNA, 2580 bp, Homo sapiens
ggcacgagctgtgttccgacatctacctaaagttctatgaacctcaagatagagatgatctctatttttacattgccacatacctagagcaccatgtggcggagcacactgctgagagctacatgctgcagtggcagcgtggacacctttccaactatcagtacctccttcacctcaacaacctggccgaccgcagctgcaacgacctctcccagtaccctgtgtttccatggataatacatgattattccagctcagaactagatttgtcaaatccaggaaccttccgggatctcagtaagccagtaggggccctaaataaggaacggctggagagactactgacacgctaccaggaaatgcctgaaccaaagttcatgtatgggagtcacctactcttccccgggttatgtacttttttatcttgttaggattgcacccagagtatatgctgtgcctgcagaatggaagatttgataatgcagatagaatgttcaacagtattgcagaaacttggaaaaactgtctggatggtgcaacggattttaaagagttaattccagaattctatggtgatgatgtgagctttctagtcaatagcctgaagttggatttgggaaagagacaaggaggacagatggttgacgatgtggagcttcccccttgggcttccagtcccgaggactttctccagaagagcaaagatgcattggaaagcaattatgtgtctgaacaccttcacgagtggattgatctaatatttggctacaaacaaaaagggagtgatgcagttggggcccataatgtatttcatcccctgacctatgaaggaggtgtagacttgaacagcatccaggatcctgatgagaaggtagccatgcttacgcaaatcttggaatttgggcagacaccaaaacaactatttgtgacaccacatcctcgaaggatcaccccaaagtttaaaagtttgtcccagacctccagttataatgcttctatggcagattccccaggtgaagagtcttttgaagacctgaccgaagaaagcaaaacactggcctggaataacatcaccaaactgcagttacacgagcactataaaatccacaaagaagcagttactggaatcacggtctctcgcaatggatcttcagtattcacaacatcccaagattccaccttgaagatgttttctaaagaatcaaaaatgctacaaagaagtatatcattttcaaatatggctttatcgtcttgtttacttttaccaggagatgccactgtcataacttcttcatgggataataatgtctatttttattccatagcatttggaagacgccaggacacgttaatgggacatgatgatgctgttagtaagatctgttggcatgacaacaggctatattctgcatcgtgggactctacagtgaaggtgtggtctggtgttcctgcagagatgccaggcaccaaaagacaccactttgacttgctggccgagctggaacatgatgtcagtgtagatacaatcagtttaaatgctgcaagcacactgttagtttccggcaccaaagaaggcacagtgaatatttgggacctcacaacggccaccttaatgcaccagattccatgccattcagggattgtatgtgacactgcttttagcccagatagtcgccatgtcctcagcacaggaacagatggctgtcttaatgtcattgatgtgcagacaggaatgctcatctcctccatgacatcagatgagccccagaggtgctttgtctgggatggaaattccgttttatctggcagtcagtctggtgaactgctcgtttgggacctccttggagcaaaaatcagtgagagaatacagggccacacaggtgctgtgacatgtatatggatgaatgaacagtgtagcagtatcatcacaggaggggaagacagacaaattatattctggaaattgcagtattaagtgccttttcctctcctgaatattaaattgaactctatttaatgcatttttaaaccaaacttttaaacggactggtgaatgtgcaatgttagtaattagaagttttaccacatggaaaatttgtggttttaaactttctaaatcatggtgacttcattgaaagccattagttgctattctcttagggcagataaaatgcggctgtgttaggaaaaacatgttacactgtaaggcagatgatcgtccccgtatgatgattgtcagaagacaggactaagtagcagagaatagctaagagataaattgggctggggaaacttgtcagaaagcactgaacaattaagaaattttccaagaaaatgtgcagtattctctgctacttctgaatctgttttgtcttcctaatctatcacaattgccacccatcgggttttgggtgtgtgttttcatagcgtggttactttctataatgctgtacccagattctaagaacctggagaaggattagcagttcttagtaagtttactgtgtataggaacggtttgtatttcattacagctattcatcttttctacattaaaaatatttttctctaaaaaaaaaa

SEQ ID NO: 65275 - DNA, 2825 bp, Homo sapiens
caagtggctgcgggacactgctgccagacctgcccccaggagcgcagcagttcggagcggcagccgagcggcctgtccttcgagtatccgcgggacccggagcatcgcagttatagcgaccgcggggagccaggagctgaggagcgggcccgtggtgacggccacacggacttcgtggcgctgctgacagggccgaggtcgcaggcggtggcacgagcccgagcctcgctgctgcgctctagcctccgcttctctatctcctacaggcggctggaccgccctaccaggatccgcttctcagaccccaatggcagtgtcctgtttgagcaccctgcagcccccacccaagatggcctggtctgtggggtgtggcgggcagtgcctcggttgtctctgcggctccttagggcagaacagctgcatgtggcacttgtgacactcactcacccttcaggggaggtctgggggcctctcatccggcaccgggccctggctgcagagaccttcagtgccatcctgactctagaaggccccccacagcagggcgtagggggcatcaccctgctcactctcagtgacacagaggactccttgcattttttgctgctcttccgagggctgctggaacccaggagtgggggactaacccaggttcccttgaggctccagattctacaccaggggcagctactgcgagaacttcaggccaatgtctcagcccaggaaccaggctttgctgaggtgctgcccaacctgacagtccaggagatggactggctggtgctgggggagctgcagatggccctggagtgggcaggcaggccagggctgcgcatcagtggacacattgctgccaggaagagctggcgacgtcctgcaaagtgtcctttgtggggctgatgccctgatcccagtccagacgggtgctgccggctcagccagcctcacgctgctaggaaatggctccctgatctatcaggccgtgggtatctgccctgggctgggtgcccgaggggctcatatgctgctgcagaatgagctcttcctgaatgtgggcaccaaggacttcccagacggagagcttcgggggcacgtggctgccctgccctactgtgggcatagcgcccgccatgacacgctgcccgtgcccctagcaggagccctggtgctaccccctgtgaagagccaagcagcagggcacgcctggctttccttggatacccactgtcacctgcactatgaagtgctgctggctgggcttggtggctcagaacaaggcactgtcactgcccacctccttgggcctcctggaacgccagggcctcggcggctgctgaagggattctatggctcaaaggcccagggtgtggtgaaggacctggagccggaactgctgcggcacctggcaaaaggcatggcctccctgctgatcaccaccaagggtagccccagaggggagctccgagggcaggtgcacatagccaaccaatgtgaggttggcggactgcgcctggaggcggccggggccgagggggtgcgggcgctgggggctccggatacagcctctgctgcgccgcctgtggtgcctggtctcccggccctagcgcccgccaaacctggtggtcctgggcggccccgagaccccaacacatgcttcttcgaggggcagcagcgcccccacggggctcgctgggcgcccaactacgacccgctctgctcactctgcacctgccagagacgaacggtgatctgtgacccggtggtgtgcccaccgcccagctgcccacacccggtgcaggctcccgaccagtgctgccctgtttgccctgagaaacaagatgtcagagacttgccagggctgccaaggagccgggacccaggagagggctgctattttgatggtgaccggagctggcgggcagcgggtacgcggtggcaccccgttgtgcccccctttggcttaattaagtgtgctgtctgcacctgcaaggggggcactggagaggtgcactgtgagaaggtgcagtgtccccggctggcctgtgcccagcctgtgcgtgtcaaccccaccgactgctgcaaacagtgtccagtggggtcgggggcccacccccagctgggggaccccatgcaggctgatgggccccggggctgccgttttgctgggcagtggttcccagagagtcagagctggcacccctcagtgcccccttttggagagatgagctgtatcacctgcagatgtggggcaggggtgcctcactgtgagcgggatgactgttcactgccactgtcctgtggctcggggaaggagagtcgatgctgttcccgctgcacggcccaccggcggccagccccagagaccagaactgatccagagctggagaaagaagccgaaggctcttagggagcagccagagggccaagtgaccaagaggatggggcctgagctggggaaggggtggcatcgaggaccttcttgcattctcctgtgggaagcccagtgcctttgctcctctgtcctgcctctactcccacccccactacctctgggaaccacagctccacaagggggagaggcagctgggccagaccgaggtcacagccactccaagtcctgccctgccaccctcggcctctgtcctggaagccccacccctttcctcctgtacataatgtcactggcttgttgggatttttaatttatcttcactcagcaccaagggcccccgacactccactcctgctgcccctgagctgagcagagtcattattggagagttttgtatttattaaaacatttctttttcagtcaaaaaaaaaaa

SEQ ID NO: 65276 - DNA, 1504 bp, Homo sapiens
gcgggcgccccaaagcagtgcgggaacagctactggcgctgtccgcctgcgccccgttcaatgtgcgcttcaagaaggatcacgggctggtggggcgagtgttcgccttcgatgctactgcccgtcctccaggatacgagttcgagctgaagctcttcaccgaatacccctgtggttccggcaatgtgtacgccggcgtcctggcagtggctcgccagatgttccacgatgctctgcgggagccgggcaaggcactggcttcttcgggcttcaagtacctcgaatatgaacgccggcatggatcaggagaatggcggcagctgggcgagctgcttaccgacggcgtccgcagcttccgcgagccagctcccgcggaggccctgccccagcagtacccagagccggcccctgcggctctctgtggcccacccccgcgagccccatcccggaacctggcgcccacgccgcgccgtcgcaaggcatcccccgagccggagggcgaggcggctgggaagatgaccaccgaggagcagcagcaacggcactgggtggcacccggcggcccgtactccgctgagacccctggtgtgccctcgcccattgccgccctgaagaatgtggccgaagccctgggccactcacccaaggaccctggcggaggcggggggcctgtgcgtgcagggggcgccagccctgcagcctcctccacggcccagccgccaacccagcatcgccttgtggcccgcaacggcgaagcagaagtcagtcccacagcgggggccgaagctgtcagcgggggtggcagcggcactggggcgacccctggggcccccctgtgcttgtaccctgtgcagggagcggctagaagacacccacttcgtccaggtgccctccggtgcccgaacacaagttctgcttcccctgctcccggaagttcatcaaggcgcagggcccggccggggaaggtgtactgcccgagcggagacaagtgcccgctggtcggctcctccgtgccctgggccttcatgcagggcgagatcgccaccatccttgctggagacatcaaagttaagaaagaacgggacccctaggctaccactgcctccaggctactgccctctgcccctttgccacccaccgctgccgcggataaattattccctccccgacccagcccagtgccacctctatctgtgtacatactcccttcttccacccagatgggtcccctggggtagatgcattgtgggtggggggagaaagcttgtggctcctgtccgagggggtgtttggggtcccttggcccctccagtttccctctgtcctccttggcttggctttgctgctgcttgtagttgggggagaggtgcccccctcctccttgagaagggacctcctgaaaactcgctctttataaacgaggcaaaagcatttaattcccacccccccaccccccgctcccttctgctccttcaataaaccgaaagatgggtttttttttttc

SEQ ID NO: 65277 - DNA, 1333 bp, Homo sapiens
gccaggccggcaccaggcacagacacttatgcccttgttgggagaacagagagaggctctcttgtccactgcctgtcttcggttccaactgctggttctcctagaggcctctcctcagactcgcagagctgcctgatcattgctacagaatgaactctagcccagctgggaccccaagtccacagccctccagggccaatgggaacatcaacctggggccttcagccaacccaaatgcccagcccacggacttcgacttcctcaaagtcatcggcaaagggaactacgggaaggtcctactggccaagcgcaagtctgatggggcgttctatgcagtgaaggtactacagaaaaagtccatcttaaagaagaaagagcagagccacatcatggcagagcgcagtgtgcttctgaagaacgtgcggcaccccttcctcgtgggcctgcgctactccttccagacacctgagaagctctacttcgtgctcgactatgtcaacgggggagagctcttcttccacctgcagcgggagcgccggttcctggagccccgggccaggttctacgctgctgaggtggccagcgccattggctacctgcactccctcaacatcatttacagggatctgaaaccagagaacattctcttggactgccagggacacgtggtgctgacggattttggcctctgcaaggaaggtgtagagcctgaagacaccacatccacattctgtggtacccctgagtacttggcacctgaagtgcttctggaaagagccttatgatcgagcagtggactggtggtgcttgggggcagtcctctacgagatgctccatggcctgccgcccttctacagccaagatgtatcccagatgtatgagaacattctgcaccagccgctacagatccccggaggccggacagtggccgcctgtgacctcctgcaaagccttctccacaaggaccagaggcagcggctgggctccaaagcagactttcttgagattaagaaccatgtattcttcagccccataaactgggatgacctgtaccacaagaggctaactccacccttcaacccaaatgtgacaggacctgctgacttgaagcattttgacccagagttcacccaggaagctgtgtccaagtccattggctgtacccctgacactgtggccagcagctctggggcctcaagtgcattcctgggattttcttatgcgccagaggatgatgacatcttggattgctagaagagaaggacctgtgaaactactgaggccagctggtattagtaaggaattaccttcagctgctaggaagagctgtatt

SEQ ID NO: 65278 - DNA, 1748 bp, Homo sapiens
  misc_feature (1)...(1748): n = a,t,c or g
gttagcaaaatacccatttattaagaaaaagttggtgtcctttgctaccaaaagggaagaaaaggggantaaaacaaatacgtagttactagcaacaaaataagacaaactaatcagaaatgctgtttattgacaagatagggtgtcacaaatacatcatttatagggagagaggggacatgaacaagtcccaaaatcttataccttctgcacagcaagcccagcaggggatgtcctctctagagatcggtttatccaagggtaccccatgagaagggcagctccttgantgcagctgccgggaagagcatcgcacaccggttccgtctcctggggtcttcccccagggtaatggtaaaagtctggccctggaaagtaaacgaacgtcccttgatgcggttcntttgcaagtcaaacctttggcaaaaaatagttcttggccttcaattgaggtttctcgaatggcaagcctcccagagctttctgcttttctttcgggctgatccgtagggaaggcttgcttgaagccacccggggaactttggccacttaaggaacatgggcacgacctttgtcccaggatagccccgtcaacccaagatggggctcgatgggccatgttggagaagatttaaggccttttcttgggattcccaagaatgaactgcgcaaaagccaagttcagcactgtttcagaggccaagtactgtaaccggtaattccctggagggggcnccaatagttttagngcgccncaccgtngacctcgagggggggcccgtacccaattcgccctgcaggagcatggcagcgcgatggtaggggaggaagatcgccagtacagttctgccacggacagtaggacactgatcaccatttctgtgttcttcagtttctgacaatgaaccaacaatttttgtaaaagcttatgtgcttctgacatttggttctgagattgtaatacaaccgctttcctataaaccaccctctatgctattgaggagctgtgaattccctgtaaccaagtgaatcaagccaaaatggatatttgccaatcatttcaattgctctgtcaaaactgtattttttgatcacataagcatccataactgggcgtgcttgactattaggcggaaatcggttccttcaaagtgctttaacacttcagaagctgcaggcaaaacagccctgctccgcgtgtaagctctgcgaggtggcagagtgcgacagcaaaggactctgtgttgttctgctgcacgccccgcattccaccgcctcccaggctgtttcatgctcagcaacatctgggcctgttgcagtgccatggtgctgcgggccatacagcctccagatggccgtttttctgtgcgatgctgatatcgatgagctctgacaggctgtgtttccagtgcaggaggtcggagtcctttagggcatccatcagcttgtttgccgtcttcccagcaaaagctctcggtaacccaaaatgtactgccttcttcacagaatgctccagcagaacatagctatcggatctcttctgccccagcacataaagccagctcaaacagtgctggagacacacgtgatcgttggactcctgggcaatcctaattgcctcctgcagggcgagctctgcctgttgatagtgaccgaagcggcagtgcagggcggcaagattcagagcggcgtatctcaagctccggccatagccctcttccccattacttttgcttcggacgcgtggg

SEQ ID NO: 65279 - DNA, 3029 bp, Homo sapiens
ggcacgaggattcgaggagtagtgctattttttattggagtatttcttgcattagtgttaaatttacttcagattcagagaaatgtgacgctctttccacctgatgtgattgcaagcatcttttcttctgcatggtgggtacccccatgctgtggcacggcttctgctgtgattgggttattatacccctgcattgacagacatctaggagaaccacataaatttaaaagagagtggtccagtgtaatgcggtgtgtagcagtctttgttggtataaatcatgccagtgctaaagtggatttcgataacaacatacagttgtctctcacactggctgcactatccattggactgtggtggacttttgatagatctagaagtggttttggccttggagtaggaattgccttcttggcaactgtggtcactcaactgctagtatataatggtgtttaccaatatacatctccagatttcctctatgttcgttcttggttaccatgtatattttttgctggaggcataacaatgggaaacattggtcggacaactggcaatgtacgaatgtaaagttatcgcagaaaaatctcatcaggaatgaagaaggcaaaaaatatcttttgtacagaaaagcaagatgaaaaggatgtgaaatggtagatataccaacaaaacttcagactgtaaaattgccaggatgcagttttccccttgattggcgtgtgtgtatatatggaataaatatatatatacacacacacatattactgcaatctgtgattgcttcatctgtaaatcagttgtaaacctttacatatttgacttaaataactgtaagatatatatgtactacattaaaaagtgttgattaatagatgaaatttttaaattaattttttaaaacatgccatacattgtatcacaatgttaatgtgccaagatattgttcctgtcatgcagagtataagaatgctttgaacaatttgtagacttagtgaaataaaataagaggaaagccaaaaacaaacaaacaaaaagcatatggggagctggtattttctctttagcttactgttgtgcctttttatttttctaatcacagcagtatgagttatgagtgccctaatttgtggttagtttctaatttaatgttgtttcatagagtttggagtgttttgatacagggtgaaaatgaacttctggtttcaaacctgcgttactggagacagcccaaagagtaattttctgttttgacaggttttactggaagtatatgtgatgagcagaagaggttatcagcattaaattgttttggttctaaatttggaacagtatatataattaaaagtaaggaacattagaggatttaattagaataaatacatgttttggaaatacagtgacctcttgcagtgtcacaaaagtgcaaagtgatattagctgtcatctgcaatacagaatctcattgcttttgcacatggagcatataggaaactccaaacagatcacaatgagggtttctaaatctgttggggttctgtcttcttattggggttctgtgaaggcaaaccactgtaggctttagctggggttcagtcatatggacttcgttgggtggggatggcctagggtttttcatcttacatgcagtcttggggggtgggatgaatacataatttcttatgtattcgtgtatccattagtgaatagttcaagtctgtttaagagtgtattgagatggcattctctgcatgttaaagatcttaatggcaaccagcacctcttaagtatggtttaaacatattcttagctaattttttccattagtttttgaaattggtggcagttgtctgatccacaagggcaagatcttctgagtactctggggtgtgagtatgtgtgcacacgtgtgtgttggagtgagtgagagaatgtgtctgtgcatgtggccatgctttcctagaatgtcaagtagatatttttacactttgagttttaaagcaattactatcagactgagatcttgtatgccaaactttaatctgcttttatgttttcaggctgaaggtgtgaaaatcctaagaggatttcatattgaatatgtgtacacaatcttaactatcgtggtggaaaacatactactataatttattattatatcttccagataatgttattcatttagaacaaataaggtatattttttagaatcaactttgtaagcactataaaatctttaataagttataaggtctatgatgtgtttactttaaaaattgctgttaaaagcaacacgtattaaatatgtaattatcatctgggttaagagtctgtttttcttctttgtggtaagtcttagaatatggtactgtggattaatctaatgaaattaacatatgtggttgaagttaccaagaaacgatgaaaagaaactaaatatagttgacccttgaacaacaggagttaggggcaccactccccaacatagttgaaaatccatgtataacttttgactcctccaaaacttaactactaatagcctactcttgatgggaagccttaccaataagaaacagttgatgaacacatattgtgtatggtatatgtattatatactgttttcttacaatagtgtaagctaaggaaaagaaaatgtgtttactcttcattcagtggaagtggaccatcctaaaagtcttcactcatgctatcttcatgctgagtagtaggctgaggaggaggaggagggttggtcttgctgttgcgggggtggaagaagatgtgcattattagtgggcccacacagctgaaaaccatgctgttcaagggtcaactgtgtgtggtatcggtgagactgaatgattatcgttggtgttcttaaattattttcaggtcctctagaaaatatgataattatagcaaaaaatatgattgttttgaaattttgataaatatataaatgtatagaacctattgttttcaatgatagaaaatgggaaacattttttaacattgctagattggcagtg

SEQ ID NO: 65280 - DNA, 1217 bp, Homo sapiens
ttttttttttttctaaatgaagtgcttttaattttcagaccaaacatttttaatataaaaacattttgataatatacaaacagcaatcacaacagcatccacatggcagcaaggggaccagggcacagagagggggagcgggctggggagggacagttttcagggtcccagttgcttccctggcttgaaatcaccctggtcctagcagaggacaggttaaggctgccagaggcagagggtccctgaccctggcccggagacagactgcccaggcaggccctctgataccatcttccaaccatggcagcctccaggaaaagccagatccatttaggagataacaggaaggtggctgtgattgacaggaaaggcaacatggttcctcagcatcctgctgatcacacctctgggaggggctgctggattgaagaggacctaagaatcttcctgggagcaggacagaaatgggatctaagtctacctactaactaacattcccgcctgtgacaccagaaagctggagtgggtctgctcagatgtacaggaagagaaaggaatgacaaagcctttggctcagcaggactggagccttgacaggcactgaccaagaaagcctctaggtgggccagggaggtctgtgggaaagctttggatcaatggtactcaagggtgcacagtggcacagtggccttagttagaatttatgaagacgaaaagaacacaagtcagaatttagaactgaagtacctgcttcttataggcctgtagaggaaaagcgagatcatccttctggccaggactaggggagacccaaggcctgttctttcctaggggctgagtttgacagacctggattgcagctgatggcccccaaagtcctctagatgggccctgcaggactcgctgggaggcctggttgcccctcccggcgtgctgggacactctgggttcctgcagttagatgcagtccatggagttctcagggaggaggccagggatgcagccagggagccccaagcccttgataggagtgcagttgagtgggaggccgcagcccagggaggggtcctgggtctctatggcctccagcctgtccatgttgttgtcccagttgatatggaagcgggtcacccgggggttcgaggccaagatgttccgctggagctgggagaaatctggcttcatgggcgggttctcacgcagctcaggctcgtgcc

SEQ ID NO: 65281 - DNA, 1273 bp, Homo sapiens
tttttttttcatagttcatagtttattacaaatgcatattatccaactcagtagaaatccatgtaccccagaatgtacagaaggtatgcaatgttccagagtgtcattgtcagctctggttttatatatatattaaatatatacatattttgagacagggtctcgctgtcacccaggctggagtgcagtggcacaatctcagctcactgcaacctctgcctcccagcctcaagagatcctcccacctcatccttctgagtagctgggactacatgcgcatgccaccacacccagctattatttttatttctttttgtagagacaagggctcactatgtttctcaggctggtcttgaactcctggtctcaagtgatccttctgccttggcctcccaaagtgctggaattataggcatgagccactgagcctggcctgattatctgttttttgaatagtgaccctaatgtgcttttccagttccagtaacttttgataaaatttttcagcagtgtcttcatctaggtccatcttctgggtcataatataatttcttccaaagccagtggtggcactcagatatttgatcagaggattgagagattcaggcttttggtggaaaagccataccagagcttctgttccattatatggtgtcaaagtgaatgcatttgcaaaaaagcgaagtagcaatattgccggcatcaacagcgtccatataaacggaggcagaattccatatgtcaaattggtcaatgctgtacctggacaggccacattggaatagagaccctgctggttgaagttcctgttcaaagccacactcaaaaggtcagtggcatatttggaagagctgtagggttccttgcctttgctgtgctggaagtcctcgaggctgaaattagatttccttgcattgcgagatgatgtccagatgagctgagatggattgtcactgtgacagaggagaggctccagttcccgaatcaggataaaatggccaaagacattggtctcaaacacctcctgaagtccatcagcagtgatcttatcaccctgggtcagcaggccttcagcttgaaaagaggccaaagaaaagtgctttgatatttagttgtggattaggcatgatcccagcatttagatatatacagtctaatctctgaaacctttgcttaagttccttggaggcccggaagaccgactgcaggttgctgacatccacctggacaatggtgacctcagcagtggggtgagaggccagcagagcagcac

SEQ ID NO: 65282 - DNA, 346 bp, Homo sapiens
ggcacgaggctcctcaccttgggctggacggggttggcactaacggggaactttccccagaacatggccaagctccaggatgggggtgatgagggaaggaaggccagtgaggagaggagtgaggaagaggacagctgcgagtcaggtggtgagagcacttggaggggctgagaggacatgggctgggagtgaatgcatgtgcacatacacacacacacctctccagcatatgtacacatgcacacacacacctctccagcatatgtacacatgcacacacacctctccagcatatgtacacatgcacacacacacctctccagcatatgtacacatgcacacacac

SEQ ID NO: 65283 - DNA, 1118 bp, Homo sapiens
ggcacgaggacaagttccgcggactggagctcagcagacaatgtactagatggtgcctcgctcgtgcccaagggttcatccaaagtcaagaggcgagtccgcattcccaacaagcccaactacagccttaacctctggagcatcatgaagaactgcatcggccgggagctctccaggatccccatgccggtgaacttcaatgagcccctgtccatgctccagcggctgacagaggacctggagtaccaccacctgctggacaaggcagtgcactgcaccagctcagtggagcagatgtgcctggtggccgccttctctgtgtcctcctactccaccacagtgcaccgcatcgccaagcccttcaaccccatgctgggggagaccttcgagctggaccgcctcgacgacatgggcctgcgctccctctgtgagcaggtgagccaccaccccccctcagctgcgcactacgtgttctccaagcatggctggagcctctggcaggagatcaccatctccagcaagttccggggaaaatacatctccatcatgccgctaggtgccatccacttagaattccaggccagtgggaatcactacgtgtggaggaagagcacctcaactgttcacaacatcatcgtgggcaagctctgggatcgaccagtcaggggacatcgagattgtgaaccataagaccaatgaccggtgccagctgaagttcctgccctacagctacttctccaaagagggcagcccggaaggtgacaggggtggtgagtgacagccagggcaaggcccattacgtgctgtccggctcgtgggatgaacaaatggagtgctccaaggtcatgcatagcagtcccagcagccccagctctgacgggaagcagaagacagtgtaccagaccctgtcagccaagctgctgtggaagaagtacccgctgccggagaacgcggagaacatgtactacttctcagagctggccctgaccctcaacgagcacgaggagggcgtagcgccaaccgacagccgcctgcggcccgaccagcggctgatggagaagggccgttgggacgaggccaataccgagaagcagcggctggaggagaagcagcgcctg

SEQ ID NO: 65284 - DNA, 1769 bp, Homo sapiens
aagcagagatcagcacttaataggcattgcatggtccacacaggagagaaaccgtacagatgtgagcagtgtggaaaaggctttattggtaggctagatttttataagcatcaggtggtccacacaggagagaaaccatataattgtaaagaatgtgggaagagcttcagatggtcctcatgccttttgaaccatcagcgagtccacagtggagaaaaaagcttcaaatgtgaagaatgtgggaagggattttatacaaattcacaactgtcttcccatcagagatcccacagtggtgaaaagccatataaatgtgaggagtgtgggaagggctatgttactaagtttaatcttgacttgcaccagagggtccacacgggagagagaccttataattgtaaggaatgtggggaagaactttatccgggcctcaagtattttgaatcataagagactccactgccagaaaaaaccattcaaatgtgaggactgtggaaagaggcttgtacacaggacataccgtaaagaccagccgagagactatagtggggaaaacccatccaaatgtgaggattgtgggagacgctacaagaggcgcttgaatctggatatacttttatcattatttctaaatgacacataattgttcatatttatggggtacaacgtgctattttaatgtgtgcatacaatttatagtgatccaatcagtgtaattggtgtatctgttacctcaaacatttaccatttctttgtgttggaaaattcaaaatccatttgagaggagttggtagacagcaagggaagggtccctggagacccccagccaaaggggtcagtgtctcatccccacataacacaaaaagcagcctggggaagacaatcaagctacaggcactgataagggaactagcacaggggattgtgcctggagacatgcccatgcctgcacagatagaagaacctccagcccattcaggtaaaaactcgcacaaacctccggctcactcagttaagggaacaagaccagacacagaaatgcctttgtcctttgtataatcagcaggctccgaggaaaaagtttcttcttttgtgggcatgaacacagtgggcttcagtaggttcaggttggcactttcttttgtggaaaaggaaaagcccagcctctgtaaatcatcacttcaactcctgattggtcccgggccaagctgaatagcccttatgaatcatcacttcggttcctgattggtcccgggccaaggtcccagaccaagctgaatcacgctttctccaagacagcccgcaggctaagtgcattccttccccttcccagtccataaaaaccccggaccccagcctcaatactgggcaacttatttggatccccatctccactgtggagagcttttttctttcacttattaaacttttactccaatttcacccttgtgtctgtgcttcttaatcatattggacgtgagattaagaactccgggggatacatcacaagagagactgttacagtgtggtgcatttgtgagactacaacacatttttagcaatttgtaaataattgttgatgatagtcacctttagtgctgcagaacagtagaacttattcttcccctctacctcttttgtatctgttggccaacctttggccatctcacctacctcctacacttccctgcctgtctacatccacgtgttctactctctactacaaaatcaactttttttaacttgccctcgtgccaagattggcgtaa

SEQ ID NO: 65285 - DNA, 2773 bp, Homo sapiens
  misc_feature (1)...(2773): n = a,t,c or g
gcggccgcaagaaggccacaggcagccccgtgtccatcttcgtctatgatgtgaagcctggcgcggaagagcagacccaggtggccaaagctgccttcaagcgcttcaaaactctacggcaccccaacatcctggcttacatcgatggactggagacagaaaaatgcctccacgtcgtgacagaggctgtgaccccgttgggaatatacctcaaggcgagagtggaggctggtggcctgaaggagctggagatctcctgggggctacaccagatcgtgaaagccctcagcttcctggtcaacgactgcagcctcatccacaacaatgtctgcatggccgccgtgttcgtggaccgagctggcgagtggaagcttgggggcctggactacatgtattcggcccagggcaacggtgggggacctccccgcaaggggatccccgagcttgagcagtatgaccccccggagttggctgacagcagtggcagagtggtcagagagaagcggtcagcagacatgtggcgcttgggctgcctcatttgggaagtcttcaatgggcccctacctcgggcagcagccctacgcaaccctgggaagatccccaaaacgctggtgccccattactgtgagctggtgggagcaaaccccaaggtgcgtcccaacccagcccgcttcctgcagaactgccgggcacctggtggcttcatgagcaaccgctttgtagaaaccaacctcttcctggaggagattcagatcaaagagccagccgagaagcaaaaattcttccaggagctgagcaagagcctggacgcattccctgaggatttctgtcggcacaaggtgctgccccagctgctgaccgccttcgagttcggcaatgctggggccgttgtcctcacgcccctcttcaaggtgggcaagttcctgagcgctgaggagtatcagcagaagatcatccctgtggtggtcaagatgttctcatccactgaccgggccatgcgcatccgcctcctgcagcagatggagcagttcatccagtaccttgacgagccaacagtcaacacccagatcttcccccacgtcgtacatggcttcctggacaccaaccctgccatccgggagcagacggtcaagtccatgctgctcctggccccaaagctgaacgaggccaacctcaatgtggagctgatgaagcactttgcacggctacaggccaaggatgaacagggccccatccgctgcaacaccacagtctgcctgggcaaaatcggctcctacctcagtgctagcaccagacacagggtccttacctctgccttcagccgagccactagggacccgtttgcaccgtcccgggttgcgggtgtcctgggctttgctgccacccacaacctctactcaatgaacgactgtgcccagaagatcctgcctgtgctctgcggtctcactgtagatcctgagaaatccgtgcgagaccaggccttcaaggccattcggagcttcctgtccaaattggagtctgtgtcggaggacccgacccagctggaggaagtggagaaggatgtccatgcagcctccagccctggcatgggaggagccgcagctagctgggcaggctgggccgtgaccggggtctcctcactcacctccaagctgatccgttcgcacccaaccactgccccaacagaaaccaacattccccaaagacccacgcctgaaggagttcctgccccagcccccacccctgttcctgccacccctacaacctcaggccactgggagacgcaggaggaggacaaggacacagcagaggacagcagcactgctgacagatgggacgacgaagactggggcagcctggagcaggaggccgagtctgtgctggcccagcaggacgactggagcaccgggggccaagtgagccgtgctagtcaggtcagcaactccgaccacaaatcctccaaatccccagagtccgactggagcagctgggaagctgagggctcctgggaacagggctggcaggagccaagctcccaggagccacctcctgacggtacacggctggccagcgagtataactggggtggcccagagtccagcgacaagggcgaccccttcgctaccctgtctgcacgtcccagcacccagccgaggccagactcttggggtgaggacaactgggagggcctcgagactgacagtcgacaggtcaaggctgagctggcccggaagaagcgcgaggagcggcggcgggagatggaggccaaacgcgccgagaggaaggtggccaagggccccatgaagctgggagcccggaagctggactgaaccgtggcggtggcccttcccggctgcggagagcccgccccacagatgtatttattgtacaaaccatgtgagcccggccggcccagccaggccatctcacgtgtacataatcagagccacaataaattctatttcacaccccttgtgccgggctcagtctagcccctgggaggcggctggggtctggcgccgccctgcgcagcccgcgcccacgtcagacgtgaacatcaatttgcttcgaaagccaagggtaaagaggcacgatctgatttatcagtttctagggaaacaccctttgggagggaaggcaggcagcgcccgccggnaggacctttacaaccggcccgctaacctggggaggggggccggtagggcgcctcgggtctcaaggcgcctgggagggtctagcggccctgaaggtcccttggtccgagccacagtcg

SEQ ID NO: 65286 - DNA, 2108 bp, Homo sapiens
tttcgtcggttgcactcttcctatagcccagagggcgagagggcctgtggcctgggggaaggaggacgaggttctgcctggatcccagcagtaggacgctgtgccatttgggaacaaaggaatagtctgcctggaatccctgcagatcttggggccggaggccagtccaacccttggagcaggaagaaacgcaaagttgtcaagaaccaagtcgagctgcctcagagccggcccgcagtagctgcagactccgcccgcgacgtgtgcgcgcttctctgggccagagcgagcctgttttgtgctcgggttaagagatttgtcccagctataccatgggccgcactcgggaagctggctgcgtggccgctggtgtggttatcggggctggtgcctgctactgtgtatacagactggcttggggaagagacgagaacgagaaaatctgggacgaagacgaggagtctacggacacctcagagattggggttgagactgtgaaaggagctaaaactaacgctggggcagggtctggggccaaacttcagggtgattcagaggtcaagcctgaggtgagtttgggactcgaggattgtccgggtgtaaaagagaaggcccattcaggatcccacagcggaggtggtctagaggccaaggccaaggcccttttcaacacgctgaaggaacaggcaagtgcaaaggcaggcaaaggggctagggtgggtaccatctctgggaacaggacccttgcaccgagtttaccctgcccaggaggcaggggtggaggctgccaccccaccaggagtggatctagggccgggggcagggcaagtggaaaatccaagggaaaggcccgaagtaagagcaccagggctccagctacaacatggcctgtccggagaggcaagttcaactttccttataaaattgatgatattctgagtgctcccgacctccaaaaggtcctcaacatcctggagcgaacaaatgatccttttattcaagaagtagccttggtcactctgggtaacaatgcagcatattcatttaaccagaatgccatacgtgaattgggtggtgtcccaattattgcaaaactgataaaaacaaaagaccccataattagggaaaagacttacaatgcccttaataacttgagtgtgaacgcagaaaatcagggcaagattaagacgtacatcagtcaagtgtgtgatgacaccatggtctgtcgcttggactcagctgtgcagatggctgggctaagactgttaaccaacatgactgtgactaatcattaccaacatttgctttcctattcttttccagacttttttgctttgttattcctgggaaatcacttcaccaagatacagattatgaaactaattataaactttactgaaaatccagccatgacaagagagctggtcagttgtaaagtaccatcagaattgatttccctctttaataaagaatgggatagagagattcttcttaatatccttaccctatttgagaatataaatgacaacataaaaaatgaagggctcgcatcatccaggaaagaattcagcagaagttcactttttttcttattcaaagagtctggagtttgtgttaagaaaatcaaagcactagcaaatcacaatgatctggtggtgaaagtaaaagtcctgaaagtattaaccaaactctaatttggagtctgtcccaaacaatattgagatatttgcagttggtacgatgtgatttgtaaattctttgtttttcattgtgcgtatatggtaaagagatcttttcagctgctattttggaataatgactatcatatatcataacagtgactgatgttggttgtaatggttgggtttagggatgacccattttaaggatgcccaaatgaaatattaggatttgggacccagaaagaatttattgatttgatcttattacctagattgagattttttaatctttcctctacctaaactgacaatgaattggttatacatcatgcataagctacccttttatattagtttatatttgttattttaaaacttgtgtttcatcaataaagttgtgttttaagcagcagaaaaaaaaaaaaa

SEQ ID NO: 65287 - DNA, 1285 bp, Homo sapiens
ttttttaaactagtacacacttaggtgcaaacctcggtttattacgttctttggttaaatattgtttctacatcctttcagagcattaggagaacaaagataatatttgatagaaagactgaaaacacaatcctttgcttttcagagaaaagactgaatttacactggtactgttagaaattcttataattaggctagacgtctattttagagaaagttagggcttttgctgttgcttgtatgttttgaaaaatacattcccctggggctagccaacatcactgtcctgagacccagaccttcagggagtctcttgataaaggctgctccgcacatgggtcaggaaaagtcggggtcagctccatcatgtccgaggactgcatgggttcagtgttgcccatcactgcggcaacggcttctgcccaccatctctttctggaatacagacagattttgggtgaaacctgtctctgttcttgacggacaggttctgctccactccttccattaggtttctgaagcactgggcaaggacctcctgcttggggaggggctggctgtttatcaaacttgctctcagttcactgaaatacttctcattgagcaggatgagccccaggagaggcctggatactgaccactggttccgacagtcttcaaagacaatggtgttcatgaggacagacatcatctgctgcaggacatctgggttttgctgcataaaatgtaatagtctctgaccagcctgggtagcctctctgcatcgaagtggcttcttgccctcttttgctatgtgcttgaagaggtaggtgacgatgtagtctaaactggtacagcagctggaggagacaactgtatcaagagtagtgagtccctctgagatagatgtgagaacatacatgagtacaggaggctctaagttgatgatgaagctcatatggtcctgagtgagacattccaggagtggataataagactggctcagtttccggtattgtagcaagtcactgtgggacactgacagcagcattttgacaaaagcctggagtacattgtcaaaatggttgtccccatacaacttgaagacgccaaagctgacataatttccacacaaggcagacttgagagctgaatggcagatggagatgcccttgagtttcattggataaatctgatcttttgagaggctcacaagggacaggatctgattaccataagtgcaaaccattttactagcttctctgaagagaagaattcccccttctgtcgtcttctcgcagccgta

SEQ ID NO: 65288 - DNA, 2457 bp, Homo sapiens
agcggccgcagaccctgaagggacaccaggagaagattcggcagcggcagtccatcctgcctcctccccagggcccggcgcccatccccttccagcaccgcggcggggattccccggaggccaagaatcgcgtgggcccgcaggtgccactcagcgagccaggtttccgccgtcgggagtcgcaggaggagccgcgggccgtgctggctcagaagatagagaaggagacgcaaatcctcaactgcgccctggacgacatcgagtggtttgtggcccggctgcagaaggcagccgaggctttcaagcagctgaaccagcggaaaaaggggaagaagaagggcaagaaggcgccagcagagggcgtcctcacactgcgggcacggccccccctctgagggcgagttcatcgactgcttccagaaaatcaagctggcgattaacttgctggcaaagctgcagaagcacatccagaaccccagcgccgcggagctcgtgcacttcctcttcgggcctctggacctgatcgtcaacacctgcagtggcccagacatcgcacgctccgtctcctgcccactgctctcccgagatgccgtggacttcctgcgcggccacctggtccctaaggagatgtcgctgtgggagtcactgggagagagctggatgcggccccgttccgagtggccgcgggagccacaggtgcccctctacgtgcccaagttccacagcggctgggagcctcctgtggatgtgctgcaggaggccccctgggaggtggaggggctggcgtctgcccccatcgaggaggtgagtccagtgagccgacagtccataagaaactcccagaagcacagccccacttcagagcccacccccccgggggatgccctaccaccagtcagctccccacatactcacaggggctaccagccaacaccagccatggccaagtacgtcaagatcctgtatgacttcacagcccgaaatgccaacgagctatcggtgctcaaggatgaggtcctagaggtgctggaggacggccggcagtggtggaagctgcgcagccgcagcggccaggcggggtacgtgccctgcaacatcctaggcgaggcgcgaccggaggacgccggcgccccgttcgagcaggccggtcagaagtactggggccccgccagcccgacccacaagctacccccaagcttcccggggaacaaagacgagctcatgcagcacatggacgaggtcaacgacgagctcatccggaaaatcagcaacatcagggcgcagccacagaggcacttccgcgtggagcgcagccagcccgtgagccagccgctcacctacgagtcgggtccggacgaggtccgcgcctggctggaagccaaggccttcagcccgcggatcgtggagaacctgggcatcctgaccgggccgcagctcttctccctcaacaaggaggagctgaagaaagtgtgcggcgaggagggcgtccgcgtgtacagccagctcaccatgcagaaggccttcctggagaagcagcaaagtgggtcggagctggaagaactcatgaacaagtttcattccatgaatcagaggaggggggaggacagctaggcccagctgccttgggctggggcctgcggaggggaagcccacccacaatgcatggagtattatttttatatgtgtatgtattttgtatcaaggacacggagggggtgtggtgctggctagaggtccctgcccctgtctggaggcacaacgcccatccttaggccaaacagtacccaaggcctcagcccacaccaagactaatctcagccaaacctgctgcttggtggtgccagccccttgtccaccttctcttgaggccacagaactccctggggctggggcctctttctctggcctcccctgtgcacctggggggtcctggcccctgtgatgctcccccatccccacccacttctacatccatccacaccccagggtgagctggagctccaggctggccaggctgaacctcgcacacacgcagagttctgctccctgaggggggcccgggaggggctccagcaggaggccgtgggtgccattcgggggaaagtgggggaacgacacacacttcacctgcaagggccgacaacgcaggggacaccgtgccggcttcagacactcccagcgcccactcttacaggcccaggactggagctttctctggccaagtttcaggccaatgatccccgcatggtgttgggggtgctggtgtgtcttggtgcctggacttgagtctcaccctacagatgagaggtggctgaggcaccagggctaagcaattaaaccagttaagtctcaaaaaaaaaaaaaagggggggccgttttaaagaacccttgggggggcccaagttaacgcgggctggcaaggtaaaagttttttccttatagggagccgtataaaac

SEQ ID NO: 65289 - DNA, 3399 bp, Homo sapiens
gggcccggggtcccgccaccaccgcgcgcgggacagattgattcactttggagctgtaagtactgatgtattagggtgcagcgctcattgttccttgacgcagagtcccaaaatgaatatccaagagcagggtttccccttggacctcggagcaagtttcaccgaagatgctccccgacccccagtgcctggtgaggagggagaactggtgtccacagacccgaggcccgccagctacagtttctgctccgggaaaggtgttggcattaaaggtgagacttcgacggccactccgaggcgctcggatctggacctggggtatgagcctgagggcagtgcctcccccaccccaccatacttgaagtgggctgagtcactgcattccctgctggatgaccaagatgggataagcctgttcaggactttcctgaagcaggagggctgtgccgacttgctggacttctggtttgcctgcactggcttcaggaagctggagccctgtgactcgaacgaggagaagaggctgaagctggcgagagccatctaccgaaagtacattcttgataacaatggcatcgtgtcccggcagaccaagccagccaccaagagcttcataaagggctgcatcatgaagcagctgatcgatcctgccatgtttgaccaggcccagaccgaaatccaggccactatggaggaaaacacctatccctccttccttaagtctgatatttatttggaatatacgaggacaggctcggagagccccaaagtctgtagtgaccagagctctgggtcagggacagggaagggcatatctggatacctgccgaccttaaatgaagatgaggaatggaagtgtgaccaggacatggacgaggacgatggcagagacgctgctccccccggaagactccctcagaagctgctcctggagacagctgccccgagggtctcctccagtagacggtacagcgaaggcagagagttcaggtatggatcctggcgggagccagtcaacccctattatgtcaatgccggctatgccctggccccagccaccagtgccaacgacagcgagcagcagagcctgtccagcgatgcagacaccctgtccctcacggacagcagcgtggatgggatccccccatacaggatccgtaagcagcaccgcagggagatgcaggagagcgtgcaggtcaatgggcgggtgcccctacctcacattccccgcacgtaccgggtgccgaaggaggtccgcgtggagcctcaaaagttcgcggaggagctcatccaccgcctggaggctgtgcagcgcacgcgggaggccgaggagaagctggaggagcggctgaagcgcgtgcgcatggaggaggaaggtgaggacggcgatccatcgtcagggcccccagggccgtgtcacaagctgcctcccgcccccgcttggcaccacttcccgccccgctgtgtggacatgggctgtgccgggctccgggatgcacacgaggagaaccctgagagcatcctggacgagcacgtacagcgtgtgctgaggacacctggccgccagtcgcctgggcctggccatcgctccccggacagtgggcacgtggccaagatgccagtggcactggggggtgccgcctcggggcacgggaagcacgtacccaagtcaggggcgaagctggacgcggccggcctgcaccaccaccgacacgtccaccaccacgtccaccacagcacagcccggcccaaggagcaggtggaggccgaggccacccgcagggcccagagcagcttcgcctggggcctggaaccacacagccatggggcaaggtcccgaggctactcagagagtgttggcgctgcccccaacgccagtgatggcctcgcccacagtgggaaggtgggcgtggcgtgcaaaagaaatgccaagaaggctgagtcggggaagagcgccagcaccgaggtgccaggtgcctcggaggatgcggagaagaaccagaaaatcatgcagtggatcattgagggggaaaaggagatcagcaggcaccgcaggaccggccacgggtcttcggggacgaggaagccacagccccatgagaactccagacccttgtcccttgagcacccctgggccggccctcagctccggacctccgtgcagccctcccacctcttcatccaagaccccaccatgccaccccacccagctcccaaccccctaacccagctggaggaggcgcgccgacgtctggaggaggaagaaaagagagccagccgagcaccctccaagcagaggtatgtgcaggaggttatgcggcggggacgcgcctgcgtcaggccagcgtgcgcgccggtgctgcacgtggtaccagccgtgtcggacatggagctctccgagacagagacaagatcgcagaggaaggtgggcggcgggagtgcccagccgtgtgacagcatcgttgtggcgtactacttctgcggggaacccatcccctaccgcaccctggtgaggggccgcgctgtcaccctgggccagttcaaggagctgctgaccaaaaagggcagctacagatactacttcaagaaagtgagcgacgagtttgactgtggggtggtgtttgaggaggttcgagaggacgaggccgtcctgcccgtctttgaggagaagatcatcggcaaagtggagaaggtggactgataggctggtgggctggccgctgtgccaggcgaggcccttggcgggcacgggtgtcacggccaggcagatgacctcgtactcaggagcccgatggggaacagtgttgggtgtaccacccatccctgtggtctacccgtgtctagaggcaggtagggggtccctccaagtggtccacaagcttctgtcctgcccccaaggaggcagcctggaccactccttatagcaatacttggagggccccagccaaagtggggcagccgaggtccctgctgccagcttcaggtgaccccccccccatcccccggcacctcccttgggcacgtgtgctgggatctactttccctctgggatttgcccacgtaccccaggtctggctggggcccaggcccggaatgcagaggcctgaagggcctctgtcaattgtccgcgccaccgagtgccttcaaaacagcttgtcacttgcctgccactgtgtgaatcggcgacggaacactgcacctgccttccagccgccggctgtgcagtcctgggtcctcctttctgagggcccgtgtaaatatgtacatttctcaggctagggccagcaggggctgcccgagtctgtttttcatgcgatgacacttgtacaattaattatcttttcaaaggtacttggataataaaaaacctcaaactgtttttgaacctgaaaaaaaaaa

SEQ ID NO: 65290 - DNA, 1372 bp, Homo sapiens
ttttttttttttctgtctggactttataggcattaaaggcttgctttttttcacttaactttgccaaagcactgtatcgtggatcattaataatcattttcatagcctgctcccatgaagcattcgatggtacccgcttttctttcaataattctttaaaagcttgctttgcctcttcctttgtattccaagtgtatgttttctttgctggttggctctcctcctcttcttttttgggagtaaaatcagctacagtttcttgcttagatgtttcttctccagtattactggatacttccacactttgatcctgaatagcaggggtactagtaagttgtgcttgttcctcagttgaaatagttactgtattctcattatctacaacagtagcaacaatggaagtaacttcaggctcaggaacaactggaaacagttccactgacagtattagaagcagaagtggaagcattagcattggctgcagctgctgctcgtgctgccgctgctgctgctgcaacaacagcagctgctgcttcggccagcagccatggtgctcattgtggtcggaatttctgttgtagggactggggctgttgatgttgtggtgcactcttcttgcttactgctttcttcagctttgatcattgcatgcagggttgaatttggtataaagacttccagcaacaatggtattctggtatccttcaagatcctcaagttctttaggtttggcccagcgagattcttttgtttgagaattataatagtaaggctttccagaatctgatttgtattccttccaggggcatttagataagagttgctcagcaggtgttttaagatcatctggtttctcccaggtagactgtttggtttcagtgttgtagtagtaagtccttccatcaggtgatttatgttcagtccacattgattttgcaccagatgctgtacctgctgctacatccatactatttactcctggcggtaaggcaggctgcatggaagcctgagacatatgagacatcatcattccaggcattactgacgacatcattccaggcatttgtcccattggtggccctcccatagggggcatcatctgcggcatcattccatgaggtacaggaggcatattcgctctctgacccatagggtgcattcccattggggcataatgcatgccagggtgccccatcgagggccgtctcctcaggaagccgtcagcagagacccaagagccggagcagaggcttgagccggacaatctccgctccccgtccccaggaccctgcgagggaggatggctctccatttcactcaccatgaggcctccacgctcagctcccgtccccggcctcatcgtcgggctcag

SEQ ID NO: 65291 - DNA, 4314 bp, Homo sapiens
  misc_feature (1)...(4314): n = a,t,c or g
ttttttttttttaaataaaagttttattcggagaaaaatagaaccaccacgtacacagggancaacaagagcacaaaaattcaactgatacagaacaacaactgaaagtcccaattatccaatgtagtttgcaattacttttcagtttcttaaacagctcccctcaactttttttttttaacagtcttgctaatttttcagctgaaacagcatcaagttttcaaagaattaagagcctcggggaggggacccgctttcaagatactgaaggtgacatcaagagtctcctcctaacaggaccaactctatctaaaagttgcttacgagtaacttgaatcttgtgtaatagtctacatctcacagaccatcagggatgagttagaacactgttgttgatggtccggtatgaagagagggtaaacaaaatagctgcatttgcttgtcagctgagctcatataaagaaatcagtgaggagctgagaaaatataggcaatggctgctcaataagaattacaagttccgaataccacatatagttagacaccagtgtgcaagttgatgcaactagaaagaaatagacgactttttaaaatacctggccacaggtctttgagaactcaagcaaacaatcaacagtagacacaagagtcaaaaatcttctcaggttgaagattaggacataggtaatcttcctaacggctccaacaggcaaggaaatatgctgtggtaaaaatcagaactacttaatgctttttaacaaacataaacaaaattttctgcttctcctcccttcaaagcttcaaggaaatagaaacaaggaaacaaaataaaaacaaaaaaaaatcagtgacagtaaagagaagcctttgcttgaattatcaattcgaaaaacagtacttttgccattttgtatatataaacaatcttgggacattctcctgaaaactaggtgtccagtggctaagagaactcgatttcaagcaattctgaaaggaaaaccagcatgacacagaatctcaaattcccaaacaggggctctgtgggaaaaatgagggaggacctttgtatctagggttttagcaagttaaaatgaagatgacaggaaaggcttatttatcaacaaagagaagagttgggatgcttctaaaaaaaactttggtagagaaaataggaatgctaaatcctaggaagcctgtaacaatctacaattggtccaagttgaagacaaaactgtccaaacaacatttaaagtctaaagtatgttgaaaactagttgcaaagtttttgctcctgtaacaatttacaaaacacgttcattttggtctcttttgcaattttcttattgtattcatttttaatataaagagttggatttttctcttctatgatgttcctctagtacaactgatcattaattttctactttagctatttttataagtacttgttaatcagcacagttaacttggggctaagccatatacacacatcccatactcataaatgaaaatttttaggatgtgaatatacaagatattatgtaagcaactgtccccctacttgaaaacttgtttccaaataattttttttaaaaaacatccctttcagtgtaacagaacatcacctagtaaaatatcaatagctatgacaattcatttctcttttcaagggaaatcacaaaacgggtgaacaaccaagtcaagggtggtttttctatttgataaatacatccagaactctgtacagtaaataaagtttgcatgcagtttaagtatctttaaatgacattttaagcaaataaaccttttgcttcataattaatggtgtgtaagaaccctcccccctttttaatagccacagggatctctttcccagttccaaagaggaattcatgaagaccaggtacgttcttaagtgttttctgcccatcatactaaataacatgcaaagagttcaacaacattcttcttaaaggtaagtattactctttaaaatgggcatgttaaccaatgagaaaaagtccactcaactatttccattaattacactgcttcatttggtcatcggtagtaaaaaaggagtcaaataatattgaatcaacaggttagtttatccactggctactgcatatgacaccaaatgctgcaaggccaacattctatgcaatatagttgtactggtttggattttctttatctctttccatgtagtcccggtcaattaaagattctattctcttcttaagatcagcaggctttactggaaatttcaactggttgtacacttctgaaacaaggagattgtggctaagtgtctttctcatcttcataattcgaacaattgcagcatcaatttgatactgtctgtcttgaaatactctttctgtagtgcttgcttgttcttcaaccgtttctttcatctggatttgattgatctttatcctgaaaagtttatgtttgaaatcatcattacaaatgaacttgtcaccatcttcaatgtctttgccctttggatttttcgccagaactctagctttgccacaggctaatgactgcagtgttctccttaactctccatcctctattccagttgcctgcttgatctcttctaaactgaactcctctccctcattaaacattagcagcaccagtgtttgaaaaagagagacctggagttcctttttaccctctttaaattctgcttttaacacacagtgtcctagggttgactgccactgaagtttcctgccactatgtttgcctaggtaaaatgtcttgaaaatctcctgaagttttaccatctctggtggtaaatgaacttccataggcacatatgtcggccaatagcccattgtcaggatattcacagttaactcaatatttcccggaacattctgattctgcatatactgtttgaactgaatcatgatgtctttagaaagttccatgtctttaaacattccttcaagtttgctggtgaaagcagctccgcattcatgtttaagtttggacagcattgatttttcagcatctacagatgcactctttccgactaacaggcgcttggctaaatctttcttatagaaggcctcaaaaacatccttgccatagataaatctaaatatgatcataattttatccaacattttctcaagttcttcatctgtagcttctttgttgcctgcacgaagttttgaatctacatacttagctataagttcagctggtttatttggtcttttgttaatgaacgtttcaaatgcttctttcatggcattgataaatttctcattcttcagaaagcagatatcaattatatggtcaaccttatctttaaaatccggcaattcttgaaccatggttttatctttttcaggattaattacaatagtgctgccaaatgccttgatatattcgatccactgctgcaaaagaacctgaactccacctcgaactctactgaagagctgatacagaagagacaaatcttgaattcggttttcatcaaggaggttatttaaacctttcctgaagaattgctgttaagtgttcacctagaagttgtttttctacagtagcaattaatgacttctgggtggtctgatctaagtaagtaataagtctgtctgcttcttcttctagacgtttgttaacatgatgtagatattcaggaacctctctttcttgcattaatttttggccttcagctgcatagagccggttagtttcttccaaaaatcgttgttcaaaagaatcttgataaatttgcaaatcagacagcatgcttaaaaggcttcgaagtaaacttctatcaattgcttcaccattcctttccctctcaatcaagagaagaatgccatcaattgtcttattctgcactttctgatcacttataatatgagccctaaataactccagtcccatgtcccaaatggagggtagcattgaattctgaagaacgtaagttctatccagaaacaaaaaaatgctcctgatcatgatcatttgtctgcaatggttttgccagcatctatcaatcttctttaaaaaaagaacgctatccaatgaatcctctctgaattgatgaatctgtgctttgatgtgatcttcgcagatctgtctcagctgtttgtacaagtttgcagaaatcttgtaagaacagagattttctacagcctggtagagttcttctaaattgtacttaattgaagtactattctgaatagcttccactgcttctttcagtttttgccaggtttcatctgtgtagttttctggtaatttaggcttatctgcaaaatccggatcaatcat

SEQ ID NO: 65292 - DNA, 6246 bp, Homo sapiens
ttttttttttttggttttttaaaaagtattttatattttactagagaggatggaactaggggaagaagtttacagaaaagatgtccatatacaaagaaagaaatagcaaaatatttttggtcataatttagaaagaaactaatctataaaatggagacaattctccccaattcatctctctcatagaagagcataagcacgggctctcagttccttgatatcctcaagaggccacggatacgtctgacaagagcctgtatgaaactatatcgagatcgaacttttgaatataatccttcaatgtccagaagtttcttttgtagtgattctccaaaagcgttgattgcatcagcctgaagctggtctaaatcatgttggctcactatagccagcccacttctaaaatctagattggtttctgaggcgaaggaatcttgcagtcttctgcttttaaacaaggttctcgaggcaaataaggaatcttgagaatccgtgggcatgcaatgtaacaagtagtactccagatggcgccaaagaataaataggcaggtctctatgataaaagaacaaagggaaagcagtttagctcgattgttgatcaccttcaccaagcgccgtcttgctagaacatatttctgagcagtggagattttatcaacaccagcaggcatcacagactgacacaactcttttatctcatctgggggaagctgctctacattttgtagcttgctgacactctgtcgatgactgtcataatagctgaagaaatcattagcactctgtttcagcaggtagatgataatgcctaaaccaggcaggcgccagtatggaaccactggagcttgggtatcttgccgcggtccatctctattaactgtttctgaaaggctaggagtgaagagacacacagcatgctggaaggtaggggaactctgtaacatgagtgactggcaatattccattacattggcacaaatctgctgcatagccagttcaatctcatctttcttgcttactttatctccctccacattatcgtcttgaaatttaaactgacgcagtctgtcagagccaccaaagcgacttagtagtcctaagcactggcgctggaatcttccaatatgtccctgtagctccattagagacccttcatttacatcaacgtcaagttcacttaatattccaggaagtgctgctttacttataattcctgtcagcagagccaattcctgcaaagacccagcactaacatcctgacagcgcagaattgcttgtatggtatcagaatgtgaaataagaaactgcaatacctgccctgctgcctgcaagtgctgggccatactagatgtgaggatgacctggcacagctggagagctgggaggagaatctggcggtagcgatccactggggtagggatgaacattggagggtctctcatgccaaacatgctctgcgggtccgtttctgggcgcatgtcatagacttggcattgagctagtctcacaatcacccctgatcttagcagctctaatgcaccctgctgtatctttgccactcttgtgagaaatgccattttagattcataagtataaagtgcttttaaaaggggaggctgtggggtgagtaagctctgcaaagtacggtcatcttctaccaagctgtctacgaggaccttcaagtagccactgttagaaagatacaaaagccactgctgctgtttatccacggagacaattctatcaagtagagccagggccagcatccttccaatctcatgaccatcacaagcatctcgacagaccacttccatgagggcggcgccataactttcaataatggctatgttttctcgctgtaatttgctaaatacatcttcaggggctgtcagcctttcccacatggttttcttggctgcttctaaggtgtctggttcatcaggtctctgggcaatctgtaagtaataaagcagagagccatacaagtgagtcctcactcgttggaatccaccacctgtcttcaaaatgaagtctaacagtttcttcaatatgatgtaaagtgaagaatctccaatagaagcaaaacccactaatgggttctcttcaggaggaggtgaggtgaagcaactatcaagcataaaagcgtaatgggcctctgctggtcccaagactgatgtttgcttctgttcagtgaggacggcctggcttaggtgagcagtcagtgtgaacactgccccggcgaccacaggcattaactcttgcgcagcttcatcatccagtatcttatcatgcacatcttgtaaaatatcacgaataatcagttgtcgatcctctgcctgaatgaggtcctggggacaagctgtcagtataatttctactagttgcctccacgactccagagcatgacgttttgcatgaagacactgcagcaatttatttcttcctaccacatactgaagtacagtgctgatttcctccattagtagaggtctctgtcctatggctgccataccctgaagggcatttacttcagctacaagaaccctatgaagaagcttgacattgcagactgtctgtccccgtaaattcttgtgttcacagttagcaataacttgttcaatctgggcccgatcaaaaaaatccaactgcaaaggctcagggatctcctgactgaagtcaatcgagtcaagaatatttagaatttttcgacgtacttttgtagcagtgtcaaagtgaaggaacccagaaacagacctgttttcatcttctattcctccttcaccatctgagtatggtttcactggcatgtcatccagtaagaggtgtaggagcctctgggtatgtgaccgctgacgattcagagaggttacccttagctctattgaggcagttttcataagccatgacatctggttcagcatagatatttcatattctttgttagaaaatggtagatactgcaactgggaaaataagaaatcctggctggttctcaagtacctcatagtaggaccagatgtatcagagcatgcacataactgatatatgacctggtaacatagctcagccagctgaggagattctcgcaccgccactgggcctgttctcccttccgttcctttctccaagatgtttagaatggcgtgaaggcatgtccgagggcaacctaacactcctggatcttgtaggtttgtagtactgacaggttttttcaattcaaagcccaacaggtagagagcaagattgggtggattgcattccagagaggtaatgagaagattcaagatgtggattcttgtttcatgacgaattgcaactaatttcttttcaagttctgatccctcttccagacgtacaaattcttctgcatcttcacaatccaaacactccacaaatccagccattagtttctgacttatactctggtcatgtgtgaaatctccaaccaactttatctgaatattagagttgcaagagatacaacagaggatcttggcactttcaaaagccaattctggattagtattgccatgatataggtatctggcaatgtttaccacattatctgccttcttagttctgggattaattccctgcaaaagctgttctaaaggacagactattagagccagttgactctctcttagaaggtccataaaaagattttccttttgcagagtaagattgagaagtgcaaggcaatgctgtactgctttctccaggtgttttttcccaggaaagggggcataggtgtcaagctgcttaactccttcttccagtaaactgagagcaagctccaacattggtgactcattcagcagatgatacatcagactaaatccaggtggcttataggctatgatttcttctccttgtagttccacaaactggtctacaaaatcttcaagctgaggctcataatctctgagcaatttataaaacacctccaaaaccacctcagcaacttcccacttttcagctgctctccggtaagctcttgtacggaatcgtagaaacacagagtctctaaggaactgcaaataagggtcaaagccagggggccgcagtccagcacccaaattagaaggaaatgagctctccaccagagtactaataagctggcaaaaggcccgagtcaatgggtattcttcacaccgggattctatttcatttagttcaacctcaataccaatagcttgcctttggcttggaatcctcacggtctgcagtatctgagtgtattccaatgactgccagagggaagcagcaatttcaggagattttccaaaagctgcgagtgtcttcagtagctcagcttttaggacagggggaatactgcattggaggagtcccagaatcaccacaacaggggtccactgagggtgttcacagagggccaagcgagcattttcactccaagtaatgatggtagacgtgagctgcaaaaaagcaatcaatccatcttgctccttctgggtgatgccacgggaaggaaggtgacggtactggacactatctgcacttggaagatccttccgaaggtgttcgtggtaaagcatcaaggagtgaaagaaatgttcctaaggaaacaggactgccacctgctccctgaatattttcaacatgactactaccattgactttgagcaggctgaaacagtagtgggcacactgaggcccattggccaatccctggagcatcttcaaataaggaatataaatagttggaggcaacaggtcacccatttgcctaacaaactttgacaagacaacctggcgttgagggggccgctgatgagccacccctagataagagcccatgatagtcggagtctgaagaggctctgtgggacaccaatattctagagcaagctccagatgaaaagggttctttttatatagctcgccaatcaaaagcattaagtgttccaggtcccttctaagtgaaatggggggttcattacccatctgcatactcatgtgaatcattcgagcatcttcatctgcccgattcctcagctgtttcaccttcattggcataagtgcaaggaaatctgtgatgagattatggactctgcgaatataaaattcttcctgataaaagtattctgataccactacagattccatgaggaacaggaaaacgttgtcagcaattgcgagttctgccattgcttcatctgcctctgtgaattctgccagagctgtcacatcaggtagctgggatattcccctcaatgccagcgcccaggcaagtctaacagtggcttggagcccaggcagtttccaaagctgtgagtcctgaagacgagagtgaattgttgcaatgtactgtttttctgtcaacagtggaagttgatgaatcatatcatctcgttcctctgtgctttgctctataaaactgatatcaaaacagtatagaagcgccataagaagagccagattcactgcatccagtgagccattagcctcaactgtcactctttccaaatgtccaatgaggaggagagtgtcttctttgcctaaaggtgactggcaagcccaggcaaaaaggctttctgcaagagactgcctgcactccttaatgagatcagaaacctctttgcgatgtttttcactgcccaaacctctctctcgctgtagtttctcaaactcattattcacatcaatctgtgacaccagcgtaagaactttataagtcaatccttgctccatcagctcatctgtaaagcgtgttgtcatggaagccagctctggactgagttctagggtccatgtctttccccgtctagactgtatcaaggctttcaaggaattcgcaatgcatcgctttccatcccagtacagaagaacagctactaatcctctggtaaggccaggaaaatgtggctgttgatgctctccagcaagaagaagctcaacagctgccaattctccaatatcaaaaaggtcactgagaataaaggcttctttaatgagctgttcaggaagaagtcgagttccctgttgaccctgaatggcgactccctctgtactggctttctgaaccttctcatgctgttgaacattttttggcggatttttgaacaatgagatgaagtcaggtttgtgtttcttcaaaatcttatcaagaaggtgaacagcttcaggttgtcttctccaaagagcatttcccactttatgccaaatgtctttgtaaggaccccatagactagcagccgaatttaccgccaaaggcgtcgccat

SEQ ID NO: 65293 - DNA, 2290 bp, Homo sapiens
  misc_feature (1)...(2290): n = a,t,c or g
tttttttttcagaactactaaacatttattgaatgtgtaaggtattaaaaacatttacaattttgttaataaaatgatgttttatattaatgtatgtattatgctttggaatatgctaagtcatgtagataactttacatttctttcaataactttattctttacaaaatatacaaataaattaaanaaaacaattcaacttttaaaagggattacccatatgcaagaagaaggtattgctatcacccattctaaattcccccaatgcattcatttcctgttcccttatctttcaactctagtggcaaagtaaagactgaattgaaattaagctggcactacaacatcattaccagggatagacacataaacaaagtcatttccaaataaggaatgctggatctccagagaagtgacaaagaggagtctactgagttttgcactcaggcacatccttgcctgaggaggcgtgcccaaggacctggctgagaatccacactctctgctcctgcattttgcacctctggacaaaggcctaaacttgagttatcaaaatagcgaactggatgaggtgatggtaaagactttgatcggctatcaaaaaaacaagattttggtgattcctttggcacaggatcttgtaaattccgttccttgcattgagagggtgtaatttgtttctttttagaagctgttccagtcactttaggagactttggagaattctcacaagttacttgtttgtgagcctctcttttaagggttctttccttccaagttttgacctcattggaaagatgctgattattgcttaacaattcattcttttgttttattagctgttcattttgctgctttaacttagaaatttctttttctagccttatatgttcacttttcaaaataagagcttttgtgttttgtacaatgccgctgccacctccacaagttaagggtttatttgaaggctgaggatcagtatgttctgatatcactgaggtatcttgggcctgttgacttcttctgagattttctctcaatagccttataacttccttttgatattctacagtggcttttgtagcactgatttccttttcaaattctttggcatttttcattttctctaggtctattttcccaagcttcattttgagatcttcaatttcttctttatatggcttagctcctaaagcaactttgtcctgaagtacttgaattgtctcttttgttttttcaaggcatttatttgattcatgaactttggcttgaagttttgctattatgtcattagtcacctcaagttctttctgcatctttataatcttgctttccttatgcatagcactttctttagcttcatgcagtgaattttccagctctcgaattttctctgtggttaactgtgtagctcttgatgtaacatgaggattcttattgtcttgtgtggtaggattaacctgggcaccagatgccaaggaagtcttcaatgtttggtagtttttaaatagtttttcatttttctctttcagtgatttcaggtcctgttcccactctttggatatggtagcacttctttcctcaaactctgttgattcattcattatggcaattattctgttattaaagaagttattcacttgacaaatcctatcattttctttctggatgccatttttaagcttttctatatcaaaacgagtatttaaccactcttccaaaaactgtgtcatttctttcctattacttagtacttgttgaaattcagtctttatgctagggaactcactttctgagaaatctttgagaatttcctcaatatgtagatccatattctggttcaatttgagatcccttaattctctggatggtacatcacaatcttgttgaaggtgctgtattttaattagcaattccttttgcttttccacttcatcaataaaatccatttcaaatttattgatggattcatgttgttcttcttttatttttgtaacatagcttaacacatacttcagtttcttcatgattctgtggaattccatggagcatctctggtttgcagtaaaaagtttttcaatgtgtttggtttgtaaatagggaagtgagaggtttgctttaactctcattgaaagctctttttggaattcaatttccttctccaagtcaagagacaatctattcaagcactcataatgatcatccatctctgagtatctcttcaaaagctcttttattctagagcacttttctctcaggctttccgtaaggtgctcgtgccgaattccgc

SEQ ID NO: 65294 - DNA, 5222 bp, Homo sapiens
ttttttttttttaaaagaatattgatttattacccaacaaagcagggatttccccagtttttttcaattacacacacacaagcacacacaatagcagaatgaaattacatttttcacatctaaaggtttatacctcaaagaaaataggcatgtgtccaaaagacaattagaaagcaagaaatctttccttttactttgaatatgggaaaatcttttaacagagactctttccgggcaaaccaatgaagatttagggcataggaaaatgcttgtcaccttaaggtttttaaatataactgtattcacccaaatcaaggtttttactaggaagtttttacggtttttatggtattaaaaatccaccttttgggccggggttgcaggggctcacgcctataatccccagcactttgggaggccgaggcgggtggatcacaaggtcaggagttcgagaccagcctggccaatatgctgaaaccccatctctactaaaagtataaaaaattagctgggtgtggtgggacgcgcctgttgtcccagttacttgggaggctgaggcaggagaatcgcttgaacccgggaggcggaggttgcagtaagccgagatcacgccactgcactccagcctgggcaacagagtgagactccatctcaaaaaaacaaacaaacaaacaaacaaaaaaacttttgttttaagtggctggagacctatgtggctagacttactactgtttaaatatgctaaaatggatacataatttattcttcacagctcaaaattcaatgtaaagccaaatattaattttgtccagtagagaaattaaatgtttacaaaaccaaagtatggaacagttgttggcctatgtaaattgaaatgtaattgaccattttattttcaaacatgcttaatcttcacgtgtctttttcacattgatactcattttgcagaaataagatgactggtactaatttagacaataaacaaactacaccaagcacattttagtaaagatattttggtggaacgcaaagtaattaacgatgaaaacatttggtaatatccatttactaatatgttaccaagttcttcaatgtttacatgacttgctcatattagtaaaaatgtcattttaaaatattttcacacttcatgcactggagttagtttaagaagggaaggctcttttaaaatgtttataaagaagaaaatacctttttaaagagaaaatgtctaagtgagaggacataaacttatggctcattattttttgacctagttaagaatataaatttcaatggctacttaagaatatacaaaacccaaactgaaagcaattcttcaatttattcaggcaagcaagtcaaaaaaataattttgtcattactggcacagatccaatccactgttcaaagacatgactttggactgtctattttcctataagatttattttttaaaagaagataatttgtttggttctactaattagtataacttagagataaacaaatgattttcccatttaattcttttgcggtgaaagaaaacagtttaaactagattttctaagataatgggtacatcaacattgtaagaaaggccctataggcttaagttctaaaaacattacggttttaaagaaatcaatgcttttccatcactctttacataacactgagaaatttcaaatataaattgtagaaaccagtatatgaaattttaagaaaaatcttactaaaaataattataaaatgcttttagaaatgtaagatgtaaaatataattgactttaaataaaataaaaaaaagcaacccctgcccccacactttaaaaggttattctttaaaaacccttgtcacctaattttattctcagtcaatcttttggttgtattttgcatcatctagtggccaccttgcagcatttcaaagcagttctgctaccatttttgaaccccagtgcttttttccccttgaaataccaataaaattatagcatcaagtttcataaaactttcttttaaaggcccataaaattccatttcctactggagataaggtaatcttttttaataggaagaaatgactagatctgtcataaattattactatacattagacattttcatatcaattttttaaaattaaatataacattgggagaaactaggacttaggctctagagtcatctttaggctctaaaagtaattaaagttactctgcaattaaagctcagggctaccatataagtaacttcttgtgattaacccttcttccactgtacctttgatttgtaatattaagtacattttaacatgagaactgaatgactcatggtcagagtgccaagaactcaagttcaaccaagactgaagaagacttaacttttactaccagctgctattttggaaaggtcattatagtttccattatcaacctatttgtatttaaaagcaggtttccaaaaataactgcttttcgttttagtgaatctccttttattcagttgagccatacttataaacagaatttaacaaaaaaaattcccaagttccctctctttacttttattaagaaggttgagtgaatgtaatacggcgccgccgcctttggaaagcctttaaattccatgtgtttggttccagcatatgagggccattgtagacaaacaaaactgtcatcttttcagaataaggaagattttgcaggagctttggtgttatgaaaaagtattgagatgtattttctttacaggcagtatttacaaccatttcaaacactctccgttcattgattgggtccattccctgattgatttcatcaactactctgaatggacatctatttagctcctgaagtgccatcaagtataacatggtagaaacacttctttcacctccactttgatgatgaggagttaattcatgcagttgagtactacttcgaaatttgactctaattcgaattccatatttatcataatcttcctcattttctgtatggagatcaacttcaccagcacactgcatggaactaaaaaaattgctgaatttttcattaattttttctaccagctcttttaaaggattaagccacctttcttttacctgtgaaatgttttccctgtattgatctagttcaactttctttccctttagttcctcagttaactgttctatttcttcttctctttttgtatattcctgaacaattgtaggattcagtcccgtgaagcaggaagctcttgatctttcttcagttaataaagcatcaatttcatccaatgtgtttggaaggtcttggaaaaccatggggagtgaggagttgtgtccatttggaatggtgggtacttgtgtctggtattcttgaggaagagtctgctctgcacccaggttatcatacttgcctagctcttttcataagttccttgcatttctgcaataatctctgtctattttcatccaattcaatgaaatgttgctctgtaagacggagttgtgaagatgcggccatataatctgattctaatttgttcttctcagagatcactgtagtattttggagaattaaatctactttttgtatatgcaaagaagtacaaatctttattaggtttgttaattcggtaacaagtttcgctttttgaacatttatttctttgattttggtacttgcttttcgctcttcctcttcaagattgcaagtatcctgttccatcagctttaaacttcctagtttggaactgattttttgttccagttgtcttttcttggtttttctctcaagaagctccttcttcttttgtctaagttcattgtctttgtgctccagatgtttgcttgtttcacgtaaggcaatcaaccctgaatccactgcttgcaattttctatgaatttcctttagctgttcttctaagtgtcttctctgctctaggtccacagtgacagtgagaaactgcgctacttttagagatgtgttactagaaataactttgtttgaataaaaagaagttttcaccacatacttttcttctgctgtataaatctgttttaatcgggtttcttgtattacccgttcaattctttctctggtcttttcagttcctacaggaacttcatgaatatgatactgacagcaaaggtaactcattacaggatcaggtgcatcaaataattctctcaaataagagaaaaatccgtattgtttaagttcattcaaagatcttgaaggtgctttgtctgcatatgaactcttgggagcaataacagcatttactcttaattttttattgtcacgaacctctttgaggaaaacctccatatcttcttgactttcaaatacaaaggctcttaagtcatttgatggaatatgattttcaatatatttggcatttttattatctttcatattgatcgtgagcattatgggctcacagactctttgtttaaatttgtctctgttatttcttagccataaaacagcatcatacgtgtcacggaatctctgtcttagcttatcttccttctgattcataagattgtcaaaacgtacaatatgatcgtccacactctttttctccttctctagagtttccctctctcttcgcttatcaattatttcgccttcacataatgccttttcatcctgaatccgtctcagatcatttgtaatggcatcaatctggggctgaagattctcgcagttttccgtggtctttagttcattttgcaaatcctctatcattttgcgggtattacctattctcctctgtcggtcaagctcttcattttgctttactattaaagcctgctgaagttcctcaatatgtttatctttcctttctataacatcttgcttctgtttgcatttttgagatgcctccttaatatctgttgccttttctttgattcgagcctccaaattgtgacgctcgttttccatttcttcaattcgacatgttataggaatctgcccttctttaagttttctgacctcttccttcactcggtcacgaactagttttacttcttcatattcctgacgaacattttcatattccacccatggcctttttgcttcaagcatctcaattaaatctaaatgtcgcttccgttcatagaacctctccacatcttgtttatatctttcattcctctgaaccattttctgtagatactcagttttctctttgcatgaggtctcgagctgtttttctttctc

SEQ ID NO: 65295 - DNA, 309 bp, Homo sapiens
ctcgaggcctagtcgagcagggatggctcggctgggcggataatggtgggccggctgggcgcagcagggggtcttctgggcactcctgggggaatccctggggggatccgaactggccgagatgggatctgaggcggggctgggaagaggtcactgttggcaaacacgctctggggtccaggcacgggatgggattgtgggcgccccaaaagaggcttttgtcgccacgctgacaagaatctgggggggccccagacgggcccaagatctctttggtgctgtactagcaaaaatctactattccttccg

SEQ ID NO: 65296 - DNA, 4865 bp, Homo sapiens
ttttttttttttaggatgtttaaagataatgctttttaatatttcaaatatttttttaaatctcatcaaaaatgttatcaccttaacagtactttgcacatgtggaatttcatacctaaatttgatactattttggtttatttatggctacttacaagagtcacagtaataatgtccactcatcagagtctttctttggtagagcctaatgggaccagacagatgaactgttatgcaaatgagatggataaagcaaattcatgatagtatgaattataagggtttttgtttaatggaaatacaacttaaaaaggatttccatatttatccccatcattattttggaagcttaataccctgttcaggggttgaagagtttgaatagctcacacaatcctgtaaaaatgacaactggctgccctttaataaataaagtcattgtaaagaattacatttacagagtgaaaagtgaatacatagcatttcaaattcaattttggaagtactaataagtactgacccataacaatatacactagctatctttttaactgtccatcattagcaccaatgaagattcaataaaattacctttattcacacatctcaaaacaattctgcaaattcttagtgaagtttaactatagtcacagaccttaaatattcacattgttttctatgtctactgaaaataagttcactacttttctggatattctttacaaaatcttattaaaattcctggtattatcacccccaattatacagtagcacaaccaccttatgtagtttttacatgatagctctgtagaggtttcacatctaaattaccaagaaagcccttccctccctcatcttgcactcagcttaattctatactagtccttggattatgtaccactgtaaaagtataactgtatcaaaattaccatgtttatggatacaatattatgccatacagagcaacaaagttacatataatgacaaagattactgaagttatgcaagaccagaacaaatgttaggacatgctacctaggcacagtccctacaaagaggctcctaagtaccccaagttcaaataacattgacaaaataatgaacaattatctttaaaaattataaagctactggcaaattaggtaattgctaaataaaggtagagcatgagattaaactctaatatttacaactgcaacatacttaattacaattgtgcacgtatcagtggctttgtaacaaaaatacagagaaaaaattaagttttcagttcaacaagaggtcgaatccaatcaatctcaaatatactcaacaactcaaaagatttaccacagaataaattcaagattagctgataaacaagagccatattactggtgtttaagacaaaatctaaacaagttaaaatctaatgcttgatcagaagtcagatgactgtgcaaactttacctcaacagaaatatactgagatgtgcaaacaaatgtaaaacctccactactggtttgcctgggaggctgaccttttctttcttacagagcttcctgataaccataaactataaatacaggtacaatgcacagtcagtaatcttttcttttttatttattgttagaatataaaagaattgagagcataggtttaatttcatttttataaggaagactacatttacctgaaaaagaaatatggcatcacacacaaacacgcttcagggaaggagtatatttaagaatatggtgtcattctgaatgctaaaggaaaagtgatccctgtttactattaaaatatgtagtgtaaaattctttaaaggaaacaactcactaaatctctactaggtaagttattgtgaatttagttttcaaatcacagtaatccacataaccattattaacagctctgtttcatagaactgcaacaagccaacaaacatttaaatgcacttcacatcaagagtatgtaaactttattttttcctcttcaagccttcagaaagttaggggctatttcagcagccaatctggtcagaacctctgaaggcaaaatttcagtgcctcacagtgtatatgaccatctgttgcactgcacacatctggtagtgaagtgtcccctatcagtggcttccagtaaggcctagagtttaaggttaacataaaaaagtgccacctttgttttagattagtgatggactctgacaagataaaataaagttattctgtatattgttatacttacaagcagctccaatcctgagtatttacggtaatatctaaacatacaaaaatgtatgtacatttttctccactttcttgtaaacagttgtcagtatactgttttatccctttatcattgaaacatgcaaatcatacatacaagtataaatacacaaaagaaaacaatttacactcattcaaaagccaagcaacaaaaaatagctacagtattcaaatcataaataatgaatgcttgaggcatcttatattcctagaagcagccagccattcatcctaatgttcttagctgcaattgtagaaatactgagttttgcaccttccatgcctttacagtatttataacactatcatatgtggagataaagacttgtttactataatctcttcttttcagaatgaagaataaagtagcacttacaaatattgaagcagtggcagcaacagcaggggttaccactgctagatcagaaggaatttttccattctaacaatttttaaattaaaaaagtaaaggaaaaattgacctaaacaaattattacatgttcattccttgggcacttaacagtgagtccagcatgtcgaatgtgtctttgtagtccatatgctggctgcttgtactgtactcgtgattggcatcaggaccgttggtctccactggcttcttgtccagtttcacgagggtgctgagatgtccgtagcccacctgaacttttggaacttttgctcattttggagtggtggttgtgagatgcatcattgacatgcagcctcttccttgaagagctggagctagaggaaatgccatcactgctcaggccaacaggactcctcagaacagtgggcgggattccgtcggcactgtgtttactgccaccgctgctgctgccactatgcgagtgggaatgcttgtggctgctggtgtggtggcggcttgaaggatgctccttgtgcttctccttatggtctctgctaatatgtgggcttgaatgtttgctcttcccactgccttcatcagaagagctgtgtctttctgaagaagaaacttttattttcattttcagttcttctttactggcgcttttatcagtgggtggtattggaatccgtaatttcagtgacccactcttttcctttttatctgccatgtatttttcagtatttgcgataggtattttcattttaatgggagaagtaacagaactgctgctggctgcctgtgactgcccttgtttgtgctgctgttctacctgggcagctatataatgatcccttacatcgagatcaagagtttctagtttacgcttttctctatatttatctaaagacattttctgaggaattattcctggagtagtggaaattggcccatggtgtttactgctccctgctttatgagtatattcttgcttaacagaagaatgatctgaaattttgtcaggtctgtgatgtaatcctgaatgcagtgatatagaaggtccctgctggaagttgatgttgtactggctaccagacaaagatgtctcctgtttctgtgaatatagctgttctgtccttgctgagtcttgatgttgaggccattcctggtgtgatgataaaccgtatgaagtacttggcattcctgttgctagcattgacaaattatcagatgtatggctgtcttgaacagaaatatttcctgaatttagaggtactggcgcagggaatgctgatgtagatggtttctgaaaacttgggtttgtaggcacaccagtgacactatctactaaaatggaattctggaccaaagatgaaccaagaagtggtgtctctgatacctgtccatctacttttggtttcctagctgcctgattagccctccagtttcgaatcttcttcaacctattaggcgttttctccaatatttgtagaaactcatgtgttagctcatctaataattctagagtaactgtaggatccacatattcccaccaatgctttccagtgcagttgatacagggatctcccaattggagccatttgcaagccgaatgagtgcatacacatgctatcactgttggtttgtactgaagacaggaaggttgtaaggatgcagactgttggtagccatgaaataggatgtctgtgccaaatccttgcttgctcttactaactgggtacatttcaccacatctgtgtgtgggtgttcaatggtgatctcaaaacctagagtttgtagcattatggtttcaagtataaccagttcttgagtctgttgaaggtaagcatcacatttagtatccagcagtggctctagaggatgaagacaagcatgtgctactttgataacatgttcaagttttcgagcctgttcttccacttttgcagccaaaaataatgcagtagacgatattatatttttgttgaatttggtgaaagaatggtgcatataaaacctgtgcatataaacaatcgcagtgtttattgtaagctgagagacattgagacgctgtcccatctcctggatgaggttggccgcctgctggcggcacgagagctctttatccgcctccactccgcagcggcggctcggcgtgttctccagctgttcccgagtaaagaaccagcgagaagaagctccacggcccgacgccat

SEQ ID NO: 65297 - DNA, 3542 bp, Homo sapiens
cgatataaaggccatcttatttcttctcccactttttgtgggtgacttcttggtatccggggcttttcagtgacagccggggcgacaggccaggctgagcctgtggctccagggtccaaagagaaaggagggcagaaataagagaagatggcctttattgcagcacgaacttgagggggactgcatgtcccacagctctccagggagctgccaaaggcaacgggcccgccctgcccctgcaacaggccctccaggggcttagagcatggctcccctcaggaagggtaacgcgtgcttgtaaacaagggcccagacaacacagagaggagaggcagcatcatcatgtgcagctttgctacaagaaagatagttcttaatttcaaagaggagacaccgctacacctagccctgccctcccatgcactggaaggctctggaagtagctctcgcctgcctgggcagttaggtccacccactgcccgtgagctgggcccaggcacactgcagccacacaaaaacgctggcagctgactcctaatttcagaaacacaattagaaaagaactggaattttacatttttctcccatacattaaaaaataagaaaaagccaacattttgactgtagaccctggtaggtggcatctgactttaacctgaagttctcattggaatccttttctgtctggcgctccaccgcccacaatcagccccagccccaggatccttcggcaaggggcgcctggggctggggctcattggaatccttttctgtctggcgctccaccgcccacaatcagccccagccccaggcgccccttgccgaaggatcctggcccatctcacacaagggcgggaccccgtggagtgcccggcgagcagggcaaccactgggaagacagatactgatttccctgttggggtctgtgaccctcagcaaacgaaaaggaaacggtaacaagacggtggcctcctgccaggacctcagcaggaggtttgctggtgaaggttctgggtgagctggaatgggtgataaggcgggcttgctgggtggtggcctcaggctgttcctgggcccctgtcgcatagagccctgtgggtgcagtgtggggccccacagccgtcccggggtcgtcctgatgcataagagcagagaccccggaagagaaacccgcctgccccgtgtgatacagggctcccaaacgcttcccggtggaaccctgctcccgaggacaccttgtctcgctccacggaacccttcccccagcaccccctggaaacacagcagccaggaacaaattctccatgccaggaacgaagcccttggctaaactggagactcatcagtgcacagatggtggtgaggggtgagggcagggcgtggggtggtgctcagccctggggacaccatcactgtcctgctctgacccacaggtgagaggaggatgctgtgctcccggagtgtggcgccgggaggatggctcggcaggacagaggcctggggctgaggctatgcccagggccggtgtggggagggacatgggggcctttgcagaagcagctcagagaactgaggttggaatcctgccccaagcacaggttttggggacagcgagtgcctagacaaggcaggtaacgtggcagccaccgggctggtccagaaacaaggtgctgaagacgtcgttgaagaaggtggggtggtacctgcaggctcgctcacagtcggggttgaagttcacctccaggatctgcggctgcatcacccgccttccatctgggccgttgtcccacttcagcatgaggtcgacggcatacatggcccgggatgaggggtagtcgcagaggcccaggggtggtggcttggcacaggccacctggaacagctccgtgaaggcccggaagatctcagcctggacgtccgtccagggaaattctgggtattgcttctcaaactcggggatgaactcttcacagtgcacctgcttcagcaccacatccgggtcatagttcatgaccgtgaaagtgcttctcgtaagtcatcccaggtcgttgagtgcaaaaggcccggttggagaaccgcaagcccagaacacatcatacacgaacaaccgtaggggcctcactgaccgcagcagcacgatgtagcggatgtcgaacttgacctttcccacgtcttctcgaaggaacaacacgggactttcgatgtacttggacacaaccttgggggtgctctctcggtgccggatgatgctgtgcaggctcttggtgacgtgggtgtccaggctgcgcgccaggttccagggcttgcagatccagtggttgtcctcgccccacctttcccgctgctggaagtagctgacaaactggggcagctcagtgcgcaggttgaaggttcggggcagccagggtgggccctcggggccacctgcccgggcgcgcgatggaggccaggcagtccttgacagtcagcaggttctcgcaggggaactggttcagcagcacgcctggcctctcctggctgagtttcctgtagtccttgaagtgtgagaagttgaagaggatgtcggcgtccgcctcactctgggtgagggtgaagcgcgggtgggtgaggctgctggccacctgctgcacgtccgtgtagaccttgaagatgtggccgtgggggtgcaccacggggttgatgtcaagtggcagcttctccttgttttcctccagaatggcctggtagtgctcggcgggcggctcgggtgtgcaagagctgaggtccagcatgtcggtgggggcccagggcagcagcatgcacttccggatcagggggtccgtctctccgtaggcaaagtctcgggtcacctcctcgccagtgtccaggtccctcaggggccacagcagcgtgtaggccacctgctgcggcatgtagaagaagggtgccgtggcgaagctgggcacgtccgcgtgctggatccgcgaaccgaactcgtccatgatataccacaccggcatcttctcctcagctgtcccatgggccagctggtaggtctggttgaacttccacatctcctccagcaccagggccacagcctctgtactgggcagctcaccgtggaactcaatgcccatcaggttggccatgcggtgcagcagcccgggcacctgctgcagctgctggcgcgcgtgctccacacggcacgtccaggcgtggtcgatgaggaagatgctgttggggtgggctgcctggagcccgctctccctggtcacgatgaccttgtagcacagctcgttccccgggttgggctgctgcttccgcacctcccgggctgcctcgtcctcctcctcttctacctcctccacttgcatgatcccaaacacttccccagcgtcgaaaacctcgtgctccagcttgtgcaggaggcggccccagtaacgttcggggacccccgaagcgcgcagcgccgggccgtgcagcgccgcgaactcggccaaggcctgcgcgccctcctccggcgtctggcccgggctgctacgctccgcaggccggcgctcggg

SEQ ID NO: 65298 - DNA, 2487 bp, Homo sapiens
  misc_feature (1)...(2487): n = a,t,c or g
ttttttttttttactatctacaaaaatttattatatatttacagaagaaaagcatgcatatcattaaacaaataaaatactttttatcacaacacagtacatatttgtcatttttaaaaagccacacaatagaaacaagacaccaagatatttaattatcttgttgactcctgtaaaatagctaaacactcatcattcgcggtgcaatactcatagacataagttcctgaaacaatagtttgcatgcgtaaggcattcgcaccaaagaaatctgggttttattgcggcagcccctgcattcatatgtatgggtcctggtgttggcaatcgccattattccacaaagattgcaaacatgaacctgatatggatctgatgcctcaaacaatctttcccttaaaaactgggctgctccatgggcaatctgacaatctcgttccatttctccaaaacgcaggccaccatcacgagatctaccctccatgggctgtctattgaggatctgaataggtcccctagcacgagagtgaatcttatcatccaccatatgcttcaaacgctggtaataagtggggccaataaatatttgtgatgtgatttttcgaccagtgaacccattgtacaggacctcatttcctctgagatgatagccataatcagataaaagattagaaatcttctgcacgttaacagcatcattaaatggagtggcatcaccaatttcacccttgttagccgataccttcccttgaaggcattcaattaagtgaccaatagtcatacgagaggggatggcatggggattgatgatgatatcaggggtgataccttcacaggtgaaaggcatatcctcttgtctatactgaataccacaagtacccttttggaccatgtcgaactagcaaattgtctcccaatctgtgggaacccctaacagagcgtaccccttattttaacaaaatttaatatcccttccctggattgaagagttacccataacctgatcccacaatgcccgtctcactagttcctgagaaaagtgctacagtctcttcttggtatagcggtctattggtgctctcccaaattcatcttcattttccaggcaaggtgactgttttgcctataataacatcatctcctgataccacgaaccccctgggagctatcaaaaccnatcatcatccagcttgtcgtaaatggcatgcgcgtcntgccctggcatggttcacgtgtaggcttctcaaaaacttcttcttgatcaaatccttttttagactcctgttctttgtatgagcgatagaaaacagacctgaagaagccgcggtcctacagctgaacgattcatgataacagagtcttccctgattatatcccagtgtatgatgcaatggccacaattgagttgatgcctgctggcagctctctaaatcgtagatattccatagaccgtgtagtcacaagtggcttttgaggataatagagaacatgggccaatgtgtccatgcgaacatggaagttggtgatgtaaactcccatagcctgcttacccatagcagactggtatgtgtttctaggggactggttatgatcaggaaagggaataatagatgcacagacaccaaggatcattgagggatgaatctcacagtgtgtatatgtggaacaataagctacttctttctcctgtaaatcatctggagtcattgcaagcatcactgtttcttcttccagggtatcaatatactccactaccccactggccacaagatcctgccaactatagttgttatattctctctctttcaattggtcaatatgcctcttcttcaaaagtagcttttgtttttccacaatcagaagtggtctacaaatacggcctgcatccgtatagatccgaatctccctctctcgaatatctctgatcatagaaacttcagacacaatgatgtccatctgacgtctcaatttccttagggtgttcataagttgttcgggatctttatgtattccaacccagcagccattaacaaaaatcttggttgcatcagcaatagctgcaggagaaatttcttctaaattttccatactccattcttctaaaaattccagaattggagatggttgagatccaactgaaatatacgccatcaaggctaaattcttcacaagtcctacagcatggccctctggggtctcggcaggacacaccattccccacaacgtattatgcaactgtcttggttttgctagcttgccgtctctaccaataggagaatttaaacgacgcaggtgagaaagagtagacgcaaaagtcaggcggtttaacacctgagatactccagctctggcttgatgagctttcttttgatcaccccagtttccagtagctaaagagtattttaggccatcagatatgatccgtgttttaattgccaactccaagttaaaatcctttcctcgatcaataaatttctgtgcatagat

SEQ ID NO: 65299 - DNA, 1333 bp, Homo sapiens
aagcttggcacgagggtcttgtcagcagcccggccattggagcatatctttctgccagttacggagacagcctcgttgtgctggtggccacagtggtggctcttctggacatctgcttcatcttagtggctgttccagaatctctgcctgagaaaatgagaccggtttcctggggagctcagatttcttggaaacaagcagacccttttgcgtcgttgaagaaagttggaaaagattctactgtcttactaaatctgcatcaccgtgtgtctttcataccttcctgaagctgggacagtattcaagttttttttctctatctcagggcaggtcatagggtttgggatctgttaaaattgcagcattcatagctatggtaggaattctgtctattgtggctcagacggcctttcttagcatcttgatgagatcattaggaaataagaatactgtcctccttggcttgggcttccagatgctccagttagcctggtacggttttggatcacaggcctggatgatgtgggcagcagggaccgtggctgccatgtccagcatcacgtttccggcaatcagtgccctcgtctctcggaatgcagagtcagatcagcaaggagttgcccaggggatcataactggaataagaggactatgcaatggcctggggccagcactgtatggcttcatattctacatgttccatgtggaactgactgagttgggcccgaaattgaattctaacaacgttcccctgcagggagctgtcatcccaggcccgccgtttttatttggggcatgtatagtccttatgtcttttctggttgccttattcattcctgaatacagtaaagccagtggagttcaaaaacacagtaacagcagcagcggcagcctgaccaacaccccagaacggggcagtgatgaggacattgagccactactgcaagacagcagcatctgggagctctcttcatttgaggagcctgggaatcagtgcactgagctgtaaactcggcagaaagtgggattctgcatacgccatctctgagagccatggagggagccacacccctggtgacttcatggtgctggatgggagacgctagcggcatccttcagggccaagtttgataaataccaccgccatcattctgctcatcctcctcctgtttttttttttctcttacattcttttttttttcccggttaatccttaaaaccagaaaaaaattggaaaaacttctttgcaaaaagggggcaactcccagggggaacctcaaataaaaaaagcattcttttgtgaaaaaaggagggcttccttgaaaggacaaaa

SEQ ID NO: 65300 - DNA, 2127 bp, Homo sapiens
tgctcattggggcccaggtgctcctgggcatcggtgctacccctgtgcagcccctgggcgtctcctacatcgacgaccacgtgcggaggaaggactcctcgctctatataggaatcctgttcacgatgctggtatttggaccagcctgcgggtttatcctgggctctttctgtaccaaaatctacgtggatgcggtcttcattgacacaagtaacctggacatcactccggacgacccccgctggatcggagcctggtggggtggctttctgctctgcggtgccttactcttcttctcttccctcttgatgtttgggtttccacagtccctgcccccgcactcagaccccgccatggaaagcgagcaggccatgctctccgaaagagaatacgagagacccaagcccagcaacggggtcctgaggcaccccctggagccagacagcagtgcctcctgtttccagcagctgagagtgatcccgaaggtcaccaagcacctgctctcaaaccctgtgttcacctgcatcatcctggccgcctgcatggagattgcagtggtggctggcttcgctgcctttttggggaagtacctggagcagcagtttaacctcaccacctcttctgccaaccagctgcttgggatgactgcgatcccgtgtgcttgtctgggtatcttcctgggaggtcttttggtgaagaagctcagcctgtctgccctgggggccattcggatggccatgctcgtcaacctggtgtccactgcttgctacgtctccttcctcttcctgggctgcgacactggccctgtggctggggttactgttccctatggaaacagcacagcacctggctcagccctggacccctactcgccctgcaataataactgtgaatgccaaaccgattccttcactccagtgtgtggggcagatggcatcacctacctgtctgcctgctttgctggctgcaacagcacgaatctcacgggctgtgcgtgcctcaccaccgtccctgctgagaacgcaaccgtggttcctggaaaatgccccagtcctgggtgccaagaggccttcctcactttcctctgtgtgatgtgtatctgcagcctgatcggtgccatggcacagacaccctcagtcatcatcctcatcaggacagtcagccctgaactcaagtcttacgctttgggagttctttttctcctccttcgtttgttgggcttcatccctccacccctcatcttcggggctggcatcgactccacctgcctgttctggagcacgttctgtggggagcaaggcgcctgcgtcctctacgacaatgtggtctaccgatacctgtatgtcagcatcgccatcgcgctcaaatccttcgccttcatcctgtacaccaccacgtggcagtgcctgaggaaaaactataaacgctacatcaaaaaccacgagggcgggctgagcaccagcacagagtaccaagacattgagactgagaaaacctgccccgaatcacattcaccttcagaagactcctttgtgagaagctgagggcctggccctcttcctcttcctggagagaacagccctccaccacccacagacctcgcgggcctcacttagcgtgctcctccctgtccgagaacccgagggtccccatgtggattatccagccagtgtgtggtcctttgaggccccaagcgcaggcctgtgatgaggaccaaagaggtgacttatggtcaggagtactccaaacagctctcagagtaggcatctttcctgggtctctaaagagtcatgctgacctggtgtgcaaattcccttccacccatccctctacctcctctggggatggcttgccgacatgctttagaaactcccctcttgggaatgctcctctgactgagggctccaacagctttaatgaaatcagccgagagggtaaaaaccaacctgttgcattgaatggaggggggaaaaagcacatactcaatagatttttgagtgtggtactctgtatttttgcagcgtttattttccaaatgagcagtttagaaatatgtgatgtaaagtacatactgtacgtttgctgaaaattatattaaaagcactattttaattcttaaaaaaaaaa

SEQ ID NO: 65301 - DNA, 2578 bp, Homo sapiens
atggcggcaggcctggccacgtggctgccttttgctcgggcagcagcagtgggctggctgcccctggcccagcaacccctgcccccggcaccgggggtgaaggcatctcgaggagatgaggttctggtggtgaacgtgagcggacggcgctttgagacttggaagaatacgctggaccgctacccagacaccttgctgggcagctcggagaaggaattcttctacgatgctgactcaggcgagtacttcttcgatcgcgaccctgacatgttccgccatgtgctgaacttctaccgaacggggcggctgcattgcccacggcaggagtgcatccaggccttcgacgaagagctggctttctacggcctggttcccgagctagtcggtgactgctgccttgaagagtatcgggaccgaaagaaggagaatgccgagcgcctggcagaggatgaggaggcagagcaggccggggacggcccagccctgccagcaggcagctccctgcggcagcggctctggcgggccttcgagaatccacacacgagcaccgcagccctcgttttctactatgtgaccggcttcttcatcgccgtgtcggtcatcgccaatgtggtggagaccatcccatgccgcggctctgcacgcaggtcctcaagggagcagccctgtggcgaacgcttcccacaggcctttttctgcatggacacagcctgtgtactcatattcacaggtgaatacctcctgcggctgtttgccgcccccagccgttgccgcttcctgcggagtgtcatgagcctcatcgacgtggtggccatcctgccctactacattgggcttttggtgcccaagaacgacgatgtctctggcgcctttgtcaccctgcgtgtgttccgggtgtttcgcatcttcaagttctccaggcactcacagggcttgaggattctgggctacacactcaagagctgtgcctctgagctgggctttctcctcttttccctaaccatggccatcatcatctttgccactgtcatgttttatgctgagaagggcacaaacaagaccaactttacaagcatccctgcggccttctggtataccattgtcaccatgaccacgcttggctacggagacatggtgcccagcaccattgctggcaagattttcgggtccatctgctcactcagtggcgtcttggtcattgccctgcctgtgccagtcattgtgtccaactttagccgcatctaccaccagaaccagcgggctgacaagcgccgagcacagcagaaggtgcgcttggcaaggatccgattggcaaagagtggtaccaccaatgccttcctgcagtacaagcagaatgggggccttgaggacagcggcagtggcgaggaacaggctgtttgtgtcaggaaccgttctgcctttgaacagcaacatcaccacttgctgcactgtctagagaagacaacgtgccatgagttcacagatgagctcaccttcagtgaagccctgggagccgtctcgccgggtggccgcaccagccgtagcacctctgtgtcttcccagccagtgggacccggaagcctgctgtcttcttgctgccctcgcagggccaagcgccgcgccatccgccttgccaactccactgcctcagtcagccgtggcaggcatgcaggagctggacatgctggcagggcttgcgcaggagccatgccccttcagagccgctccagccttcaatgccaagccccatgacagccttgacctgaactgcgacagcgggggacttcgtggctgccattatcagcatccctacccctcctgccaacaccccagatgagagccaaccttcctcccctggcggcggtggcagggccggcagcaccctcaggaactccagcctgggtaccccttgcctcttccccgagactgtcaagatctcatccctgtgaggggtaggcctgctgattcagagggtcctcttcatttttgggaactcctttccaaagccatatttttgggaggcagagaggggcaggcttgggcaccccttctgccccccccactgagaactatgcaatggagtttcatgaaatggtccacatagtggggaagtagccaggaaatgagaaacttcctcccaccccagacatttttcctggtgggagctgaagcactgggcttccacaggcccctggcctccttgccctagcacactgggactggccccactctcccagctggactcctgcatgctcctccccttgggctctcagatgaaggcaaagctttgatccgacatctgagctctagcctaagaaggagagttgagatttcctcctccctctggctgggatatggagctttggaggttcagagaagagaaccctcacctctgatctggcctctacgagaggtcctcatctccatctggcccaacaattcccagattctgaagcttgggaatgcaaacacaggcttcatggggctgtggccttctggcaggcgacctgccatccccagggccttgcctgagggggttcaggcttgccttttcccaacacacactcagataggcaca

SEQ ID NO: 65302 - DNA, 1380 bp, Homo sapiens
gcatgtggtctgtgtgtggggtggagggctgggggtgttggcaagtctcacaggtgaggacccaacgagggaatcagacaaaaagtggccacaaattaggcagctccaggaaggacatgtccttgccatagtaagatgttctgctcacgcgtatccacgagaaagccccgcatttcacggggagcatagaaacaggagtccccaactctgctcaccagctcctccggctgctgccatctgctcctgcagcatggcggcctgggaagcctgcactggtgattttctgccactcaagttttgcagacttcgggaagatggatgcatagcctggggcaatgacagtcacaggcccgccttgtcacaaggtccctggagcgggcaatgccttgagcccaaaggctgggagcacaaagccatcttcagccatcctcgatttccagcaagaccccagggctcacccaacagcccgacactccatactacaaggtgggttaattttttaaaagactctgcagaaatataccaactacagagctcaggaaagcaactgatttataaaacccaatccaagttgtttgcttttatagcattagagacatgtctgaagaacttcaagtttttatctatagaaacataattagtttaataaattactaggtctattttgaatatctaaattgagtacttttattagacctaagtggaactttatctgaatctgaattttccaaggggccagtgtagagtgacacaggtgtccgaggccacctttccatcttcagacacccccccgtctctctgcacagggagttggccttccagtaggtgttgctcttctgtcttgacgtctcctggaaagatttttatctctattttcctgtggtggggttttccacgagctaattctttctatttttaaactcattggctttggaggagctgaattgttagatgacgatctttgtccccaggaagagtggccactctggattcttgtggccagcgtatttgggtattgtctcttcatcagctgacagaggtgaaatttttccaaaagcaggttccaatgccagagtgtgcgattcttgccccgcgtgtggggacgctgcagatttcttcctggctttccaccgctgcagctgcagagctctcagcttttctcggagctccatgttctgctccctcaaagcatctatatgactccggagttttccatgaacatcagcccacagagacttctgtctcccaagctcttggtggagtctgatgatctgctgctgtaatggctggtccccaacagtcactactgccaggatcagatcatctgggccatgtccccacagttgtccccaagccctcctgcctcatatccctcgtgcc

SEQ ID NO: 65303 - DNA, 715 bp, Homo sapiens
gcacgagcggccgctcacgctgcattaccgccagaatggtgcccagaagtcctgggacttcatgaagacgcatgacagcgtgaccgttctcttattcaactcttctcggaggagcctggtgttggtgaagcagttccggccagctgtgtatgcgggtgaggtggagcgccgcttcccagggtccctagcagctgtagaccaggacgggcctcgggagctacagccagccctgcccggctcagcgggggtgacagttgagctgtgtgccggcctcgtggaccagcctgggctctcgctggaggaagtggcttgcaaggaggcttgggaggagtgtggctaccacttggccccctctgatctgcgccgggtcgccacatactggtctggagtgggactgactggctccagacagaccatgttctacacagaggtgacagatgcccagcgtagcggtccaggtgggggcctggtggaggagggtgagctcattgaggtggtgcacctgcccctggaaggcgcccaggcctttgcagacgacccggacatccccaagaccctcggcgtcatctttggtgtctcatggttcctcagccaggtggcccccaaccctggatctccagtggagactccagggttctagacagaggccagtcttggccactcaccccacaccccgcggaccccaataaaggcttgcatagctccaaaaaaaaaa

SEQ ID NO: 65304 - DNA, 6388 bp, Homo sapiens
cttccccctgttaccatgtcagggaaatatataatggaagaacatgatagttattcggatcaggtgtggagtatagatgaactgccttctaaacaaggttactatttacagggaaattatctgcgttgtgtggcagaagttggttcctttgaacataatcttacaactgatcttctaaaccacttggtatttgtacagaaagtgttcatgaaggaagttaatgaagtaatacaaaaagtttctggtggggagcagcctattcctctctggaacgaacatgatggaacagcagatggagataaacctaaaattctcctctattccctaaacttgcagttcaagggtattcaagtaacggccactactccatcaatgagagctgtaagatttgaaactggattgattgaactggaactttctaaccgacttcaaaccaaagcttcaccaggaagtagcagctatctgaaactgtttggcaaatgccaggtggatttaaatctggcattaggacaaattgtcaaacatcaggtttatgaggaagctggttctgattttcatcaagttgcctattttaaaaccagaattggattaagaaatgccctccgagaagaaatcagtggttcttcagatagggaagctgtgcttattactttgaatagaccaattgtttatgcacagcctgtggcctttgatagagctgtgctgttttggctgaattataagggccgcctatgacaactggaatgaacaacgaatggctttacataaggatattcatatggctacaaaggaagtagtagatatgctacctggtatccagcaaacatcagcccaggcctttgggactccttttctccagctcactgtcaatgatctgggaatttgcctacctatcacaaatactgcacagtctaatcatactggagaccttgacactggttctgctttggtattaaccattgaaagtactctcatcactgcatgctcttcagagtctctggttagcaaagggcatttcaaaaacttttgtatccgttttgctgatggatttgagacatcatgggatgactggaaaccagaaattcatggggatttagtgatgaatgcctgtgtagttccagatggcacctatgaagtatgttcaagaactacaggacaagcagcagctgaaagcagtagtgctggaacctggacactcaacgtattgtggaaaatgtgtgggattgatgttcacatggatcctaacattggcaaaaggcttaatgctctgggcaatactcttacaacactgacaggagaggaagacatagatgacattgctgacttaaattcagtgaacatagctgacctgtcagatgaggatgaagttgatactatgtctcccactatccatactgaagccacagattatcgaagacaggcagcatctgctagccagccgggagaacttagaggaagaaaaattatgaagcgtatagtggatatcagagaactgaatgaacaggccaaagtaatagatgatctgaaaaaattaggtgcaagtgaaggaaccataaaccaggaaattcaacgttaccaacagttagaatctgtggctgtgaatgacattagaagagatgttcgtaaaaaattacggaggtccagtatgcgggctgcttccctaaaggataagtggggtttgagttacaaaccaagttacagccgatcaaaaagcatttctgcttctggaagaccacctcttaagcgaatggaaagggcaagttctcgagtaggagaaactgaagagctcccagaaatccgtgtggatgcagcatctcctggacctagagtaacttttaatatccaggatacatttccagaggagacagaactggaccttttgtcagtaaccattgaaggtccatcccattattcatcaaatagtgaaggatcatgttctgtgttcagttctcccaaaactccaggaggcttttcaccaggcattcctttccaaactgaagagggccgacgggatgacagtttgtcttctaccagtgaagattccgagaaggatgaaaaagatgaagaccatgagagggaaaggttttatatttacaggaaaccctcacatacgtctcgtaaaaaagcaacaggctttgctgctgttcatcagctatttacagaacgctggccaacaacaccagtcaatagaagtcttagtggcacagctacagagagaaatattgactttgaacttgatatacgggttgaaattgatagtggaaaatgtgtactccacccaaccacccttctacaagaacatgatgatataagtttgagaaggagttatgatcgaagttccaggagcttagatcaagattcaccttcaaaaaagaagaagtttcaaactaattatgcttctaccacccatttaatgaccggcaagaaagtgccatcatctctacagacaaagcctagtgacttagaaacaacagtattttacattcccggagttgatgtaaagttgcattacaattccaagacgctaaagactgaatcacctaatgcctccaggggatcttccttgccaagaacactgtccaaagagtccaagctgtatggtatgaaagatagtgcaacatctcctccttctcctcctttaccttccactgtccagagcaagactaacaccttacttcctccccagcccccacctattcctgcagccaaaggaaaaggaagtggaggagtaaaaacagccaagttatatgcctgggtagcacttcagtcattgccagaagaaatggttattagtccctgcctattagactttctggaaaaagctctggaaactatcccaattacaccagttgaaaggaattatacagctgtcagctcacaagatgaagatatgggacattttgaaataccagatcctatggaagaatcaacaacatcactagtgtcgtcttcaacatctgcttactcttccttccctgtagatgttgtggtttatgtacgagttcagccctcacagatcaaatttagctgtttaccagtatcaagagtagaatgcatgttaaagctgccatccctggatttggtgttttcttcaaaccgaggagaactggagactttagggactacatatcctgcagagactttatcccctggaggtaatgctactcagagtggaacaaagacttctgctagcaaaactggaataccaggttcatcgggattaggcagccctcttggccgaagtcgacatagtagtagtcagtcagacctgaccagttccagcagtagttcatctggcttgagcttcactgcatgcatgtctgacttttccctttatgtatttcatccatatggagcagggaaacaaataactgctgtttctggcctcacacctggatcaggaggattagggaatgtggatgaggagcccacttcagtcactggtcgaaaagattcactcagtataaaccttgagtttgtaaaagtgagtttgtcacggatcaggcgttcaggaggtgcctcattttttgaaagtcagtctgtaagcaagtctgcaagcaaaatggatactacgttaataaatatatctgctgtttgtgatatagggtctgcctcctttaaatatgatatgcgccgactcagtgaaattctggcatttccaagagcatggtatagaagaagtattgcaagacgtctattccttggagaccaaactataaatttgccaacatctggcccagggacacctgattccattgaaggggtaagccaacacctttcccctgaatcatcaagaaaagcttactgcaagacctgggagcagccaagtcagtcagcctccttcacccacatgcctcagtcacctaatgtgttcaatgagcatatgacaaacagcaccatgtcaccagggacagtaggacagagcctaaaatccccagcttccataagatcaaggagtgtatctgattcttcagttcctcgaagagattcactttcaaaaacatcaactccttttaacaaatcaaacaaagcagcaagccaacaagggaccccatgggaaacacttgtcgtgtttgctatcaacttgaagcaattaaacgttcaaatgaatatgagtaatgtaatgggaaatacaacttggacaactagtggtttgaagagccagggccgtctgtcagtaggaagtaatcgtgatcgagagatcagcatgtctgttggtctgggaagatcacaattagattctaaaggaggagtagttggagggaccatagatgtcaatgctttggagatggttgctcatatttctgaacatccaaatcagcaacccagtcacaaaattcagattactatgggttctactgaagctcgtgttgattacatgggctcaagtatcctcatgggcatcttcagtaatgctgatcttaagcttcaggatgaatggaaagtaaacttgtataatacattggattcaagcataactgataaaagtgagattttcgtccatggagatttgaagtgggatattttccaagtaatgatatcaaggtcaaccacaccagatctgataaaaataggaatgaagctccaggaatttttcacacaacaatttgataccagcaaacgagctctgtctacctggggaccagttccttaccttccgccaaagacaatgactagcaacctagaaaaaagttcacaagaacaattacttgatgcagcacatcatcgacactggcctggagtattgaaggtggtatcaggatgccacatatccttatttcagattccattaccagaagatggaatgcaatttggaggatcaatgagcttacatggaaatcatatgacactggcatgttttcatggtccaaattttcgttcaaaatcttgggccctttttcatttagaagaaccaaatattgctttttggactgaagctcagaaaatctgggaagatggctccagtgatcattctacatatattgtacaaacactagattttcacctgggtcataatactatggttaccaaaccatgtggtgctttggaaagtcctatggcaacaataaccaagataacaaggcgtcgccatgaaaatccaccccatggagtagcaagtgtgaaagaatggttcaattatgttacagctacaaggaatgaagagctaaatctgcttcgtaatgttgatgctaacaacactgagaatagcactactgtgaagaattctagtttgttgagtggattcagaggaggttctagctacaaccatgaaacagagactatctttgcattaccaaggatgcagcttgactttaaatccattcatgttcaagaaccacaggagccttcattacaggatgccagcctgaagccaaaagtagaatgtagtgtggtgacagagttcactgaccacatttgtgtgactatggatgctgagctcatcatgtttcttcatgatttagtatcagcttatcttaaagaaaaagaaaaagccatctttccacctcggattttatctactcgaccaggacaaaaaagtccaattattatacatgacgacaattcctctgataaagatagagaagatagcatcacttatactactgtggactggagagattttatgtgcaatacatggcatctagaacctactcttagattaatttcttggactggaagaaagattgatccagtaggtgttgattatattcttcaaaaattgggctttcatcatgctaggactactattcctaaatggcttcaaagaggagtcatggatccactggacaaggttctgtcagttcttatcaaaaagctcggtactgcactacaggatgaaaaggaaaagaaaggcaaagacaaagaagaacactaaaaaagtaatttgatctgtgaacaaattatgattgtgtctgttttattacactggagtgtttttttagtataataatttgaaatataactttaaaataattctaaatttgtggctataattaaaagtttgtaagttaacctgttctagttccatcattctgtgtacagtgaagtattgcatgataatgtaaattttgtgaaaaactagattaaaatatataactgcttgttatggtttataattatataatgtgcaatacaattcctgcatctttaaaatgtctgcagaataactgtgaatttttttgttattggattggccgtaacttttagaaaaaaatcttgttgatgataatgtgattttggggaggtcattaattgctttttcttttttaaatgtagacttatataaatacctgtttgtatatagcttgagtaattgtgatatgattgtataccactaaaatattgttaactattataataaagtcacagtaatggtttaaaaaaaaaa

SEQ ID NO: 65305 - DNA, 1862 bp, Homo sapiens
tttcgtgcaacctccacctcctgggctcaaacaattctcctgcctcagcttcccgtgtagctgggactacaggtgtgcaccactacgctgggctaatttttgtattttttggtagagatggggtttcgccatgttagccaggctgctcttgaactcctgacctcaagtgatccacccgcctcagcctcccaaagtgctaggattacagatgtgagacaccgtgcccagcctcatatattttttgatgaaagtctgctgaggatgaattctgtccacttttattatctgaaaacatctttattttgcctcattttaaatagtatttagattgggtgtagacttctatattgccaattagtttcttttagcactgtaaatacagatgtccagtattttcagattcagttatttcagctgaaaagctagctgaaagtcttgttgctcctctgaaggtaatatgacttttttcaaaaaatacatttataaaattttttttctttgccttgatagttgtactacaagggtgcctggatgagactttctctgaatttgtcttgcttggggttcatagaatctgtgacttgatgtctttcatgagttttgaaaaatgctagcctttatctcttaaatattgctattactctactccctcttctctttcagatatttcagttacaccaatggccaatgtttgctcatgtctcatatgtctcttgttctagtttctggatttgtattcttttttccttttcacattcagtctggatattttctgctgacctatattccagttcactaataatgcttttcactgtatctaatttgcttataaatagaaaaccattgattgagttattaatttcagttatagaatagccagtgtagactccaatgcttggctccacttctccactttttcgcctatttttttcaccatcttccattttcttcaacacaccagtcagagtcatttttaaagacattttaaacacctcagtggcctgtagatcttatcttctgttttttgtttctttttaatcttagttttttggcacacttggagggttttgattgaatgctagacatagtattcaggaaggcagagaggatttttttttaagtcagattttttgaggtataatttaatacagtaaaattcacctattttagttcagttctaagagtttcctctgtgacttttcctttggcccatggtttatttaaaattgtgttcttttacttccaaattatttgggatttttctagatatctttctgttcttgatttctggcttacctctatcagggtcagagaacaaacttaatatgatttcaattattttaaatttgccaatgtttattttatggcccagaatatggtctatgttggtgaaagttcaatttgaacttgaaaagaatatgttttatgctgttgtctactgaaaagtctatatataaaaaatagattaataaactgattaatagcctggttcaccactttcgtagccttactgattttctggttagtcattctgttgattactaacagattctctaacagagaagtataagctttctaactataatggtgggttaatctgtttctcgtttcagttctagcagatgtttcctcaatttttgacgttgcatttttaggtgaatgcacttctggaattgtattgtgtccttgctgaattgtcccttttatcaacatgtaatagcaccctttattcttgataatagtctttgttctgaattttactttgtctgttattcctatagcctttccaattttctttcgcttggattttacgcgataagttttttcccccattttactttttagcaactttatatttttta

SEQ ID NO: 65306 - DNA, 2072 bp, Homo sapiens
tttagtgcagtatcctgaatttagattcacacagagttttaaatagttttatttaaaaattggtggagggaaacccataatttgaataatggagtctcttaaattcagtctgaattggactgcttgcattggtctgtcaggtgataactaaatttccctttcagttggtcctgttgaaacggaaccataaaatgactgtgatattacttatccaacataagaaggaaatcagcattttatttacattttatccctgtttcaatacacaaaagcaactccaaagtgaattgtttgagatttaaggtttgcttaactcttcccaaccctttggcttttagatttgcttggaacggtagaagaaatccttccaagcctctcagaaaatatcagtgtttgggggatgaaagattctgttccacaaggtgtaatttcactcaaagaaaaactgagcacctcacctgatgagcccgtgccacgcagccaccatgttgtctcactcctcaagtctacttgtctttacatttttacctctggaacaacaggtctaccaaaagcagctgtgattagtcagctgcaggttttaaggggttctgctgtcctgtgggcttttggttgtactgctcatgacattgtttatataacccttcctctgtatcatagttcagcagctatcctgggaatttctggatgtgttgagttgggtgccacttgtgtgttaaagaagaaattttcagcaagccagttttggagtgactgcaagaagtatgatgtgactgtgtttcagtatattggagaactttgtcgctacctttgcaaacaatctaagagagaaggagaaaaggatcataaggtgcgtttggcaattggaaatggcatacggagtgatgtatggagagaatttttagacagatttggaaatataaaggtgtgtgaactttatgcagctaccgaatcaagcatatctttcatgaactacactgggagaattggagcaattgggagaacaaatttgttttacaaacttctttccacttttgacttaataaagtatgactttcagaaagatgaacccatgagaaatgagcagggttggtgtattcatgtgaaaaaaggagaacctggacttctcatttctcgagtgaatgcaaaaaatcccttctttggctatgctgggccttataagcacacaaaagacaaattgctttgtgatgtttttaagaagggagatgtttaccttaatactggagacttaatagtccaggatcaggacaatttcctttatttttgggaccgtactggagacactttcagatggaaaggagaaaatgtcgcaaccactgaggttgctgatgttattggaatgttggatttcatacgggaagcaaacgtctatggtgtggctatatccaggttatgaaggaagagcaggaatggcttctattattttaaaaccaaatacatctttagatttgggaaaaagtttatgaacaagttgtaacatttctaccagcttatgcttggtccacgatttttaagaattcaggaaaaaatggaagcaacaggaacattcaaactattgaagcatcagttggtggaagatggatttaatccactgaaaatttctgaaccactttacttcatggataacttgaaaaagtcttatgttctactgaccagggaactttatgatcaaataatgttaggggaaataaaactttaagatttttatatctagaactttcatatgctttcttaggaagagtgagaggggggtatatgattctttatgaaatggggaaagggagctaacattaattatgcatgtactatatttccttaatatgagagataattttttaattgcataagaattttaatttcttttaattgatataaacattagttgattattctttttatctatttggagattcagtgcataactaagtattttccttaatactaaagattttaaataataaatagtggctagcggtttggacaatcactaaaaatgtactttctaataagtaaaatttctaattttgaataaaagattaaattttactgaa

SEQ ID NO: 65307 - DNA, 2199 bp, Homo sapiens
  misc_feature (1)...(2199): n = a,t,c or g
atgcgaggcttcgggccaggcttgacggccaggcgtctcctcccgctgcggttgcccccgcggccgcccgggccccggctggcgagcgggcaggcggccggcgccctggagcgggccatggacgagctgctgcgccgcgcggtgccgccgacgccggcctacgagctgcgcgagaagacaccggcgcccgccgagggtcagtgcgcggacttcgtgagcttctacggtgggctggccgagacggcccagcgggccgaactgctgggccgcctggcgcggggcttcggcgtggaccacggccaggtggcggagcagagcgccggcgtgctccatctgcgccagcagcagcgggagtcggcggtgctgctgcaggccgaggtccggctgcgctacgcgctggtgccgcgctatcgcggcctcttccaccacatcagcaagctggacggcggcgtgcgcttcctggtgcagctgcgggccgacctgctggaggcgcaggccctcaagctggtggaggggccggacgtccgggaaatgaatggggtgctgaaaggaatgctctcagaatggttttcctccgggttcctgaacctagaacgggttacctggcattcaccgtgtgaagtgcttcagaaaatcagtgaggctgaggctgtgcatcctgtaaaaaactggatggacatgaagcgccgcgtttgggccctacagaaggtgttacttcttttctcactgttcgacccctggggagcccctggtcgttttgcacgtggcactgactggtgacatctccagcaacatccaggcaatcgtgaaggaacatcctccatcagaaacagaagagaagaacaaaatcactgctgcgatcttttattccatcagcttgacccagcagggactccaaggggtggagctgggaacattcctcaataaagcgagtcgtcaaggagttgcagagagagtttcctcaccttggggtgttttcaagtctgtcacctatacctggtttcaccaaatggcttctggggcttctgaactcgcaaacgaaggagcatgggaggaatgaactctttacagattcggaatgtaaggaaatctcggagatcacaggtggccccattaacgagaccctcaagctcctcctcagcagcagcgagtgggtgcagtcggagaagctggtgcgggcgctgcagactccgctgatgaggctgtgcgcctggtacctgtatggagagaagcaccgcggctacgcgctgaaccccgtggccaacttccacctgcagaacggggcggtgctgtggcgcatcaactggatggcggatgtgagcctcagaggcatcaccggctcctgcggcctgatggccaactaccgctacttcctggaggagacgggccccaacagcacctcctacctcggctccaagatcatcaaagcctctgagcaggtcctcagcctagtggcccagtttcaaaagaacagcaagctctgacagtaaacctctcctaaagcacagggccccggctaagaaaacgatcattttcaggaggggccgggagttatgtatctgaagcagctttccaagcaaagccaaagttgactgtgttcttgtcccgcagccggtccacactgtgaggccaggcctcaacttccctcaccctgggcgtgacatgcacccagtgcaagacggttgtggggtgcgggtgcacacaaatgagtgggttgctgtgctgtctccggaagattctgtcgttgcccttggccctggctccctgcccggggctggtgctgtggtacctacatcttcaggaagctgtgcagcctctgccattgccaatcccagggggaatctggcatccttccttaaggacccggggcgcgtgtgccccagataagaataggtgtaccctttgtgctcataaaacaagaatgccggcgaatgggttgcttttaaccngtttctcacccttgcaattgcagagggacaaagggctgtgcctacacttccccagttacattctgaagcctcataaatgtatgagaaaggtttgtgaattttgcacaaggtgtgtgtagtaagttaaattgttgaacacaaaaatgttgctgcttgaggcataagttggataataggctttaaatgatcagggattcaggttcataatgaacttcacagtaaagaacacgtttgttctgtaaaaaaaaaa

SEQ ID NO: 65308 - DNA, 6926 bp, Homo sapiens
cgccgagtccgacttgcagctggcccagatcaaatgcaacctgggccgggccgtgcagctccaagagctgtggcccgggggcctcttctggaccaggaaactctccacatatattcgactttatgggagaaaatttagcaaagaagatcatgttctttttattaagttattgtatgagctggtatcaattccaaaactggaaatcagcatgatgcagggatttgcccgccttttgatcaacttgttaaagaaaaaggaacttctttcaagagctgatttggagttaccctggagaccactttatgacatggtagaaagaatattatattccaagacagagcacctaggattaaattggtttcctaattctgtagaaaatattctcaaaacactcgtgaaaagctgccgaccatattttccagcagatgccaccgctgagatgctagaagaatggcgacctttaatgtgcccttttgatgtaaccatgcaaaaggccatcacttattttgaaatatttcttcctacctcccttcctccagaacttcatcataaaggttttaaactttggtttgatgaattaattggcctttgggtttcagtgcaaaatctcccacaatgggaggggcaactagtaaatctctttgctcgattggctacagataatatagggtacatagattgggatccatatgtaccaaagatatttacaagaattctgagaagcttgaacctcccagtgggaagcagtcaagtgttagtcccaagatttttaacaaatgcgggaggatataggacatgccgtaatatggatcaccgccatgatgggtggaccaagtaagctagtgcaaaaacacttagctggtttgtttaacagcatcacatgtttttaccatccttcaaataatgggcgctggctgaacaagataatgaaactacttcatcggttgccaaacagtgttgttagaagattgcatccgtgaaagatacaagaagccctcttggataactcctgtgcctgatagccacaagcttactgatcaagatgttacagactttgtaccatgcattattcagcctggcctcttggctatttttaacaaaaaccggtagtgctagaagcaatccaggctttgcagaatcttgcactcatgagacctgaattggtaataccccctgtacttgaaagaacatatcctgcattagagacattaacagaacctcaccagctcacagctactttaagttgtgtaattggagtagcccgcagtttggtatcaggaggcagatggtttcctgaaggtcctacacatatgctacctctgttgatgagagcattgcctggggtggatccaaatgactttagtaaatgcatgatcacattccagttcatagcaacattttctactctggtgcctttagtagattgttcatctgtactacaagaaagaaatgacctcacagaagtggaacgagaactttgttcagccacagctgaatttgaggatttcgtcttacagtttatggacagatgttttggacttatagaaagtagcacattggagcaaacaagagaagagacagaaactgagaaaatgacacacttggagagtttggtcgaattaggtctgtcttctacgtttagtacaatcctcacccaatgttccaaagaaatatttatggtggcccttcagaaggtttttaatttttctacttcacatatatttgaaacaagagtagcaggtcgcatggtggcagacatgtgccgcgctgctgtaaagtgctgcccagaagaatctttgaagctctttgttccccactgctgcagtgttataactcagcttacaatgaatgatgatgtattaaatgatgaagagctagacaaggaattactatggaatcttcaacttttgtctgagattactcgagtggatggaaggaagttgcttctttatagggagcagcttgtaaagattctccaaagaaccctacatttaacctgtaagcagggttacactctgtcttgtaaccttttgcatcatcttctccgttctaccacacttatctaccctacagaatactgcagtgtgccaggtggctttgacaagcctccttctgaatactttcctatcaaggactggggcaaacccggggacttgtggaatctgggaatccagtggcatgttccttcttcagaagaagtgtcttttgccttttatcttttggactcctttcttcagcctgagctcgtcaaactccagcattgtggggatggaaaacttgaaatgtctagagatgatattctacagagtctgactatagtgcacaactgtttaattggctctggaaacctcctacctccgttgaaaggagagccagttactaacttagtaccaagtatggtgtccttggaagagacaaagttgtatactggacttgaatatgatctgtctcgagagaaccaccgagaagtaattgctacagttataaggaaacttcttaaccacatacttgataattcagaagatgatactaagtcattgtttcttattataaagattattggagaccttttacaattccaaggatctcacaagcatgaatttgactcccgatggaaaagcttcaacttagtaaagaaatcaatgaaaaatcggctccatgggaaaaaacaacatatcagagcactgttgattgatagagtaatgttacagcatgagctacggacactaactgttgagggttgtgaatacaaaaagatacatcaagatatgatcagagatcttcttcgtttatctacaagttcatacagtcaggtgagaaataaggctcagcaaacattttttgctgccttgggagcatataacttctgttgcagagatatcattcccttggttttggagttcttaaggcctgatagacaaggtgttacacagcaacaattcaagggtgccttgtactgtctccttggaaatcacagtggtgtgtgcttggcaaaccttcatgattgggactgtattgtacagacgtggccagcgattgtttcttcagggcttagccaagcaatgtccctggaaaagccatcaatagtgagattgtttgatgatcttgcagaaaagattcataggcagtatgaaacaattggcttggacttcacaattccaaagtcatgtgttgaaatagcggaattacttcaacagtcaaaaaacccctctatcaaccacatattgcttagcccagaaaaaattaaggaaggaattaaacgccaacaagaaaagaatgccgatgccctaaggaactatgaaaatttggtagacaccttgctagatggtgtggagcaaagaaacctgccctggaaatttgaacatataggcattgggcttctgtctctactgctgagagatgaccgagtgttgcctcttcgtgccatacggttttttgttgagaatctcaaccatgatgcaattgtagttcgaaagatggctatctcagctgttgctggtatccttaaacagctaaaaagaacccacaaaaagctgaccattaacccctgtgaaatcagtggatgccctaaacccacccaaattattgctggtgataggcctgataatcattggttgcattatgacagcaaaactataccaagaactaaaaaagaatgggagtcaagttgctttgtggaaaaaactcactggggatactacacctggccaaagaatatggttgtttatgctggtgtggaagagcagcctaagcttggcagaagcagggaggatatgacagaggcagaacagattatatttgatcatttttctgatcctaaatttgttgagcagttaattacttttctatcattagaagacagaaaaggaaaagataagtttaatccacgacgtttttgcctctttaagggtatattcaggaattttgatgatgccttcctgccagttctgaagccccatttagaacatttggttgcagattcacatgaaagcacccagcgatgtgttgcagaaattatagctggtttaatcagaggttctaagcactggacatttgaaaaggtggagaagctttgggagcttctgtgccctctgcttagaacagcactgtccaatattaccgtagaaacttataatgactggggagcttgtatagcaacatcctgtgaaagcagagatccccggaaacttcactggctttttgaactgctgttggaatcaccattgagtggtgaaggaggatcctttgtagatgcatgtcgactttatgtactacaaggtgggccttgcccagcaagaatggagagtgcctgaactattgcacagactactgaagtacttggaacccaaactcacccaggtttacaaaaatgtcagagaaagaataggaagtgtgctgacctacatattcatgatagatgtatctttgccaaataccacaccaaccatatcgcctcatgtccctgagtttactgctcgaattctggagaaattgaaacctctcatggatgtggatgaagaaattcagaaccatgttatggaagaaaatggaattggtgaagaagatgagcgaactcagggcattaaactcttgaaaaccatattgaaatggctgatggcaagtgcaggaagatccttttctacagcagttacagaacaacttcagcttctacctttgtttttcaagattgccccagtggaaaatgacaatagctacgatgaactgaaaagagatgcaaagttatgtttatcattaatgtctcaggggttgctttaccctcatcaagtgcctttggtacttcaggtgctaaaacaaacagcaagaagcagttcttggcatgcacgatacacagtactgacctacctccagaccatggtattttataacctctttattttcctaaacaatgaagatgcagttaaagatatcaggtggctggttataagtcttttggaggacgaacaactggaggttcgagaaatggctgctactaccttaagcggtctgctacagtgtaactttcttaccatggacagtcctatgcagattcattttgagcaactttgcaaaacaaaactacctaagaaaagaaagcgagaccctggttctgtaggagataccattccttctgcagagttggtcaaacgccatgctggggtgctaggacttggtgcatgtgttctttctagtccttacgatgttcccacctggatgccccagctcctcatgaatctcagtgcacatctaaatgatcctcagcctattgagatgactgtaaaaaaaaccttatccaatttccgaaggactcaccatgacaactggcaggaacataaacagcaattcactgatgaccaactgcttgttctcaccgatcttcttgtgtcaccatgctattatgcatagaaagatgactagtcctcacttcaggctcttttcatcaaaaattccacaccctcaggtaccatctgtggtggctctctgcaagttttaaaactgcctctgctgagctctcatcattttggtggtttctgtgttagatctcgttagtctgcattccacagcttctcagttgccatttgatttcccaacttgtccggaagtgtttccagaatactgatcactttttttttttgaggcatctgacaaagtcacaaagtctcagactagaaataattacccagtatgatcatggcatccaagaccagagtctcagaactcattaagaaacagtttacttggaatggagaatacccatctgtaatacaggtcctgtcatttcattcatctcaaattattttgaattcttcccaaatggctgctggatttaggtggtaataggggctgtgggccataaatctgaagccttgagaaccttgggtctggagagccatgaagagggaaggaaaagagggcaagtcctgaacctaaccaatgacctgatggattgctcgaccaagacacagaagtgaagtctgtgtctgtgcacttcccacagactggagtttttggtgctgaatagagccagttgctaaaaaattgggggtttggtgaagaaatctgattgttgtgtgtattcaatgtgtgattttaaaaataaacagcaacaacaataaaaaccctgactggctgttttttccctgtattctttacaactattttttgaccctctgaaaattattatacttcacctaaatggaagactgctgtgtttgtggaaattttgtaattttttaatttattttattctctctccctttttattttgcctgcagaatcgttgagagactaataaggcttaatatttaattgatttgtttaatatgttatataaatgtaaaagagtgtataaactgtagagatagcattggcaagacattgtacagatgcaaccttttacacaacatcattgtgtaatttgtaaagattcacgtgtagttctttattatagtgattttgggctttgtacccactgaatgccattttttgtgtttttaaattattttctttatcttgttacaaaaactgagatgtggggttttttttttttttaagttcacttatcattagaatgtctgaacttttatgtaacatttttggggggcttttttaaaggctaacaccacatgtttgcccctatgacaagtttcatagagtgaaaggtatcttctgggttgaaataattcacaaattggtgaatgtcatcttgcaacacaccctgtacagtcttccttaaaggaacactacagtatatttttagtatctacatgctgaatgactgaatacagacctaagcacagcagtggtcctggtacagtatttaagtgtcggcatacacaggcgtaatccctgtataaagtagtgccaaactgatttcagttgtgtaactagtttaaaacccaataaatggattctttttaaaaaaaaaa

SEQ ID NO: 65309 - DNA, 3786 bp, Homo sapiens
agtccgtgcggtggaattcgtctggtggagatactggtccaccagagaatgggagagcggctggagcagtgtccctgggaagcgttgtttgtttttgagatggagtctcaccctgttgcccgggctggagtgcactgatgtgatctcggctcactgcaacctccgcctctcacgttcaagcaattctcctgcctcagcctcctgagtagctgggattagctgttggggacacgagatgcgccaccacacccagctaattttgtgtttttagtagagacggggtttcaccaagctggccaggctggtctcaaaatcctgacctcaggtgatccacccacctctgcctcccaaagtgttgggattacaggcgtgagccaccgcgcctggcctggaaacactttcataccatgttaatttctgagactggggctcaagttaaatttaggttaagggtttaggataagttagctaagatagcccagaactttcataatatgacagatctctaaaaataaatggctcttttaaggcagcatgccatcaaaaaaaagtacctctaatgggattctaattatttaggttaaacttttcctcatattttattttcacatggaatcctaaaaggttcgccccgataaggcagaacatcttaggttgtagaaaattatacatggtatctttactgggaatattagctgtgccacttattagctgtgaccttaggcaaattacttcacttatctggcctgtttcttcggcggtaataaaaaacaacagtacctatctcctacagtaggtgtgaggattaactgggctaatgagaaatgctcagacacacagtaggtgctcaattaacgcaggctgctactgtttatcactaaaaggaaaggcttgggacattattttaccagcagtcacaggtttatctgagatgcaacaaggcctgaaagggtgagtcgactccactctccagtgcctgaaagtttctttttgtgcttttgacagagcacttattttcttgatttgaaaaggcaaaagcgactctgtttttgtacttaattaggggtaaatcacattcaagtatcagactgaattaagtgatacaactttctcaaatggatcactttaacttcctcttcattgaacaagataaattttattaacactcataaatttaaatattttggatactagacctttatcagttagatgatttgcaaatatgttttcccattctgtaggttgtttttttcactttcttgaataatcataaatttagtttttgacaaaatcttgcttttatagaaatctataccattaacttaagtagctgtttttgaaaaaataaatactgtttaaatttagatataacagtattccttataaaaatttattttatggttttaaaaaatatttaaattattgtataaacatttctttaaaaatatggtctgtagaaagaaaagagtaaaacctaagttgtaaagtgacagtgatttttgggttccatcattttattcacgtaatcgtgggaggatccatctgattccgtgggaagctgagggctagaggctgccactgtcacactgcattctttctcatttcacccaagaagtcataggtctgctctgaaaggtcaaaaggttcatgaactccgtctggtgacagcagagcttggagggcgccctggttttcttggttttgcttaaggaagtcagtgataactttccaccgtgcagtctcagtctcttcttctgcccacctgaatgggggtaggcgtgtgggagtggaagaagtgggagcacgcagccaatggtaaaccaggagaaaacgtgggactttcaggaactcttttggctctcttctctgatctttttaatgtggctttcttgtccagcccacgaactcctgagagcatccatcacatcaggctgctccaagagcatggggaaggtggccagcatgggatggctaattaaatcagtactttgcaagctcatcctgtctttcaggagcacatctccaagaatttgtcgataaaatatcaacaagtgaatagaacacatatttccaattaatgtttctggcagtagacttagtacatttcttgatcttctgttcaaggatctcagtttcactagaagttgaggctgccttctcattgtcataatctggtagaaaacactgccgtgtgctcttctggatattgaagggtccacttcaatacctttttcataaggagtaccaccattcaagaaaagctcataagtttttgctggaataggaactccactggcatcaaaaagtttaagaaacacccagccacagcttaactctcctctttcaccagttgaattgcgaatataagaaattccaagttcaaataatattccaagatctggagatgcagaattagacctgataaagcaatcaccatcaagcaaacatggtaagatgcgagtaacctggggagaaaaggtccatgttttgggctttttaggttgccatgtggctctgactgtatgaatgttgctcagaaccttattaccatcaaatagacagaggcgtacatgtctgctgagaacctgtatgctcattcctggaagaggaatcattttacagctccataatgtcagaatcaatgaaatacgacttggtctcgacctaatagtgccttctgtagcatcccacatcagatctctgaaggccagttgtgaaggcatgagctctggttgtaagaagtaatttgctcgaaattgattcccttcctccagaagctgtgagagcgtggaaggcctgaaccctgcaggaatagctcccatcgtagttaacacatcaacagtgtttatctgttggagcacaggcttagaaaccagaaatatacgtcctctgctctgtacattccatgccctgaaccctgtttcagatccattggtgtcttccacagtctccatcctatttcgcatcagaactattaggtagcaaaacgagacatgattaacaagacagaagatgcccgcctctgaaatcgctttctgaacagcactccagtggggatcagttctttggcttaacttctgctccatctgctgtttcatccaccgcctctacatcttcttcactgccctcttcacttgattcttggccttcttcttcttcactataaggctctaggtaggttctgggaacaagaccttcatttcctttggcatccttagctatccaccaaccatcaggttttttttcaattacaaggagaatttcccctttcttaaatgtaagatctccaacttgctgagcagtaaaatctccaacagcgatgtattcttcaccggttgaccatttgtgagattcattttcctctttctcttcctcttcctcctctgcatcttcttcctccccaccactgtcttcactatcttcactttcactttcttcctcttcttcagtaggtgccccaacttcagttatattttctctgcttattgtcacagcaaggccctgcagttgttgggtaagcttgtccaaaagagtatgctcctcttcttttctctgattatagtttgcaacaggtgcagattcatcagctttgcttaatttttgaagagcatttttattttcatctattgcctgctttaactggatacatctttgataaatatgttgtcttttattgggttctagagcttctttcagttggctctcagaaagcaaactatcaacctgttgcttcagctcctgattgcggcgccgcagggcctggagaggatctcgctgtcgtctcgc

SEQ ID NO: 65310 - DNA, 2781 bp, Homo sapiens
atctcagagtggcggaattcgccgggaccagccgctcggggccgggctgatacagccgcttcaccgtgcccctgcccgcgaccatggcctcctccgaggtggcgcggcacctgctctttcagtctcacatggcaacgaaaacaacttgtatgtcttcacaaggatcagatgatgaacagataaaaagagaaaacattcgttcgttgactatgtctggccatgttggttttgagagtttgcctgatcagctggtgaacagatccattcagcaagggttctgctttaatattctctgtgtgggggaaactggaattggaaaatcaacactgattgacacattgtttaatactaattttgaagactatgaatcctcacatttttgcccaaatgttaaacttaaagctcagacatatgaactccaggaaagtaatgttcaattgaaattgaccattgtgaatacagtgggatttggtgaccaaataaataaagaagagagctaccaaccaatagttgactacatagatgctcagtttgaggcctatctccaagaagaactgaagattaagcgttctctctttacctaccatgattctcgcatccatgtgtgtctctactttatttcaccgacaggccactctctgaagacacttgatctcttaaccatgaagaaccttgacagcaaggtttacattataccagtgattgccaaagcagatacggtttctaaaactgaattacagaagtttaagatcaagctcatgagtgaattggtcagcaatggcgtccagatataccagttcccaacggatgatgacactattgctaaggtcaacgctgcaatgaatggacagttgccgtttgctgttgtgggaagtatggatgaggtaaaagtcggaaacaagatggtcaaagctcgccagtacccttggggtgttgtacaagtggaaaatgaaaaccactgtgactttgtaaagctgcgggaaatgctcatttgtacaaatatggaggacctgcgagagcagacccataccaggcactatgagctttacaggcgctgcaaactggaggaaatgggctttacagatgtgggcccagaaaacaagccagtcagtgttcaagagacctatgaagccaaaagacatgagttccatggtgaacgtcagaggaaggaagaagaaatgaaacagatgtttgtgcagcgagtaaaggagaaagaagccatattgaaagaagctgagagagagctacaggccaaatttgagcaccttaagagacttcaccaagaagagagaatgaagcttgaagaaaagagaagacttttggaagaagaaataattgctttctctaaaaagaaagctacctccgagatatttcacagccagtcctttctggcaacaggcagcaacctgaggaaggacaaggaccgtaagaactccaattttttgtaaaacagaagttccagagcacagaaggtcatcatcacaagcaaactttattaaaaaaaaactagaagtgtgctttgattttgctgttatttgttttatcacttctatatttggtgaacagccacagttactgatatttatggaaaagtactttcaagtacaaggtcaatacataagccagagtgaatgatactacaagttgagcatctctaattcaaaaatctgaaatccagaagcttcaaaatctgaatctttttgagcactgacttgaccccacaagtggaaaattccccacccgacacctttgctttctgatggttcagtttaaacagattttgtttcttgcacaaaatttttgtataaattactttcaggctatatgtataaggtggatgtgaaacatgaattatgtaattagagtcgggtcccgttgtgtatatgcagatattccaaacctgaaatccaaaacacttctggtccctagcattttggataagggatactcagcttgtacctatatattcatatatattcactgttgttagaaatgtttaagttgctgttctgtgatgaatctaaatcttttctcttgctaccaagctattgtcactgcagtgcattataccaaagagcgaagtcagtgccactgaaaatacagaacccattaatatcgtggctatctgattacatttatattccaagatgaaccttttttatatatgctaaaaattttggggaatatgttttgggatgtattatggagctaaaactctaacctcttaatagttttatagaacttaaaaattttttatacaattacccaattggtgatatgatcttaagcttttgtgtcagattatttaatatgatgacttcatgctttattatgccttattatggctgacgtattactgtggtgaaacaaaatatctttaaaagttaaaacatccagatatataagctattttttcctaaggataaagtacctttgagcatgagtgtatcacagctttcattaggaaaacttttcattacatacttgtttaaactctgtcttccagggtaaaaataataaggttgaatcattttattaaaaatactttttaagaaaataactatgaacatctgaatattaaagatataaaaatgcacataattcatatttcaggtggtatttgcattcagtgccttactggtattctcagaacattttaatgatttctaacatttcttaacagtcatagatatatacattttcattttttgtacttgaatattctaaataaaactgacatttactcttgacaaataaaacatatatttactaaaaaaaaaa

SEQ ID NO: 65311 - DNA, 838 bp, Homo sapiens
  misc_feature (1)...(838): n = a,t,c or g
cacctcaagccagctgggctgtgggcggcacctgtgctctgcaggccaggcagcgatagaagcctttgtctgtgcctactcccccagaggcaactgggaggtcaacgggaagacaatcgtcccctataagaagggtgcctggtgttcgctctgcacagccagtgtctcaggctgcttcaaagcctgggaccatgcaggggggctctgtgaggtccccaggaatccttgtcgcatgagctgccagaaccatggacgtctcaacatcagcacctgccactgccactgtccccctggctacacgggcagatactgccaagtgaggtgcagcctgcagtgtgtgcacggccggttccgggaggaggagtgctcgtgcgtctgtgacatcggctacgggggagcccagtgtgccaccaaggtgcattttcccttccacacctgtgacctgaggatcgacggagactgcttcatggtgtcttcagaggcagacacctattacagagccaggatgaaatgtcagggtggggttacagaggaaaggcggggtgctggcccagatcaagagccagaaagtgcaggacatcctcgccttctatctgggccgcctggagaccaccaacgaggtgattgacagtgacttcgagaccaggaacttctggatcggtgagtgcccagctgattgggggtatggcgagtaaggggttgtgatgccccaccctgctgcaggaaccctgggccatggcggctgccagcagatggcaagggtgtgttgagggcctggagcccagagcggngccagctgctcaccccctttcccggngagggcccaggtagggagcac

SEQ ID NO: 65312 - DNA, 1345 bp, Homo sapiens
ttttttttttttcatcttatgacatattagtttattacatgcataaaactataaatgataaaaatgaaaaatgtaatgaacagtttatgtttttttaaaacaaagtcagattttaaaagttgtccacagagagcaaaaatcactttacgtactcatgatgggctttaatatttctttacactatacatactgaaaatgtttacatttactaataaggaatgcccaagcgtatccatcaccatttgaatagcttgcaggggatttgtgatttcttccatgttatctcttctcaaaacccaatctggcttaagtcttgaaactattctggtccttacaggtgtttctgggataaaaggaatgcttatagaagaattcttcttttgcttgtaaagtattctttcagtattcattttatgtttatgagctgtaagtttgtagagactgtaaatacggtcaacaactttggacctacttcgtacatcagaggctctatttgttgtcttcagtaaaatagccaacaaacaacaagtttttgtaaaaatgcttccgcctttgtctgcaactttattaccaggcttttctcggtatatctgcaaaagctccaatagtatatctatacaattttctacatcataaactgctgaagtagttttctcatacttagatacattaagcaagacttgcacagcatatctgatgacttccatacaaggaatactgcgattacaacttcggatcaaaacaaatattttagaaattgctccactctgggccatgttctcacaacaaagtggagacaatctagtaactacctctaggtgttttaaggcctcaagaatggcagaaaggtgcttatatgtcaaaaggtaatgaagtgcaagtgcagttcttttgtagagtttgttttcttctcgaatctccctattaacaacttgaagacttagtcgtatagctttaatttttgtacaatcatttttcttcctccaagaatagcctctccataatgcctgaattttaatgattccactagtgaatttttcctgctttttacggaggagaaaatggcgcactgctttctgtattactgatgcagccctatttcgctggctcagacattcttgaccttcatgctcaatctttttgatgctatgatatttctgaataaatctcttttcttgtaatcttgctcgaaaccatctctgaatacagatgactgaattaacctgcttgttagcattcttcacagccaggtaaagtttataggctctttgaattctaacagcattcaggtgataatatgcagctgcagtgaagtgaagaagtcgaattttggctctctgttcta

SEQ ID NO: 65313 - DNA, 790 bp, Homo sapiens
cgactacagaaacgctatgtattagaggaagctgagcaactggagcctcgagttaatgctctggaagaggacatggatgatgtggagtccagtgaagaggaagaagaggaggatgagaagttggaaagagtgccatcacctgatcaccgccggagaagctaccgagacttggacaagccccgtcgctctcccacactgcgctacaggaggagtaggagccggtctcccagaaggcggagtcgatctcccaaaaggagaagcccctcccctcgccgagaaaggcatcggagcaagagtccaagacgtcaccgcagcaggtcccgagatcggcggcacagatcccgttccaagtccccaggtcatcaccgtagtcacagacacaggagccactcaaagtctcccgaaaggtctaagaagagccacaagaagagccggagagggaatgagtaatggactcagtttggttttagtccacatggcctcctgtggatataaggatatctgtatgtggaaggattaagatctcccccaggcagctataagaatattttagtttttttcttatcaagtttctcaacctttatttttaatgaaggaggtgctgagttttgtatctttttaatcataatcaacatcagtttttgacccaactaaccttgactgtattcaaacttatgagagtataaaggatctggaggttggggatatgactgacaaggaaaggctgtggccacctgatgaccctttccctttttattaaaccggacacacctgtttcccaaaaaaaaaa

SEQ ID NO: 65314 - DNA, 6730 bp, Homo sapiens
gaaacatgtcattaagtttcttaaatgacgaagaggccaggaagatccttcaggtgctggaaaggaatgaggagttacagagggccgagaaggacaggatcagcaaacttcagaagacaaagagggatatcagatggcttcagggagtgactggtgaatggtttgaagaaattcaaagaaaaaagttttgcaatgaaacagatgttagccaaatgttaaaacaaccacttacatacaggctaagtaaggagatggcaaaaaatgatccgatagaattacctacatcaagatctaaaaatgtaactaatcaaaaaaagccgacacctttttcttcccggatgagcttcagatcgtcatttgcttccctgttctcattcaggaaatctggaaaggagacttcaaagcttccatcactgggacagaaaggatgtgatggccatgcaggacctcctatgcctgtgaggggagctgctgtgcaggcaaaaatatacaattcacctctggaaaatcatctagttgacagtacatttgtcccaaagccagcagtcatgagggaggagagtggcatgcctccaccgtgggatgcttcactgctggagaatgagtttttccaagttttagatgacttggatagcaaattggctcaggaacagtctgcaagctcagtgaataccagaacacccctcaactatggatcaagaacacagttcggtcacttttattccagtggtaacagacatggtaatatcacagaaaggcacaaaaaacactataatgaaacttccaatatgtctatctatgacatcctaagaccaggaactcctagggaaggttttaaaaccttttctcctaggacaagcacaatttatgatatgtataggacaagggagcccagagtctttaaagaagattatgtgcaaaagaatacttttggcagtacttcgctgtgttttgacagcaggcaacggtcggccttaccagccacagggcatttcacagcaagaagcttacattttccagccacaactcagagcaagagtgggtttataccaccaaggcaccagcagagtccaaagagaactcctttatcatccatcatatggaacagatcagattcctctagagacagggagaaccaggaagagttcctgagggcaccatcaccaatggaaattgatcccgctgacaagtatgtgtatcccaggggttttcaggagaataagagatatgaatcgtaccattcacagaatgtttaccaacgtgttagtttaaatgctcccatggagaatgcaatgagtcccgacacttttgagaactcagagaacatgccattctaccatcaaagcaacacatttaccagatctttcttcagcaatacctttggacgaagcggagaacagaggagatttggacaaggtcctttttggggccaagagaaaggacattctttctggtctgactttcatcgaagcaggaaatcattcagttcttctgacagagactttgaaatgatttccatggaagcaaatagtgtatcagccattcatggccataatgtttcttctgaacactgggaatcattttcttctggttatggaacagatgtttccagaggccaagaagagccacatccttggcagtttgattttcagagatccacactggatagcatggtggtatcacatggtaatgagacccagttgactcctcattttggcacaccaaatgtttgctccatgactggttcaagctatcacgtcaaatctagtgagttggtaagtcaacaggacagttctcctgtagaagtacatataaacaaagaagcttcctcatttggaattgctcagactctagcatcctcattcaaaacttccttttcccagatttctgatgacagaaggaatcctcagagtcccaacttgcagaatcccacagtcactttgcagaaaatttttccaaataagcctgcctctcatccaatgagaagccatacagaagtcactgtgaccaacagcaattcagttgactctctgcctcttgccaaaagccagcccaatatcttggtcacagaagtaaataatgagaaagacttaaatgaatctatttcagaagaagacaaacagctaagcaagatggaccagacaaacaaggcaggtgaaataccccaacctgtttcacagacagggatctcaaactctttacctgattttcaaaatcccttatcccaggactcagccaagagcaacgggtttggttttaatgcatctaccataataagttcaaaaaagtcacccagagtcttttccaggaaagatacctccaaaatgtatataccgcacacagataaatccaatgacattaaacaagataagaggtttactgaaaacagaaaacttggctcaacagcttcccttcctttcattcaggaacacagaacaccaccatctttccccaggacagaccaaggttgtcaccaggaattaactgtaaataatgaagatatttcaagaattattacaaataaccactggagctctgcactgactgatactcaaaatgcacaatactcaaaatgcaagttaactcctggccacaagacctcgtgtgattctttagatctgtcatcagctgcactaccagattcctcaccatcaaagaattcttcccttgatgctcctgtggttccatctactacagtgttctccaggagaagtccttcagacaaagatccatcgctaggagaaagagaagaaaaagacaatgctgggaagaaccaaaagaatcagtttattgtaagccactcagaaaaccaagagagaaatgatagtcctgtgcctacacatgatgaagtggttgatgtcaaatgccattcacactctccttttaggaatgaaagaggaaaaggaaaaataaggcatcatatatcctgtattgaaaagttaagcaaaacagaaagtatatcagtacccaccagtgatcacaggagcctcattgaagcaaatcaaagcaattccaaagtttctgaacttgacacaatttattgtaccttgccaagaaaatcaagcagttttctcatacatggcaggcagtcaggaagtaaaataatggctgcttcattgaggaatgggccacctcccttccaaatcaaaaataatgtggaagatgcaatggggaactatatgttaaacaaatttagtcccagttctcctgagtcagcgaatgaatgttccaaagtcctttcagactcagccctggaagcacctgaagccacagagagaatgacaaatgtaaaaagcagtggatctacttccgttagaaaaggaccacttccattcctcatcaacagggctatgtcatgtccctcaggggagccacatgcctcaactggaagagaaggaagaaaaaagccattgacctcaggcatggatgcttctgagctaacaccaagggcttgggagagaatcattagccctgtggaaagtgactcatctgttagagattgttctttaaccaaaagacaacaccaaaaggaaaacttccaagaatacactgagaaagagggtaaaatggctgcctccaggagaagtgtatttgctctttcaaatgaagaccctttacctttttgctcagacttgtcaggaaaagaacgtgggaaaacattacataaagttaagacgactagtacgttttctgtttctggtgatgaagataatgtaaaatgtctggaggtggtctcaatatattacactctaccgaggaaacccagcaaaaaattctgtaacctccttcaacagtatacacaaaatactaatttacttatagaatcacctcaagtggagactgaaacatttcctaacgctttagaaaaagacaaacagaattattctacacgagagcagtcaggaacaccttcatgtgaaaatctaaagatgtccgtcaactctgatcagacgctcaccactgaaaatatgactgccttccgattatcaaatagggggcccctagctcctacattacaggaaatggcttctgttgaggcagctgtttctcttcctgaagaggaatctaaagctagagagattttttcagataatttagctaaaacacctctaggtgattcagaaaacaagaaggaaagaggcaaaaagttgcaaagtgaaaccctgcatacttcattgatgcttcagagaaaaaatgtatccgaagaaaaatctgaaaattgtcaacaatccattaattcaagtaacagtggtccctctagtcttccagctctttcagaagttaatattggaaattcccaaactagaagaagttcttgggagtgtacagggagtggtagagccattccatttactggaagtggcaagtgtccccagaaagatcacacatccacagctgtaggtgatggctccagtggatcacagcctagggaaggcagaggggacattggaaccaactgccaaaaaatgactaataaaacactttctcactcagagagtcaagtctttgcccttactccagcattgcataaactacagcttggtgaggagactcagtcagatgaaccaaacttagagagtctgcagtctgaaccaagagaattacctcaaagaagtcaggaggcaaatatgacagagagcaggaaggctgaagatgaaatgcagaagtcagcttgggatcaaccttcacttcctgaaggaaacaaaaataaaaccaacttggatgacctagtaaagggggaaaatagatcttcagttaaacacagattggcagccatgtctaaagccagcagaaaattcccagctaaagatgtaagccccagaagacatgtagctactatcttcccccaaagtggaagcagatctggctttgaccatttatctcttggcacagtggagtgcaacccactgttccctgagcctactccaaaatctgcagagtccattggcgaaagcaggttgagtgagaacggaaagcatgtgaagaaatccgagaaccttctccccattactgtactacccaacagagaaccttctacacacgtcagcaaccagaagtctaacagcatttcacaacgacatcagaatgagtttaaaaacgtctcagaatcaccatcaaagcatgagaattctaaagacgtcacagcagctcagaatttagtaagagaatcaggagccccatcacccatcacattcaccagcctcagggaagcagaattctctgacaatcagaggaggctgagccctccttttccactggagcctgcacagaaatctagagtaagcagtccactggcgcagttttctgcagcaacaaaggagtgcttcatctctggagtgggaacctgagccacacctctatcgttcaaagagtttaaaaagcattaatgttcatggcgatctactacgaaaaagccatcctccaaaagtcagggagcgccatttttctgaaagcacttctattgacaatgccctgagtcgactgacccttgggaatgaattctctgtcaacaatgggtacagtcgaagattcagatctttttctgaactcccctcctgtgatggaaatgaaagttgggcttatcgcagcgggacaaaaacaggtcccaggtctgcaatatctatatacagacctatcgactatgggatctttgggaaagaacaacagttagctttcttagaaaatgtaaagaggtcacttacacaaggaagattatggaaaccaagttttcttaagaaccctggcttcctaaaagatgatttgaggaaccctcccaacccctcagagtcattaagctcaaattctcccagtagtcaggtgccagaagatggcttatctccaagtgaaccgcttaatatctatgaggatgacccagtggactcagattgtgacacagacacaaccacagatgatgaatactacctggatgaaaatgacaaagagtcagaactgtgaggctttttcaataaaatgctttacttttttcaccaaaagcttataatggaactaaggtgtacatgtgcatgtgcatggaaggataaaagatctagtctgggcagtgtctgctctgaaatgtcccacatctccttttttttcctccacaccctatatagacacttcctgaatgctagaacaatgaattcttgttttgagagagtctctgctattttctatctctgtaaatgttcttagcctgcctttccaccactcccacttaatccctgattcactgtctgacttgggctttctgctttacttccctcctaacatttttcatctttaattgtgatttacaaccctaatatcccaggcacatacaaaacttatgaattacccagcacaactgtgaaactctgtattgcttcttccggtccacaccctatactcatgacattaaataaaaggtagggatgataacagtggggtaaatattatcatcctgtttgactcatgaacatttaggaagtttaaggtggtgatcttctctttcaaacaaagataaaggaatttattttttaacctgagaaactgattgcaaaaaggaaaaaaaaaagataaaggaattttgtaagtacttcctgttatatccgtaggggagcctgggaggcacatggtcaaagcacatgttgaggttatagattaggacctgaatccctagtaagccaatagaaggttagcagtcctagaaattcctctgaaaccgtgggggactggctggattattaagggc

SEQ ID NO: 65315 - DNA, 1902 bp, Homo sapiens
tttttttttttaagccttatatttttaataaaaaataaacagtctctgacaagcagttttctgaatcccaaaacaaaggaaaagggagggggagaggtgaaggggtcagctagggtaaaggagtgaagaaggctcagattacccctgccattctgccagggcagaagggatcagagtctgccccaactgaagcaagaagaaaggtggtcagacttcaggaaagacttcctgggagtcagccggtgcacgactggtaagggaagcaggagggagcagatccctgcatgaccctgggagaagggagtgttggtgtccaaagcggcagcttcagagtggagtttccaggagtggcatgttagcatatgattgtttagatgtttggtgttcattaccatagggtcctgggacaggcaggttttttagggtctcttgaaacactgtgtttctggagggtccctggaatggccagaactgaaggatcctctccaggttcttcaatatcagtgtaggagcaggtctgggggtagccccccccctgttagagagctcatgtgcttggtagaagggagtcccataggggaggcagactgctgtgcatcaccctgctgagtgtcatcagtgatgcagagtagcagaagctcctctcaggggagaaaggtggtcttttgtgctgctgtcatcctagtcagggctgtgcttgggcccgccccagccagcatggcccaggtgcctgcaccgcagccccggcctgtgcctagagtttaagctacctcagtgcctaggcagttgttgtcagcgtccacatcactggcagaggtcctgcattccttgggagactggaggtgttgctctctgcttaacggggccttctccccagggcgcagggtctcacagccctgaaccttgccccgagcccggagtgctctcaatggggaggccacgaggatgatgagggctcctgaaagcactaaggcaaagaggacagtgacagtgacaaagtggggccagtaggactgctgggcagccagggcggccccaccactgaccctggtcaacgggaccttcacatgctcccgggggatgcctgccagttcaggatccagggccagggtctggtcctggctgtccacccagtaggagatcacagggtatgaaaagccattctcagttgcccagcactggtagagacccccaactccatcctgcactatcagcaagagggagccattgtagacagtggaagaggcttctgggactgctgctgggccatgactccaataataagaggccaaggctgacaggtgggggcaggggagctccaggatggagttagggacagccaggacttctttaatgatttgcgggcggctctgaggccgaaggctcctgctcatggggccactggcacatgcccactctgggttcccccgctccatgtcctgcttccaggagttcaggttgggggcagacaggaggcaacaggttcgggactcagggtcccaggcacagtgggggtcccgggcaaggacacagtccacacagctctcatagacactacagttggctcggggcaccctccagacacctcctgagaagcctacaaacactgcaccctgggtgggggccagctgcaggttgcgaacaggttcagggtcagggaacagctgaatctcttccaccagatgagcactgctgtccccacttaccacagccttgtggagcgacccctgtggtgattcccaggtacatgacaagatggctgcggacgcgtgggcggacgcgtgggtcgaccgggattccgggaggactacacgtcaaggtggctcttgagattctagtactagatgcgataagtagattagtgcgaagtagtaataccaataatcatacataaaccgcgat

SEQ ID NO: 65316 - DNA, 2416 bp, Homo sapiens
ttttttttttttatcattatattcttttatttatagactctgagagcaaggacccaagcacagcctggtgctcttggatagagaagaaagcagctattgtccacactcagaggttgctgaggtgccctcccccactgatctggaatgatctacactgctagtgaagaggagggatggcaagctgactaaataagaaggcagggaaagaaagtccgctttagttctgagggctgtgacattagatgagagtggagccctgggcatgtcagccagccttctgtgtaacgcccgcccaggtcccattgtgtctgttctcttggtcctccactgttgcccacatcttcctccaggctgcttaagtgcccctcctggagtgcatgagtaggtcgcgttgcagcccagcctccaggctggaggtcagtctggctgtgggagggtcggtcagcagagtcaatttgttgaaaacacctctgccaaagtagtcagcaatcacagaaaagctgtcattggagcacttgagctgatgctggaattgatcatggagatctcgtttctgttcctgggcccggatcatatccatgaccttccggttttcagggaggcaggtggggcagtcagcatcactttccgagtaactctcaaagcagtgttggtggaaggagtggccacacaggaagtggactgagggcaactccaaggcactgttacagatgctgcacttggtcttttggaaaatcttaggactggccttgagctcttggatctcctggcggatacgggtggtctcctctcggtaccgccgcacccgcagctcatcctgtgcaatctgctggctctgtttctgtagtttttggaccaggtagtccctgatgacggagagtgtggctgtggagttgtgggccagggtctgcaccactagaagaggtggcatgaggttcttgttctcgatatgcttgaggacagctgccacatactccttgcagtcctcctccttgcgagcgaagtagctgagggcctgctcccacaaggaggggtcctgctccccatggcgctcacacacgctgatgacctgccggtactgctcgtgctgcatgtggtagtgcatgatctgctggaacagcttcccctgctcataaaggtaaaggacaccatcctggaagtcgtgcatctggcacaggaccagggccttgtcaaagacgtcgcagaagcgaccactcttcagcagggaaatggcctctgcgtgaagcttctctttgacctgtggatccttctcgtgggcccagttctgcagtcgcagctcaaggagtgtgtcgtagatcccctggggtgagtctggctgcacttcactcatgtgctctaggaaggctttcagctctcgcgggttattggcaaagatggggatgaactcctcagagttggccctgcaagcctggggcctccctatcgctgcggccttcgaggctgggccgataatcagtacaaagtcccttcagcaactgagttgtctgctctggtatgtggtgcatgaggatcttgccgtagcgcttcatgttgctctctgcctgctcaaaaggcagcttgccgatgtatcgaagggcttcctgataattcttaatgtcttctagctggatcttcaggtaccactcatgatgtgcatggttctccgccagatacagggcatgggagtagtagccagcctgccggaggaccttgatggctgtctccacatcaaagtggacttcactctcactctttttcttgatgaactcctccagcttcgagctgtccttgagcttggtatagcagttgaggagcagggtggtatggtcggcattggccagggattgtcggtgcagggtctgcaggtaggcagtcaggttgtgaatgcgctgggcatccagaaacttgcggatcacgtaggatggctccaactttccaatggttcggatatattgctggacagccccatcgtggttgcccttgctgtagagatggtctccatactgcatgaaaatctgggccagcccatcactgtccagatgctggctcttggcaaggttaatcgccatctcaaataggttcttcttaaacagcatctccagtttggtctgtgtgtccttctcctgcagtgcgtggacccgcccatcccgcgtcagcacgtacagggagccccactcagcaagcacatccactacatcctcaaagacggtgctataggctatgaacttgttgcacaggtcatagatgtttagaatctgcttgtcggagctctgtgaatccctgctggtaaactctgacttgggagaaaccttccggtcacgggagacaatgataaggtagcctccaaaccagtgggcaatgagcttatggccctcaaaggcgaagcagggcccacgttcatcaaggctggtacaat

SEQ ID NO: 65317 - DNA, 4730 bp, Homo sapiens
caattccaatggttgtgtctgattttgatcttccagaccaacagatagaaatacttcagagttctgactcgggatgttcacagtcctctgctggggacaacttgagttacgaagttgatcctgaaaccgtgaatgcccaagaggattctcaaatgcccaaggaaagctccccagatgatgatgttcaacaggtagtatttgacctgatatgtaaagttgtaagtggcctcgaagtggaatctgcatcagttacatctcaattagaaattgaagctatgcccccaaagtgcagtgatatagatccagatgaagagacgattaaaattgaagatgactccattcaacagagtcagaatgctttgctgagtaatgaaagttctcagtttctgtctgtgtctgcagagggaggccatgagtgtgtggcaaatggaatctccaggaatagctcctcaccttgtatttcaggaaccacacacactcttcatgactcttctgttgcttccatagaaaccaaatctagacaaaggagtcacagtagtattcaattcagcttcaaagaaaaattatcagaaaaagtttcggagaaggaaacaatagttaaggagtcaggtaaacaaccaggagcaaaacctaaagtaaaacttgccagaaaaaaggatgatgacaagaaaaaatcttcaaatgaaaaactcaaacaaaccagtgtattcttcagtgatggtctggatttagagaactggtatagctgtggagagggagacatttctgaaattgagagtgacatgggttctccaggatctcgaaaatctcccaatttcaacattcatcctctctatcaacatgtgctcctgtatctccagttgtatgattcatccaggactttgtatgctttctctgccatcaaagccatcttgaaaactaaccctatagcttttgtaaatgccatttcaactactagtgtaaataatgcatatactcctcagttgtctctccttcagaatctattggccagacaccggatttctgttatgggcaaagatttttatagtcacattccagtggactcaaatcataacttccggagttctatgtacatagaaattcttatttctctctgcttatattacatgcgtagccattacccaactcatgtcaaggttactgcacaagatttaataggcaatcgaaacatgcaaatgatgagcatagaaattctgacactactcttcactgagctggcaaaagtaatagaaagctcagcgaagggtttccctagttttatttctgatatgttatctaagtgcaaagttcagaaagtgattcttcattgtttgctgtcatctatctttagtgctcagaaatggcatagtgaaaaaatggcaggtaagaacctggttgctgtggaagaaggtttctcagaggacagccttattaatttctcagaggatgaatttgacaatggcagcacgttgcagtcacaacttcttaaggtgcttcagaggctgattgttcctagaacacagagtaatgaactattcctgaagagcaatgaaacaggttttgattttgttgtatcctgacttagaacacatcagtccccatcaacccatgacttctcttcagtatttgcatgctcagtcaatcacatgtcaaggcatgttcctctgtgcagtgatacgagcttttgcatcagcactgtgcatgtaagatgcacccacaatggattggtttaatcacatctactctgccttacatgggaaaagttctgcagagagtggttgtttctgtgacactacaactgtgcagaaatttagataatctaattcagcagtacaaatacgaaacaggattatctgatagtaggcctctgtggatggcatcaattattccaccagatatgattcttactcttttggaagggattacagccattatccattactgtttgttggatccaactacacagtatcaccaacttttggtcagtgtagaccagaaacacttgtttgaagcacgcagtggaatcctctcaatccttcatatgatcatgtcctctgtgacactgctttggagcatactgcatcaagctgattcttcagaaaagatgactattgccgcatccgcatctcttaccactattaatcttggagctacaaagaacttgagacaacagattcttgaattgttgggccccatttcaatgaatcatggtgttcactttatggctgccattgcatttgtgtggaatgaaagaagacagaataaaacaaccaccaggaccaaggtcattcctgcagccagtgaagaacagcttttattagtggaattggttcgttcaatcagtgtcatgagagcagaaactgttatccagactgtaaaagaagttttaaagcagccaccagccatagccaaggacaagaaacatctttctttggaagtctgcatgcttcagtttttctatgcttatattcaaagaattccagtgcccaatttagtggatagctgggcgtcactgttgatacttctgaaagactctatacaactgagtcttccagctccagggcagtttcttatacttggggttctgaatgagtttattatgaaaaaccctagtttggaaaataaaaaagaccaaagagaccttcaggatgtaactcacaaaatagtggatgcaattggtgcaattgctggttcttctctggaacagacaacatggctgcgacgaaatcttgaagttaagccttctcccaaaataatggtagatggaaccaatttggaatctgatgttgaagatatgttatcacctgcaatggaaaccgcaaacataactccttctgtatatagtgtccatgcattgacattactctctgaggttttggctcatcttttggatatggttttctatagtgatgaaaaggagcgggttattcctttacttgtaaatattatgcattatgttgtgccctacctcagaaatcacagtgcacataatgcccctagttatcgagcttgtgtccagctgctcagcagtcttagtgggtatcagtacacacggagagcttggaaaaaagaagcttttgacctctttatggatcccagtttctttcagatggatgcctcttgtgttaatcattggagagcaattatggacaatctgatgacacatgataaaacaacatttagagatttgatgactcgtgtagcagtggctcaaagcagttcacttaatctctttgcaaaccgtgatgtggagctagaacagagagctatgcttcttaaaagattagcatttgctatttttagcagtgaaattgaccagtaccagaaatatcttccagatatacaagagagattggttgagagtctccgtttgccacaggtgccaactctccattctcaagtgttcctgtttttcagagtgttacttttaagaatgtctccccaacatcttacctcactctggcctaccatgattacagaacttgtacaagtatttttactgatggagcaggaactcactgctgatgaagatatttcacggacttcagggccctctgtggctggtctggagacaacgtacacaggaggtaatggcttctctacttcatataacagccagcggtggttaaacctctatctctctgcttgcaaatttttggatttggctctcgcattgccctctgaaaaccttcctcagtttcagatgtaccgatgggcctttattccagaagcctcagatgattcaggtttggaagtcagaaggcagggtatacatcaacgagaatttaaaccttacgtggtacgactagcaaaacttcttcggaaaagagcaaagaaaaatccagaggaagacaactcagggagaacattgggttgggagccagggcacttgctgctcaccatctgcaccgtgcgcagtatggagcagctcctgccgttcttcaatgtgctcagtcaagtcttcaacagcaaagtcacaagccgatgtggaggacactcagggagtcctatcctctactcaaatgccttccctaataaggacatgaaactggagaaccacaaaccatgttccagcaaagccaggcaaaaaatagaagagatggtagaaaaagattttctggaagggatgataaaaacttgagcaccattgctggttccatttagcttacatgtaaatgtaattatttaaaacacacacactgctctgcgttgtatagtttttccttttttgtatgtaacagaacacatttcagattgtatttaatttaaatatttgtatataagagcaaatgtctgaatgtggcctgaatcaagtttaaatattgttggctcatactgattatggtgcctaagagagctatatatatacacatgtaaagtccattgtttttattgtcctgagttgtcttaaacctgcaaaatatacactacccattttttttttccattggtttcagacttggttcaattaagattggttggggatttttctcttttccttattaaccatgttctggtatcagaatggtgttccttctccatcagaggctgggaaacgtattataattagtttttctcccacataccttcaccaagagcagtgaagaataactgaaggctggaccatgcatccttaaaagtattgcatgagcatctccacctcagtatggaagagggatggacaaccccctattcatacctctgagttcctgatggcattagtcatatag

SEQ ID NO: 65318 - DNA, 5113 bp, Homo sapiens
aatataaacacttataataatgaaaatataaattattaattatgcagcatgctttagggccatttctacagttattatgaattacaaatattaaatgcctttaatctatccactgttcataattctgtaagccatgtttacataataaacaaaaaacatttcctacatattctgtctcttctgacttttaacgattaaagtatttatcttgggctggcaagttaccctgaccctaaccattaagtacaaacagggcattgtacacccattctaaaagctggaatcaaagaataatgttagaagtatttgcaggatttatccaaagaaatgtttagcagacaaatgcaatagaaaaaaatcaagcatttcccaaaatggtgtttgtattagaaagttttaaacttttgtcttcattgtaaaggtatcactttattttatttttaaaaggccatgattaaccatttaataacttacatacctttacaaaaataaaactaacagcttgctgggcacaaaatttactcaaaatctttctgtatttttaaaatcagtaagtgatgtatcttactagcgctttattctcacagtggtatttttttaaaagcctgaacagtgtaattatttaatctgatgttttaaattatacttgatataaaaaaaaagtctacccaaaccatcaccaaaatttcaattcaatctaatgtagaagaaacctgagtttggatgtagaaataattcattcaattttttttctgacatcatacatcatgccttcaaccaaaatagaagtgaagcttcaaacaggactctatggctttatctgaattttctgagtattaagtaaatcttaaatttaaagcagctgttggaggttaaatgttctcaaagcaatgtaaactagttataaaatgtctcatcaaagacatcagcagctcttgtgagtcacatgaaattaacaatgaaagaaggatcatcagttatactgtacactgagagtacataaaacacttgtgcctcacctctagtatcaaagccatcttcatatattccttttataagaatattgatatgtattctttatgaacttcaggctcattccttttgttaagcatgtatttactggctgtatatagtatatgcattgaatttcccatgacttgaaataactatagatcaaagatctatgcaaatacaaattacaaacatgtagattacaagaaatccgaggtgatagtttatgaatctggatttgcccttttataacttcacttcaaatagaaacatcttgtaccctcaagtccaggcaaaaatccaattttaaaatctcattcttaacctttgaaagtagagcctttggaaacagaatgaacttcactttaaagcactgcctttaagaactgtaacatctattttccagagatgtgacccaggaaacaattcatcaatagtttatccattccactggcaaaagttttaacaattctgatgatttcatcatatgtgcagtgaataccatccgtatcatttcacaacaggatcagcagacacagtgctgtcagacaggtctccattgcttgttttagtttcttcttccttctctttcttttcttggttttcttcagccgcagtcttgtctgctctgaagaaaattcttgcactgctcagtgagaaatacagcaattcaaattcctgtagatagacatccagtcgcttctgagtgagattcatggtttgtaagagtttttcatcttgactggctgactgtacattctgttgcttagcaactgctcttatctccttcaggtatttctctctaacagactggaaccagtgaagtgaatcaaactcccgatactgatccaaaagctttagaatgtaagccacacccatggcaaagccatcatcagtaaaggcagctccaattttattttttttatttaatttttccttgcaactaatggaatgctctacaaagttgagggtcagagggggaacaattatatagaaatttcggagatgtatattctttggccttcgaaattctggagcaaaaacgtctacaagcattttggaaatattctgtgccttcggcagaatttcgtgtgtgatcactgaggactgaatccaaatgccttgctgcttttaatgtttcttctgcaagaccttcttcttttactagttcttcaaaatttacaatatcttcaagatcaggaacaaatctaatggcattgctgctacaatgaagaccaccagatcttatcattcgtacatagcccatagcattaccaatctggctgatgagttgcctgaattgatcaaggtagctctgtccctcaggtgttattccaagttttctgatgcctcgattgaatttttctgctctatcaaaaggatacttatgatcattttggtccttaatttccctgaaaaatcgaatatctttaatcaatctggatttgatgtgttcatcatacataaattggctaaatatatagaacttctttttcaaaaactggtaggtgaaattaacagttgtattcataattcccgtgccatgtgttcgaattgaattagcaatatgccgaatattaatagtattcaaatgcttgttattgcttgttcgttcaataaaaatctgattgttgagattatagaggtatcgggacacaaatatatgaatgtttctcataatttctaaaacatcaaggccctgttccaaagtctgactgggaagatgtgcctctgtcataaccagtccataacgctgagtagctaagtttctcatctcactataagtggcccagtcatgaagggctacagttgttagattgtagaaagtcttgtctaggtagtgagttacgtaagcccgaatgtcaatgaaacgattgaaaaaccgaattggattcagagagaaaaaaagagccaggtctttcatgccaactttgaaagggtttcggtcatccagctttaaatgagtatgcacagaaagtcgcagatctttctctatttctttgcataatttgtccagcaaatgctcatttaaaatttccataatttccttgtcatagcaatccagaagtatctcataggactctaaatgccttgcatgcatcatagcaggtacacagtcgcgcaaagcactgaacatgtaatgtaatctggctgcatcaacagcattttcatatacatcatctaaataaattgggaagacagctcgatgccagtataaaaaacaacagtcacattgtgtttggactcgttctctaagttcactaataagatccagttttttcatgactacttgaagtggaaagagttcttcatctttaaatgttttcatttgtgtgccaacacttagtgccaaagaaacaataagtcgccgttgctttgtgcttggtccatttagagtgttttcagccaaaactagagcagagagcacatcaagacgctgttcgctgtattttttgtcagaaatcactcttttcttggccacagaaatagaatgaagagcctgatgttgaaggtgctgtgttatatgtgaaactgaatcagccacaaccatgcttctcctgtagaacatatgctctattgccttgagaagttcaacaagcctgcacaatgccttaactgaggttttggtcattggcttttgcatggacatgtagagattcattgtggttttaataatggtactaatactatatgcatacaagaagccctgtataaaaacattacatctattggtgagatcttcagcaaatttatccattctctgctctttagacaaaatagattccattttcatcatccatgagctcacaaagacgtagtaagactgtacatctttggtaagtgattgagctttctgttgtagaaaagtatccctgtgtattttaatggcttgaagactttttctgtctagcagtttggcagctgctggtattttctggatcagaaaattatcaggaaaccaaataatattagcagttagagtgatggctggtaccttcttacaaatgtccaataaagacttataaaactttttatcaatagttcgaaaaatctgaaagtgcaatacaaagagtccacaaattccaacatacttgtctctctggtcaatttcagaaggttctccaagtttggcttctacatttgcaaaaattgaccgaatactatgtgcaaattcctcagcaaaagtactattttttgacacagatactcctccattgagagaatcaaattgttgttctatacaggcctggaatatcattccatccagtaattgcccttctagcttcagcaagaacttttcaaatggctttaatttttcttcctgaattccaaattttgaaggattgtgatggacagatttcagtaaccttttgtacatagtccagtggtctttcagtgtgatatgattatcaataatttcatccagggtgagcaaaactgttagcagttctcccaagtgctcatacatagtctgaaaatgaactccagttgtctctataattttgggtgcaatcttgttactgatatagagggcagccaactggtggactacgttcatcaccacttcatagcacctcgtaacaaagcaagacagttcctgtaagaatgaaataaatctccccatttgaatttggcaatcaccttccaccatgctggcatctgtagctccttctccataaaacaagagaccattgtaaaatttagtttcagcctcatattttaatttcttgatttcacaacaaagtgcagcataaacagtgatgactttgtttaagaccttgttttcagtctttatgagttccaaaagagaggactgttcataaggcaaaagctttaatgctataggatcaagattgaaatcccaaacatctccaattgagtcatccagagcgtcctcaattcttctcagttgagaggtatactcctcaagaaatttcccataattcttaagttggacttcggcatgaattttctgcgagccgtcgtcaacgcggtcaaactcccagtccggggacagagtctccaccgccatcaccccggcgcctcccacagacacagccccaaccagcccgtgcggcgacgacggcctcaccccagctac

SEQ ID NO: 65319 - DNA, 5181 bp, Homo sapiens
gcctcgcgggcctcggcccggtgcgagcggctccgcgatgtggctgagcccggaggaggtgctggtggccaatgcgctgtgggtgacggagcgggccaaccccttcttcgtgctgcggcgacgccggggccacggcaggggcggcggccttacgggtcttctcgtgggcaccctggacgtggtgctggactccagtgcccgcgtggccccttaccgcatcctgcaccagacccaggactcccaggtctactggacagtggcgtgtggttcttcccgcaaagagatcacaaaacactgggaatggctggaaaataacttgctccagacactgtccatcttcgacagtgaggaagatatcaccaccttcgtcaagggcaagatacacggaatcatcgcagaagagaacaagaacctgcagccccagggagacgaggaccccgggaagttcaaggaggctgagctgaagatgcggaagcagtttgggatgcctgagggcgagaagctggtgaattactactcctgcagctactggaagggccgcgtgccccggcagggctggctgtacctgacggtcaaccacctgtgcttctactccttcctgctggggaaggaagtgagcctcgtggtgcagtgggtggacataacgcgtctggagaagaacgccaccctgctcttccccgagagcatccgtgtggacacccgcgaccaggagctcttcttctccatgttcctcaacatcggcgagaccttcaagctcatggagcagttggccaacctggccatgcggcagctgctggacagcgagggcttcctggaggacaaggccctgcctaggcccatccggccacacaggaacatctcagccctgaagcgagacctggacgcccgagccaagaatgagtgctaccgagccacgttccggctgcccagggatgagcggctagacggccacacaagctgcaccctgtggacgccgttcaacaagctgcacatccctggccagatgttcatctccaacaactacatctgcttcgccagcaaggaggaggacgcttgccacctcatcatacccctgagggaggtgaccattgtcgaaaaagctgacagctccagcgtgctgcccagccccctgtccatcagcaccaaaagcaaaatgacattcctgtttgccaacctgaaagaccgtgatttcttggtgcagaggatctctgacttcctccagaaaacaccatccaagcagccaggcagtatcgggagcaggaaagccagtgttgtggaccctagcacagagtcttccccagctcctcaggaggggtcggagcagcccgccagcccagcctctcccctcagcagccgccagagcttctgtgcgcaggaggcgccaaccgcatcccagggcctgctgaagctcttccagaaaaactcgcccatggaggaccttggagccaagggggccaaggagaagatgaaagaggagtcatggcacatccacttcttcgagtacgggcgtggcgtgtgcatgtaccgcacagccaagacgcgggcactggtcctgaagggtatccctgagagcctccggggagagctgtggctcctcttctccggggcctggaatgagatggtgactcaccccgggtactatgctgagctggtggagaagtccaccgggaagtacagcctggccacagaggagatcgagcgagacctgcaccgctccatgcccgagcaccctgccttccagaacgagctggggattgctgccctccggcgggtgctgactgcctatgccttccgaaaccccaccatcggctactgccaggcaatgaacatcgtgacctcggtgctcctgctctatggcagtgaggaggaggccttctggctcctggtggccctgtgcgagcgcatgctgcccgactactacaacaccagggtggtgggagccctggtggaccaaggcatcttcgaagagctcacgagagacttcctgccgcagctctcggagaagatgcaggacctgggggtgatctccagcatctcgctgtcctggttcctgaccctcttcctcagcgtcatgcccttcgagagcgccgtggtcatcgtcgactgctttttctatgagggcatcaaggtgatcctgcaggtggccctggccgtcctggacgccaacatggagcacctgctgggctgcagcgacgagggcgaggccatgaccatgctgggcagatacctggataatgtggtcaacaagcagagtgtctctcctcctatcccgcacctccgtgccttgctgagcagcagcgatgacccccctgcagaggtggacatctttgagctcctgaaagtgtcctatgagaaattcagcagcctgagggccgaagacattgagcagatgcggtttaaacagaggctgaaagtgatccagtccttggaggacacggccaagaggagtgtggtccgagctatacctgtggacattggtttctccattgaagagctggaggacctttacatggtgtttaaggccaagcacctggctagccagtactgggggtgcagccgcacaatggccggccgtcgggaccccagcctgccctacctggagcagtaccggattgatgccagccagttccgggaactctttgccagcctgacaccctgggcctgtggctcccacacacctctgctggcagggcgcatgttcaggctcctggacgaaaacaaggactcgctgatcaacttcaaggagttcgtgacagggatgagcgggatgtaccacggggacctgacagagaagctcaaggtgctctacaagctacaccttcccccagctctgagcccagagggaagccgagttcagccctggaggcgacccatttattttcacagagggacagctcctcagaagcatctcctctggcctcagatctggatcttttcctgccctgggaggctcaagaagcactaccacaggaagagcaagaaggaagtggaagtgaggagagaggagaggagaaggggaccagctctccggactatcggcactaccttcgaatgtgggccaaggagaaagaggctcagaaggagacgattaaggatcttcccaagatgaaccaggagcagttcattgagctgtgcaagacgctttacaacatgttcagtgaagaccccatggagcaggacctgtaccacgccatcgccaccgtggccagcctcctgctccgcatcggagaggtggggaagaagttctcagcccgcacaggcaggaagcccagggactgtgccactgaggaggacgagccaccagcacccgaactgcatcaggacgcagccagggagcttcagcccccagctgcaggagacccccaagccaaagcaggcggagacacacacctcggaaaagccccacaggagagccaggtggtggtggaggggggcagcggcgagggacagggctcaccctcccagctgctgtctgacgatgaaaccaaagacgacatgtccatgtcctcctactcggtggtcagcacgggctccctgcaatgtgaagaccttgcagacgacacggtgctggtgggcggggaggcctgcagccccacagcgcgcatcggcggcaccgtcgacaccgactggtgcatctcctttgagcagatcctggcctccatcctgacggagtccgtgctggtgaacttctttgagaagagagtggacattggactcaagatcaaggaccaaaagaaagtggagagacagttcagcaccgccagtgaccatgagcagcctggagtttccggctgatgcctgcagctgtgaggcctggcccaaggtgtcatcagtggggctggcctcatctcctcctgcctttcctcccttatcagtttctctttaaaggtgtgcccctcctgctctcccaggagcagtgagttgtgagtggaaagaaggctggtgcagacccagctgccttagacagattccctgggcctgcatctcctggcgccggctgcttctgggcccaggaagaggctgtggctcccaccttccttacacctggtgggagcccgcctcgcaccagctgcacctgcctagcattagaggctctcagatctgcccttgcttgcctcatacctctgtgctccacactgcggccaggccagctgagtccctccatccgtggatgctttcctgcagctatgtggtatgggggtcattcctgcctcttggcaccaggttggggggcatgtgcttgttgggcaccaaagtgatggaaccctcaggtgctctccgggagcctgaacctcctgactgaggaacatgggcagaacatgtttattgcacagagtgggcgctgcgcacaggcgtggctgtacacgtgctctcagctcatcatcctttccagtaactttaaaaaaacatccctcaggtcctgatatatttccttggattcatttcacttggctagaaattacactgtgctcaatgccttaataaatccctgaaagaaataaaaaccactgtgtgcaatgccttgctgtggcccccaaccactgcttaggcctcccaacttctccccaggccaagtatggggccctggctgtgttctggaagttcaagacacttagtcctccacagtgggtggaagagtgcaaggtctgccaggtcagatggagacgcaaaacctgctggtgcaagctgggcaggtcctgaccaacctgcatcaggggatgccctgagctccacaggtcttcatgggcaggggttgtgggtcctggtgaaggaagtgcatcctcaggcctgggctgtagcaagctgtctgcccttgggttcaagaacccagactgtggagccaaaggtgaccgcagggggccccagggctggagccacaaggataccctcactttgcatgaggagctgaaactgaccagtgtccagtgttagcccccacatggggctgctcttgcttctactaaaagatacagcagttacccccttatccacaggggatacagtggatatctaaaaccagacccccagtggatgtctaaaaccacagataataacaaaccttatacatactgttttttcctatgcatacatacctgtgattaagtttatgaattaggcaccttaagagattgacaacaataactaataataaaatgtaacggttatactgtaaaaaaaaaa

SEQ ID NO: 65320 - DNA, 2892 bp, Homo sapiens
ccacccgtccggttaatatggctcggctgatgtggtacaaaatcctggtattatcactgatatagggatgaaagcagtcaatgaagttttttcctgtatcaaatatctggcaatttacaattgccctcatctacacaacccatacaattggatctcagaccactcaagatggactcgattggttgatatcaacctagtacggtgccatgctttgaagctggactcttttggccagtttattgaattattacccagcctagagtttatttcactggatcagatgtttcgtgaaccacccaagggttgtgctcgagttggtctgagtgcaggcacaggaattggtgtttcatcagctcttgttagcaaccagaactccaacaatgacgataataatgcccagaataacaatgccaacatccacgacaacaatcaccatcatccagatgactcagacgaggagaatgactttcggcaagatctgcagccaggagagcagcagtttgcagctgacgcattaaatgagatggaagacatcgtccaagaagatggagaggtggtggccgagagtggaaataatactccagctcacagccaggcaattattcctgtggatgttgatgaggaacaagcaggacccagtggtcttcagcgtgtagtaaaaccaacctcaattactgttcatgattcagagagtgatgatgaagaagatagtctagaactccaagaagtctggattcctaagaacggtactcggcgttactctgaacgtgaagaaaaaactggagagtcagtgcagtccagagaattgtcagtaagtggaaaaggcaagactccacttcgaaagaggtacaactcccatcagatgggccagtcgaagcagtttcccctcgaggaaagcagctgtgagaaaggctgtcaggtcaccagtgagcagatcaaagccgatatgaaagcagctagggatattcctgaaaagaaaaaaaacaaggatgtttatcccagctgcagcagcaccaccgccagcacagtgggaaactccagctcacacaacactgcttctcaaagccccgactttgtaaggacggtgaacagcggcggctcttccgagcctagccctacagaagtggatgtgtccaggcagtgtgcctgctcccccggtgggtcagaggactctgaggccatggaggagggagatgcagagagttctgtctgccccagatgctgctgtcacaggccccaggaatcccaaaggagaactagcaggtgttctgatgaggaacgtccttcaaccagccgagcctgtgttgtgaatggcccggatggtacgagatccgccttttcctttaggactctgccacaaggggggtcttcaggcccagcacatgatgagaggactaatgggagtggctctggggctacaggtgaggacaggagggggagctcccagcctgagagttgtgacgtgcagtctaatgaagactaccctcggaggcccctaaccagggccaggagcagactgtcccatgtactgctggtatctgagtcagaagtagccaaaacaaagccacgtcacgccatgaaacggaagcggacagcagataaatccactagtacaagtgatcctgtgatcgaggatgaccatgtgcaggttcttgtattaaaatccaagaatcttgttggagtcactatgaccaattgtggaatcacagatctagtgctaaaagactgtccaaagatgatgttcatccatgctaccaggtgcagggtactaaaacatttaaaggtagaaaatgcaccaattgtaaaccgatttgactatgcacagtgcaagaaactgaacatggatcaggtactagaccagatactaagaatgccacccgagagaaaccgcatcatatacctacgcccaatgcagcaggtggacactctaactttggagcagaagctatttagtggtccctacccctatcacatctgtattatccatgaattcagtaaccctcccaatgtccggaataaggtgcgcattcgcagctggatggacactatagcaaacatcaatcaagagctcattaaatatgaattcttccctgaagccactcgaagtgaagaagacttaaagaaataccccaagtacccctgggggagagaaatctatactttagaaggtgttgtggatggagctccatattccatgatttctgacttcccttggctgaggtcattacgagctgcagagcccaacagcttcgctcgatacgactttgaagacgatgaagaaagcactatctatgctcctagaaggaaaggacagctgtctgcagacatctgtatggaaacaataggagaggaaatttcagagatgcgtcagatgaagaagggtgtatttcagcgagtagtggcaatttttatccactattgtgatgtcaatggagagccagttgaagatgactacatttaattggtccctcctcctttccagctattttgtcagaaagcaagtagggccatccagctgccagagtgctccacagggacttgaggcatgcagttgggaggtcctggctcggtttgctatatagggaatatataaggaacatcgaaattgtatacaaagatttgtacataaaaaatatacaaagacgcttcctaaagtaccaactttatatcatatggtttataccatttaatttaaaaattccatttttaaggaagacagataatttgaaaaacttttggtttttcttgacttaattcatgaaagtatcattttttgactgagtctccatttacttcattcttaaatggattaattgtccatcccctttaaatcctgtgcctttttcttcctggagcgacgggttttgagtagacctggttgaagagtgaaaa

SEQ ID NO: 65321 - DNA, 1068 bp, Homo sapiens
ttttttttttttaaagtcaagtaaatttaatctgtaactatgaaatgtctaggttagcagcaattatggatgcccaaagactgggcaaaatttgtcccccgaaggcatcctgagggccacaaaggctcccctcagttcacaaaggtagctggcaggatgttagctttgcgctcagcttcaatgcagtacttttcggaaaggccaggggctctcagcttttcaagctttttcctcttgatctcatcgatgcgctcacggcgtttctgggcctcctctttgaggcgccggccctcctcaaaggtggcaatccggttctgcacttccttctgctggttctcgcgcacctggcgccggagctcattggcatgctgtaagcgccctgtggcctttttctcctcctccagccgctccttctcaatctgttctctctgagcccgaagaatcctctcgaactcatcccggtcccgttgcacctgaacagccagagcgtgctccttgaaagccacctgttcgagccgactttttcgcagctcagcctctgtttccatcttcttccgcgcattttccttttcctttctgcgccactctctgtctgcaacctcctggttgcgcttggcccgcaaggcatcctgttctgcctggtaatcctgggccttctcctgcatggccctcaagcgtgcgatctccttctctttctccctccggattctctcctgctcagcctcaaactctgcttctcgagccatcttcttcttggtaaactccatcaccatctggtctgccagcttctcctgagccaggagttctgctttctgtttctggttttcatcattgatgcgcttaatctcagcttgcatcttcagtttttgttgctgccttcgttccatgtcctttagatcttcctcttggagctgttccatatattccagcatctgctccttctcctgctcccgctgctcagcaagcagcgatcgctcctcctggttcttttccatctgttccacaatttgccgccttcctctaattctttcctccctcctcttcctctccagttcccggacgcgtggg

SEQ ID NO: 65322 - DNA, 2353 bp, Homo sapiens
accgggtcgacgatttcgtcgtttgtgcccggggtaaccccgttccggccaagccgcttcagcgggggacgtagccatgaaggaagagaaggagcacaggcctaaggagaagcgagtaaccctgttaacccccgccggggccacgggcagcggtggtgggacctcgggggacagctccaagggggaagataagcaggatcgcaacaaggagaagaaagaagcgctgagcaaggtggtaattcgaagattacctcccactttgaccaaggagcagcttcaggaacatcttcaacctatgcctgagcatgattattttgagtttttttctaatgatacgagtttgtatcctcatatgtatgccagagcatacatcaactttaaaaaccaagaggacattattttgttcagggatcgctttgatggttatgtattccttgacaataaaggtcaggaatatcccgctatagtagaatttgcaccttttcaaaaagctgcaaaaaagaagactaagaaaagagataccaaagtcgggactatcgatgatgatccagaatatagaaagtttttggaaagttatgccacagataatgagaaaatgacatctactccagagacactgctagaggaaatagaagcaaaaaatagagaattaatagctaaaaagacaaccccacttttgagcttcctgaaaaacaagcagagaatgagagaagaaaagagagaagaaaggaggaggagagaaatagaaagaaaaagacaaagagaagaagagaggaggaaatggaaagaagaagagaaacgaaaaaggaaagatatagaaaagctaaagaagatagacagaattccagaaagggacaaattaaaggatgaaccaaagattaagctgctcaagaagccagaaaaaggagatgaaaaagaattggacaaaagagaaaaagccaagaaattggacaaagagaatctcagtgatgaaagagccagtgggcaaagttgtacattgcccaagcgttctgatagcgaacttaaagatgaaaaaccaaagagacctgaagatgagagcggcagagactatagggagagggaacgggaatatgaacgagatcaggagcgcatacttcgagaaagagagaggctgaagcggcaagaagaagagcgccgtaggcagaaggagcgctatgagaaagagaagacttttaagagaaaagaagaagaaatgaaaaaagagaaagacacacttcgggataaaggaaagaaggctgaaagtacagaatcaataggcagctcagaaaaaactgaaaagaaagaagaagtggtcaagagagatcgaataagaaacaaggatcgtccagcgatgcagctttaccaaccaggagctcgaagccgaaatcgactctgtccccctgatgacagcaccaagtctggagattcagcagcagaaaggaagcaggaaagtggtattagccatagaaaagaaggaggagaggagtgataagtccagatggccttaggtgtcctgactgtctaggcagccaaagagcacacgttaagcaatccagaggtgccttcagggcaaagaatagagagaaagggagccgctgtgctggtggggtacactgcagaggagtaagtcttgtgtcaaagcaggaatctgatcagaggttcagaattggaagtacaatttcattgcttttgcaatttctacaaattaattttaaagtgtcagaaaaaggtgacggcaaggacatgcattgcaatttgcagggggaattgtcaagtgaggacttcatcacatatgacacgagagaaaagtaagagctggttctaaaatcaaaagctgttgttcatcctgaattgaattttctgaatttgggtggagcagagtcgctttgaagccttgttccgatctaattctattgtattgttgatgataagtgttgacattgggtagtgtagaagcaacaagcatgtccttgtagtacaggtacagtgaaggatagaacacactttcgttgatacaaaaatttaaatagttatgttacttctgtatccagtgtcctaaagttttaggattagttttagttttttgtttgcttatatgagcttagcgtaaagaatatttttaaacttcgtgttttgtcatcagcatcttttctattaaggaggttaaaattgtagtccttgtttgactctttgacaatccagtgtgtttgatcttaggtctcatgatctgagtgcataccctctccaggaaggaaactgcaccagtgtctattcctgttaaatagcaacttttagtctcagcttgtttcgttttgatgtcaataaatagtaacagcattcaagtgtgaaaaaa

SEQ ID NO: 65323 - DNA, 3239 bp, Homo sapiens
ttttttttttttcacaagaacagggtggtttattatttcaatagcaaagagctgaaaaatgtcgggtcccataaaggagcagaacctgacccagagcctgcagtacatttccaccccacaggggtgcaggctgggccaggcagggccaaaggcagcagaaatgggagtaagagactgtgcccactgagaagctctgctgggttgtgggcaggtgggcatgagatgatgatgatgtagtgtaaggaccaggtaggcaaaacctgttcaggtcttgttgagtgtccagagtggatccagaaggctgagggggtcgtcagagggccgggtggcccgcagcccttgcccgttatgggcctgcagaaagttatgcttgctcatccgctgtttgccccgcagggagctgtccagggagaaggcctctggggtcaaggaggccagcaattccagggaggaggaggggggccccgagctgggggcttcaggcactggcggctcctccttaggctggggagcctcaggtagtggggaggaaagggggggtggggaggaagatgggattggggtagactctgggaggctggctggcgggaggcctgggggctctgcagggcctggcaagctggcaaccggggactccaaccccccaggaggccgaatgctgagcttggcaatggtggcctggatggagctgatgggcacatccccaccgaggaccaggtcctgggagtcctgaggaaggtggttcttctggctgatgcttgcactggccaagggtttgcatggaggaggcacaccatggcgctgcaggacctgctccacgtgtctcaccactgcctcatagcagaacctgaggtgcagcttctcctgcagcatgtgctttctctgctgccgcatgcgccgcaccagctgaggcagctcagggattccgttcccagcctccacctcctgcacagctgcatagagcagtgcaaaggctcccgtgcggcccacaccagagctgcagtgcacaatgatgggcgtgtgcagaggccgctgatgcaggtaatgtgcgtgcacctcctggatgaagcgcagcaagttgctggggctgtcgggcaggcctaactcaggccaagtggggaagtgcaggtgcacaagagagcgcttgaggctctggtctcggaactgcaggctcagcacgcgctccacatgggtttcggtgctgcggacgctgctcaatgccaggctcagggcaccgtgcaccatgggctggcccctctcggtggggaagtagcgtgccactttttgcttctccatctcagcctcagaaaccagcatgacaatgactgacactttctgctcatggaccatgagccagaagtcagcagctgtgccaggcagtggggcctgggttgccactagcggggggcagtatggggagagcccctccacgcagctggcattgatgtagtcatccttgcctgagcgcagcaccacacggttactgtcatagggcatgacatcctggtgccggttcttcagtgagtagcagcgggcaatggcgatggaacggcctcgggcatcatgttcctgcgcatcttgcagctctcgccagacagtgtccagagctcccacatcccccagctgaccccgaaaggcctccagctcctgctgcaactgccgcagcctctcaggatgttcataggggtcccgctcaatcagccgcagggcctgcggccgacgaccctcagctgcatccaccttggtgggctgcagcaggggctgcccacccccaggagactgagtgccgccatgctggctctccgggctggaggagagcaggtctgcagctgcggcgcctcggcgcaggcaagggggtggttctgctgctggggggcgagggggtaccggaccaggccctggagatggggcaggtgaaggcaccaggtggggactaggggtggactggccagcagacgagggccctcgaatggtaagaggggctgcctgggggcccatgggtctggtagaaggggcaggaccatatgccagtgggggatggggaggctgagggggcccagggctggggaaaggcagagcccctgagtgggctggcagagggtcttgagcgggacctgggtagagctgggtgtgtaagggggggtggcggctgcccccaggaccccaggctgaggggcataggggtagggggattgtgggggtaggagtcctggggcctggggtgggaagagatgtggatgctggagtggaaggggctgctgtgggggctgaggcccaaacgcttgtgaaggatggggctgaggatggggctggggctggggcccaatccttggggctggaaaacctgtggggatcccagaagagaagtggtgctgtgctgggatgggttgcttagcccctgcagggtaggtgtaaggcgtgggcagtggctgcggtgggggcacagggaagcagggcgggggaggagcaggggtggggtttggccgtggggctgtgtggctggggatgggcgcctggatgctatctactgtggtggtggctggccgaaccgccatggccaactcggggcctgagaattgaggaggtggggccgaggggagacctgcaactggtggggccggccctacccccacatagggactgctcaccacgccatgctgtggggaggatcggggcacaaggcccagctccggtgtgtaggcaggggctgggtagagggcaggcccaggtgctacgggcattgcatggggccctggggccctgggctgtatcagctgggtggggcccgagtaggtaccagggggcaaggggcctgagagatagtggggtcctgggcctgtggagctggggaaggggctgggaggaaagtggagcggggtggcacttcccaggaaggtgtcaggcagtcgtgggccagccaccatgtcaggggggaggctgcgcagctcctcaggggggtctcctgcttccactgcctcactctcctccctgcggggcagcagcggctttggggctgtgggccgtggcggcggcttcttcttcagctccctgtccaggagctgctggcgggcagcctcgcgggcctggcaggtggactgcgtgcgctccagcagagcagccaccttgctctccagatctgcgtagaagtccctgccctcctgcgacttcttcatcaggtcctcataggcttcatacgaggccaccagggtctgcagcgtggagttccacttttggtcccc

SEQ ID NO: 65324 - DNA, 4936 bp, Homo sapiens
ggttcgcttcggcgtccgccgtctccgcagctgcctcctcttcctccttcgccaccgccgccaccgccgccgccgcccgcagcaccgcagcccctcccgccatggccgccgccggcgcccggctcagccccggccccggctcggggctccgggggcggccgaggctctgcttccacccggggccgccgccactgctgccgctgctgctgctgttcctgctcctgctgccgccgccgccgctgctggccggcgccaccgccgctgcctcgcgggagcccgacagcccgtgccggctgaagaccgtcacggtgtccacactgcccgccctgcgggagagcgacatcggctggagcggcgcccgcgccggggccggggctgggaccggggccggagccgccgccgccgccgcgtccccgggctctcctggctctgccggcaccgccgccgagtcgcgcctcctgctctttgtgcgtaacgagctgccggggcgcatcgcggtgcaggacgacctggacaacaccgagctgcccttcttcaccctggagatgtctggcacagcggcggacatctcgctggtgcactggagacagcagtggctggagaatggcaccttgtacttccacgtctccatgagcagctccgggcagctggcccaagccaccgcccccactctccaggagccctcggagattgttgaggagcagatgcacatcctccacatttctgtgatgggtggcctcatcgcgctgctgctgctgctgctggtgttcaccgtggcgctgtacgcccagcgacgttggcagaagcgtcgccgcatcccccagaagagcgcaagcacagaagccactcatgagatccactacatcccatctgtgctgctgggtccccaggcgcgggagagcttccgttcatcccggctgcaaacccacaattccgtcattggcgtgcccatccgggagactcccatcctggatgactatgactgtgaggaggatgaggagccacctaggcgggccaaccatgtctcccgcgaggacgagtttggcagccaggtgacccacactctggacagtctgggacatccaggggaagagaaggtggactttgagaagaaaggaggaatcagctttgggagagccaaggggacgtcgggctcagaggcagacgatgaaactcagctgacattctacacggagcagtaccgcagtcgccgccgcagcaaaggtttgctgaaaagcccagtgaacaagacagccctgacactgattgctgtgagttcctgcatcctggccatggtgtgtggcagccagatgtcttgtccactcactgtgaaggtgactctgcatgtgcccgagcacttcatagcagatggaagcagcttcgtggtgagtgaagggagctacctggacatctccgactggttaaacccggccaagctttccctgtattaccagatcaatgccacctccccatgggtgagggacctctgtggacaaaggacgacagatgcctgtgagcagctctgcgacccagaaaccggagagtgcagctgtcatgaaggctatgcccctgaccctgttcacagacacctgtgtgtgcgcagtgactggggacagagtgaaggaccttggccctacacgacacttgagaggggctatgatctggtgacaggggagcaagcccctgaaaagattctcaggtctactttcagcttgggccaaggcctctggcttcctgtcagcaaaagctttgtggttccgcctgtggagctgtccatcaaccccctgggccagctgcaagaccgatgtgctcgtcacggaagaccctgcagatgtcagggaagaagcgatgctgtccacatactttgaaaccatcaatgacctgctgtcttccttcgggccagttcgtgactgctctcggaacaatgggggctgcactcgcaacttcaagtgtgtgtctgaccggcaggtggattcctcgggatgtgtgtgccctgaggagctgaaacccatgaaggatggctctggctgctacgaccactccaaaggcattgactgctctgatggctttaatggcggctgtgagcagctgtgcctgcagcagacgctgcccctgccctacgatgccacttcgagcaccatcttcatgttctgcggttgcgtggaggagtacaaactggctcctgatggaaaatcctgcttaatgctctcagatgtctgcgagggccccaagtgcctaaaacctgactccaaattcaatgataccctctttggagagatgctacatggttacaacaaccggacccagcatgtgaaccaaggccaagtcttccagatgacctttagggagaacaacttcatcaaggactttccccagctggccgatgggctgttggtgatcccgctgccggtggaggagcagtgccggggggtcctctccgagccccttccggacctccaactgctcactggagatatcaggtatgatgaggccatgggttaccccatggtgcagcagtggcgggtccggagcaacctctaccgtgtgaagctcagcaccatcaccctcgcagcaggcttcactaatgttctcaagatcctgaccaaggagagcagtcgggaggagctgctgtccttcatccagcactatggctcccactacatcgcagaggccctctatggctcagagctcacctgcatcatccactttcccagcaagaaggtccagcagcagctgtggctccagtatcagaaagagaccacagagctgggcagcaagaaggagctcaagtccatgcccttcatcacctacctctcaggtttgctgacagcccagatgctgtcagatgaccagctcatttcaggtgtggagattcgctgtgaggagaaggggcgctgtccatctacctgtcacctttgccgccggccaggcaaggagcagctgagccccacaccagtgctgctggaaatcaaccgtgtggtgccactttataccctcatccaagacaatggcacaaaggaggccttcaagagtgcactgatgagttcctactggtgctcagggaaaggggatgtgatcgatgactggtgcaggtgtgacctcagcgcctttgatgccaatgggctccccaactgcagcccccttctgcagccggtgctgcggctgttccccaacagtgggagccctccagtactgtggtctccttgggagtgggtgggatgtttcagccagctatttggggaccaaggtcttccgattattatttttgcagcataagaaagtggatgaatacacagacactgacctgtacacaggagaattcctgagttttgctgatgacttactctctggcctgggcacatcttgtgtagcagctggtcgaagccatggagaggtccctgaagtcagtatctactcagtcatcttcaagtgtctggagcccgacggtctctacaagttcactctgtatgctgtggatacacgagggaggcactcagagctaagcacggtgaccctgaggacggcctgtccactggtagatgacaacaaggcagaagaaatagctgacaagatctacaatctgtacaatgggtacacaagtggaaaggagcagcagatggcctacaacacactgatggaggtctcagcctcgatgctgttccgagtccagcaccactacaactctcactatgaaaagtttggcgacttcgtctggagaagtgaggatgagctggggcccaggaaggcccacctgattctacggcgactggagagggtgagtagccactgctccagcctcctgcggagtgcctacatccagagccgcgtggaaacagtgccctatcttttctgccgcagcgaggaggtccggcctgcaggcatggtgtggtatagcatcctcaaggacaccaaaatcacgtgtgaggagaagatggtgtcaatggcccgaaacacgtacggggagtccaagggccggtgagggagggtattgccctccgtgagcacagagactctccatgggagggggagcagtattctcctggatcctggggcctgggtgggctgggggacagctgaggatgggcctagcagatgaagcttgccagcaaggccaatagcaaacggtttctcctgtggatagtggacagagacctttgtaaccaatggaattattcatttttctctatcttttattttttcaaagatattatttgactctatcaaaagtctctcctttttaaaccttttcttatggatggctgtcaatcccgaggcagaagttttcaggtggagaccaagcggcctttgctcttcttccttcttcctgccacactctgctttcttcctgccatggacccctggaggagacctatggagggacagttttgacctgacccctagaggagacagttttgacctcttcagcaccaggaaggaagctctgaggatggttgcagtgaggaagcatgggtctttaaggacttctctctcttttttgctggacattattgagtttgtgggaccctgcctcttcctgctacctgtgggtctgcccagagtccctgcaggcctgtccatgcattaaaaattcctattgtctctctttctgcttgggtggtatttcttaccaagggcatgtgcttgagagacctctgtttattcacttattgagtatctaccctgtgccagtcacagagcatatgcaactaaagacagagaagcttccttccctcagggaacttattgcccagtggaaattatagagaaggagtctggtcatttcaagctgtgctagaggaagaatggaggttctttgcactcactgttagagcatgagacacactggagggctcctgaaatgcttccttgaaaaagtgatacctaaacccaaaggatgagtagaaataagccagacagagaggtgaaaaagatggga

SEQ ID NO: 65325 - DNA, 2290 bp, Homo sapiens
ttttttttttttaaaatctcagatgctgctttatttaccaaaggtgctggcttggggctggttctgctggccaagccagcggatggctgtgggggtcccagctcagtcttccaagggcgagactgtacagccttgctgtggggggttgggggcagggttccctcccggggccctgttggggttcccgcccagcggcagccagggtgggcagtgggtaccagcactgccatctcaggaaggcactttcagcttcggggtccccaggaagaactgcaggacgcggtcggccaggagcgccaggcagaagtccaggagcaggacctgggcaatgaccagcttgaactccacagggatgtccacgaggccaaactggctgttgaagtcgggcgaggagccgaggagcaggccaatgatggccaggagtgaaactgccagactccacaccaggggcttgttctcgggcaggctctccatgaagggcgggcctttgtaattgatggcgaaggtggccatctgcatggccatggccatgatgtagacggtgctgttgaccaggcttggctcaaactccttgtacaagtccacgaactgctcctgcttctcggggctccgggcctgggcctcacggtacaggtagacaaggctcaggaagtgcacaaagaactggagcatgacggtgaggatggtgtacaggttgaagatgttgggcaggggccgttctcgggagagggtcttgaggggcttggaacgggagatgaagaggaagcagccggccagcagcagcccctgtagggtggcctggaagtcactgaacttgactccctccaggtagaggacgctctggctgtaggccaggatgagggcattgagcgccaggatcttgaacatctgtagcgtggtcaccagcgtgcagcggccctgcttgatcacgtggcagatgcactggatggatgagagcttggaggtgaagggtgctgcgatgctggcatcccccagtttcacaatgggcgtactctcgtcctcgaggtctcgcagcacctggctcaggcggtccctctgggaggttggctgctcctcggagggagggagccccgaccgctgcttggctgtcctggaggtggctctgatgccactgttgctcagggttgggctgtcccggggccgccgtcgccgctcgacaacccgctcaggggcattggccaagagcgccacacccacgtcagcatgcttcagggcgcccacgtcgttggtgccatccccacacatgagggtcacgtagcccagctccttcaggctggtgatgacaaactccttctgcttgggagccacacgggcgaacacctgcacatgggggatgaggcggagcagctgctgggggtcggtggcctgcaggtgggccaagccgtcgcctgtgaggcacagtgcgtactccagggccagtgcctttggggagccccgggccaggggcagcacgatgctgccgtcaatggagcgccactcgcactgccggcctttctcggagggaggctgcaggatcagcgtgtgggccttttcaatgaagtgcagctcgctgggccacgtggcatgcagtgagcgggttgtctcccgtgatcatgaccacccggtgggacgcattctggatctcccggatcacggccttggagtcagccttgagcgggcaggagaccacaatgaagccgacgaacttgaggctgcactccagggcctcccgcttgacctcccgggcctgctggtgagtgaggtgtcccagctccttgtaccccagcgccaggacgcgggctccttcccgggagatctcggtgtggatgtggtggtagtcgggcgggcactgggagaacatggagtgcagagtttcgggggcccccttcacggccgcgatgtagcagaggtcggtggagcccagcttttcatacgaggcaagcacggacattcgcttcagggcactggcaaaatgaaagcgctggtgaattttcagcccctgagttttaatacttcgggggaatactttctcatctttggtcagcgtccagtccacggccgtcagcatggccttctctagagggtcacccacgagggtgccgtcgtccagctgcatgagcgagtggcacgaggccagggcccggtgtgtttctacagggatgctggacactggggtcacctccttcccgctaataggccgggatacaccgcgcaccacccagctgtccctggtcaacggtcccgtctttgtcaaagcaacccaaccttcgaccttttcagcaaaggggga

SEQ ID NO: 65326 - DNA, 3109 bp, Homo sapiens
ttttttttttttctgggcatttttaattttaatcagcatggccagtcaaatacaaaaagttttgggacaaaactgatttagagttgattcagttcccaagtgagacatacttcttttgttctcccttttgtttagataattctgggcagaaaaatatattcaaagattctgagtaagataaaacaagtaataaggaaggtataatctgtcatgagattagagtttaagaaaccaacaaaaaagggaaggtgtaatatagcatcatctctgtgtgaaaaatataactttaaaataatacatattcataggaattgaaaatagagaaaaagggaataataaaaaattatggcttttaggggacttaaggaaaaatagaaaactttattttacaattctccagaaaaaaatcacttatattttgcccaaaattaccttatacagtaaattatatattaaggtagaccattaattaagcttaaatagtggtttcaaatgttggtaaatatgtcttttagttgcaaaaatttcagagacaggctgcaactttatcctgatagaagtcaaagcccagtggagaagttctacatcacggacccggggcaatgtgagctgtaaatctttcttcaacccaaagagcttctggtttaccttcaggacagctctccacgttggtaggtcggtgagggatgataaagggtaggacatccagccacccagggcagttttccggtgtgtggctcttgtttttacaactggtcagcaccacaaagtagtgtgttgggatgggaacatcagtgttggctaaatgtttggtaatttcatctggagcatcaaaatggccatcataattataatcaaatattggtccactaaccacatttactccatttctttctgtggcatgttttataagaagaacactgtggaagtagtcccacatttttctgaattcttcatacataggtaccaaattgctagtaattaaagcatcatattggctatctgatgttctattgctggcaggaggatagaggaagccgtgggtgatattcttgtctgctaaatagaaggaacatttttggctctcagaaggaggaaccctgacatcagcccgcagacagtctgggacagtgggaggcagaggcgatgtgtctcccaactgggggactgtgtatgaactccacatgggcatcctcatagcttttccaaatccactgacatattccctgtggtaaaggagacagtggtccacgttcttctgcagtaccctaggcctcccaaatggcaaatttactttcactgttgctgttatttcttcttgggtgagatttagcatctgattcacttgttccagctgagtactattttgtaggtgagggcagaaacagtcaagagactctgtgggcaatggattagcaaagccacaaacagaaaactttgacacctcctctgcatgggatggctcataaaaaggcaccttcagaagatggtttaaactaccatgggttccattgtttggtgctggttgaatgcgtagaagatcacacattaggttatagacttcaatattttcaaatggttcaacttcagtcttctctttaaaactgggtccatgtgccagaaagatagcctccatgctcctaaactcattgttataaccatggttgcctcctccacaatttgtatttgatttactcctaacagccagccactgttgatccacaaagagatgaactttgtcgattctgacgttcttggcatagtgcagtcgctttggcaaatcaggagtcaaatagggcttgaaatgctgatcaggttttcggcaactgaggtttctaacaatttcctcagaattaaaactaaaaaagtcatgaggtatattatgagctcggatgcggggggcaggcccttcgtacatgtagaagaagtttattctgggaaaataatcagtcatgtattccatgttgttacaataagtctggtccattccatggtcagccagaaggatgatattgacacagttgtgcaaattccgctgcttcaggccttccatcaacatcccaaaagcatgatctactacctgtaaggctttaattactctggcactgactggtccacctgcatgtccagaggaatcaggttcttcaaaatacatggtataaaacctgggtctttcagctttgggcaggtccagccattttaacagtgtagaaatcctctcttcaaatgggacacttccgttgtaaggcatgtatatggaaggaaaggagccatttatagccacttttgatccgggccaaaagtaggtagcggcttttaaaccttgatacattgctgtcagccacattggttgcccatgccaccaggctggattattttgttcctttgaagaaagtgaaaaattcttgttgagatttacatcatacatattattgtcaatgatgccatgtgactctggatacaagcccgtgacaatggtgtaatgatttgggaaggttttggtaggatacatagctctcatgtattttgaatgaattccacatgttttcagtttattgatatttggcattaaagtatcccatgtgtataaatattcagctctaaatccatccatagaaaacaagataactggtggcaggtcaaacccttctgggcactgagactgctgggctgtgtcacagttttcttccagccatgaggtttctccttggcaaacactcttatagtcagcacagcaatctttcttctgcaaacagtcatctgaacaagagcaaaggctggcctctaatctggtctctccacaacgaaatttattgcacatccatattcgagttgattccacacaggtgtcttcaaaatcccagcagcaatcacctcggtctttacatgccacatcacaccggcagttctccagtcctctaaatgatgcatcaaagcacttcttcctgcagctgccttgcttttccagtttcctgagtccaagccccaggcctaatccaagtgacatgatcaccagcaaagcaagaagaacaatgcaagctattttatatttcttaagagtgttcttcttaacaggttgttccgttgctaaagtcaacgtagattccat

SEQ ID NO: 65327 - DNA, 2899 bp, Homo sapiens
ggcagctgcggcgggacccgtgttctggaggcgactgctgggcctcctgcctggccgcccagggctggccgcgctcctgggacgcctgtccgaccgcctcggcaggaaccgggaccgccagcgcaggaggtcaccatggctgttattggctcccttgctgtccccagctgttccccaggtcacctccccaccttgctgcctgtgtccagaaggcgtgcaccggttccagtggatcagaaacctggttccagaatttggagtctccagttctcacgttagggtgctttcttccccggcagagtttttcgagctcatgaaggggcagataagagtagccaagaggcgggtcgtgatggcatccctctacctggggacaggtcctttggaacaggagctggtggactgcctggaaagtactctagaaaagtcactccaagcaaagtttccttcaaatctcaaggtctccattctcttagacttcacgcggggctcacgaggccggaagaactcccgcacaatgctgctcccactcctgcggaggttcccagagcaggtccgagtctccctctttcacacgccgcacctccgtgggctgcttcggctcctcatccctgagcgcttcaacgagaccatcggcctccagcacattaaggtgtacctcttcgacaacagcgtcatcttgagcggtgcaaacctgagtgactcctacttcaccaaccgccaggaccgctacgtgttcctgcaggactgtgcggagattgccgacttcttcacggagctggtggacgcggtgggggatgtgtccctgcagctgcagggggacgacacggtgcaggtggtggatgggatggtgcatccttacaaaggggaccgggccgagtactgcaaggcagccaataagagggtcatggatgtgatcaactcagccaggacccgccagcagatgctgcatgcccagaccttccacagcaactctcttttgacccaggaagatgcagcagctgctggggatcgcagaccagcccctgacacctggatttatccgctgattcagatgaagcccttcgagattcaaatcgatgagattgtcactgagaccctgttgactgaggcggagcgcggggcaaaggtctacctcaccactggctatttcaacctgacccaggcctacatggacctggtcttgggcactcgggctgagtaccagatcctgctggcctcaccagaggtgaatggcttctttggggccaagggggtggccggcgccatcccagcggcctatgtgcacatcgagcgacagttcttcagtgaggtgtgcagcctgggacagcaggagcgggtccagcttcaggagtactggcggaggggctggacgttccacgccaaaggtcagttcaccgggacctggaggcccagattgcgatcgtgacggagaaccaggccctgcagcagcagcttcaccaggagcaagagcagctctacctgaggtcaggtgtggtgtcctctgccaccttcgagcagccgagtcgccaggtgaagctgtgggtgaagatggtgactccactgatcaagaacttcttctgaggacagacaggtgctgtctctagcatcacctctcagcacgattttcccgagagttcacaggtggggcaggtggttgttctgactcaaccagagcttccagagggctctttgatccctttctcagttaaacacagagcagcatcttcaggggtatggcagctgtcctcaaagttagaagctggatgctaaattaggcagtctgttcactttccatctggtacccactccactaagtcccaaggcgcctgtgctggggtcggcagtggcagcctgtagtccccttctgctctcccttcccagggggtcctgaagaagccctggggcaagggctcagggatgagggggcagaaaggcagattgagcccctccaagctgagcacactggtgcaggagatgtagacgtgggaggaggggagcacgtttgctcgtgagagtggctctggcttgctgccctggccggctgtagtgcacagggtggggcgtcggtagagccagaccgtgggctgctgcctggacgcctcgctgacatccctgtgctgcggttacagagctgcgcccttctagactctggaagttgagtaacaggacctgctctgcccacccaggaggggcctgccgcttcaccagaggcaccagtggggtcccacagtcacctgaggtacccctggactgtcttgacgcctagaggtccgggcagggggtggctgccattaaaggtggggtctttgctgagtgaccttttgtgtcctggatccctcagggcctggactgcactccgggtggggtcaggctcccgaggcccctgctctctggttctggatgttgtgggtagttctgttgctttggatggctgggcctttggatggtggcttgtggggaagggacggtgaggagtcaaagatgagccaggacccatgtggccggcacatgcgctagtgccggcatctcatgtgtgcagcgtgggctcccttagtgcctggcaccttagtgctctgctaagtctcattgtttaaaaatgtgtagtttatctgcagcttttcctagttattttaattacttttcattttatttgaatagtgtgtgcaaatgtagagagtaaaacaatactgcggccatttcctgccctcccttcccccaggcagccactcttggcttgtttcttctgatgtgcacacgtgtccgtatttctaaataacgtgcatatcctgctgtcttcccccaaaatgtgtacttaaccaaaacagcaccagtgtcactcctgaaacaaaaattaccaagaatgtcttagtatcatcaaatacctaaatggtgttca

SEQ ID NO: 65328 - DNA, 2461 bp, Homo sapiens
gctttcgtccccttcctcttggtgacctggtcgtcagccgccttcattatctcctacgtggtcgccgtgctctccgggcacgtcaaccccttcctcccgtatatcagtgatacgggaacaacacctccagagagtggtatttttggatttatgataaacttctctgcatttcttggtgcagccacgatgtatacaagatacaaaatagtacagaagcaaaatcaaacctgctatttcagcactcctgtttttaacttggtgtctttagtgcttggattggtgggatgtttcggaatgggcattgtcgccaattttcaggagttagctgtgccagtggttcatgacgggggcgctcttttggcctttgtctgtggtgtcgtgtacacgctcctacagtccatcatctcttacaaatcatgtccccagtggaacagtctctcgacatgccacatacggatggtcatctctgccgtttcttgcgcagctgtcatccccatgattgtctgtgcttcactaatttccataaccaagctggagtggaatccaagagaaaaggattatgtatatcacgtagtgagtgcgatctgtgaatggacagtggcctttggttttattttctacttcctaactttcatccaagatttccagagtgtcaccctaaggatatccacagaaatcaatggtgatatttgaagaaagaagaattcagtctcactcagtgaatgtcgcaggccatttctaaaagtgctacagaggacagacagggttttgaggccaccctgattattgggatgcatctgcagcacatccaggacttgaatttcattacgagttcctaatagttgtatttctaaagatgtgtttcctagagaatgtacagccttatgacactgtagtgatgtttttataattttctaagtagatttttttatattaacaaattcatatacagaaaaaattaggttgttacaaaaaatggagagctcttatttttgtacagattctgtcgttttttttttatttgtgtgagatttatggaaatacactaaatgagtaattcaggttcagtacatttattacaaagtgaaatcaggggatattcatttgtaaattttattcttagtgaatgaactgtataattttttttatcaggagagcacttataaaattcaatttataaatatcatatacccaaatcataaagatttagttgatacattaacactaagatactctgatttttagccaaactaaacaaagtgcttctactgagaggcctttataccaccatgtacagtaactctaagtgaatacggaagaccttggttttgaaattctgccaccttgtttctccctgctcatgaggtcgcaccttttgctcttgctgctaattgcccattcgtagtgggtgtaatgccaggtggaatggtttcaacaagtcaggtgaaaaccatcctttattgttgctggcacaacttgatatatagtctgactcagaactgaagctcacatctcaaattcatttcatgccagtaaatgtggcaaagagaagaaaggcccaagagcgagacaagaagaatggagaagggggcagccaagaagaacttctgggttcagggtactgtttatttgctccttctcttcatgcctgtggctggatgtcccacaacactataagaaatataagtcaagccctttgtgttaagcaagaactacagactccatcttttcacccaaatcatgaatgaccaataaaaagcaagttattccagaggaagaagcagcccttgaaatgttaaggcttaggcttgaaaggtgaagagcaggaattctctctttcaaatcctagagcataaacccatgtgtggccaagtgagatcagccctcaagggcacatgccaagggcagagcagcccatgtagacagcttcggagggcatgggggtgtagggagttcggggtagctcctcattaactatttgttgggtgagtaaaggggtgaggctcagtggcaggtacctctgcaatgacaagctgcctcccctctatgtgtttagcatatgttattagaacatgtccgacacccctaccgctgccatttgggccctttaataaagccaagtagagaaatctggcaataaaaggcaaatgtaagcatgctttctttaagacgcatcataaatggttttctttaagtgaatggaagagtttgacagagatacacctttgtaagaaaacattaagaatgctggctggctgtggtggctcacacctgtattcccagcactttgggaggcctaggcaggaggattgcttgagcctgggacttcgagaccagactgggaaacatggcaaaatcccatctctacaacaaaaatacaaaaattagccaagtgcggtggtgtgcctgtagtcctagttacttgggaggctgaggtgggagaatcacctgagcccaggag

SEQ ID NO: 65329 - DNA, 5925 bp, Homo sapiens
atatcggaggaatcccagaatatagatacagcttaaattttgtcttacaaagtcagcacttattggttattcattgttgcgtgttctcaaaggccctgagtcaactgtctctactcagttaaatactatttggacttgtcccttatggtttcaagcacaattattacaatatttggggcttacaaaaattttatttataactagcttttaatttaactagatattgtaaaaattggaaatttggaatattcatttctttgtcctgttgtaggtggcgctctgttttccgaatagtgaccctgtgatgttcatggatgcattttatgggtgtctcctggcagagctgggtcctgtccccatagaagtgccattaacaagaaaggatgcaggcagccagcaggttgggtttctgctgggcagctgtggagtcttcttggccctgaccacagacgcttgtcagaaaggcctccccaaggcacagacaggagaggtggcagctttcaaaggttggcccccgctctcctggctagtgattgatgggaagcatctagccaagcccccaaaggactggcaccctctggcccaggacacagggactgggactgcctacattgagtataaaaccagcaaagaaggcagtacggtgggggtcacagtgtcccacgcatccctgctggcacagtgccgggctctgacccaggcgtgcgggtactcagaagctgaaacattaacaaacgtgctggatttcaaaagggatgctggtctgtggcatggcgtgttaacaagcgtcatgaacaggatgcacgtggtcagcgtcccctacgcgctgatgaaggcgaacccactctcctggatccagaaagtgtgcttctataaagctcgggccgcgctggtgaagtcgcgagacatgcactggtctctcctagctcagcggggccagagggacgtcagcctcagctcactgcgcatgctgattgtggccgatggtgccaacccgtggtcgatctcctcctgtgacgccttcctcaacgtcttccagtccagaggtctgaggccagaggtcatctgtccttgtgcaagttctcctgaggcgctgactgtcgccatccgcaggccacctgatctgggaggaccacctccaagaaaagcagtcctgtcgatgaacggtctaagttatggtgttatcagagtggatactgaagaaaagttgtcagtccttactgttcaggacgttggtcaggtgatgcctggagctaatgtatgtgttgtgaagttagaaggtaccccttatctttgtaaaactgatgaagtgggagaaatatgcgtcagttccagtgcaactggcacagcgtactatggattgcttggaatcacgaagaatgtgtttgaggcagttccggtcaccacaggaggagcacccatctttgacaggccattcaccaggacaggcctgctgggcttcatcgggcctgaccacctggtcttcatcgtgggcaaactggacgggctgatggtcactggagttcgcagacacaatgcagatgacgttgtggccaccgcactggccgtggagcccatgaagtttgtctacagaggcaggatcgctgtgttctctgtgaccgtgctgcacgacgaccggattgtcctggtggctgagcagcggccggatgcctcggaggaggacagcttccagtggatgagccgtgtgctgcaggccattgatagcatccaccaggtgggcgtgtactgtctggccctggttcctgccaacaccttgcccaaggctcctctcggagggattcacatttctgaaaccaaacagcgctttctggaagggacgctgcacccgtgtaatgtgctgatgtgccctcacacctgtgttaccaacctccccaaacctcgtcagaaacaaccagaggttggaccagcctcaatgatcgtggggaacctggttgctgggaagagaatcgctcaggcttccgggagagagctcgcccacctggaggacagcgaccaggcacggaagttcctgttcctggctgacgtgctgcagtggcgtgcccacaccactcctgaccacccgctgttcttgctgctgaacgccaagggcaccgtcacaagcactgcaacctgtgtccagctgcacaaaagggctgagagagtggccgcggctctgatggagaagggaagactgagtgttggggaccatgtggctctggtctacccaccaggggtggacctcattgccgcgttctatggctgcttgtactgtggctgcgtgcctgtcaccgtgcggcccccgcaccctcagaacctcggcaccacactgcccaccgtcaagatgatcgtggaggtcagcaagtctgcatgcgtcctcaccacgcaggctgtcacacggctgctcaggtccaaggaggctgctgctgccgtggacatcaggacctggcccaccatcctagacacagatgacatcccaaaaaagaagatagcaagcgttttcaggcccccctcccccgatgtcctcgcatacttggacttcagcgtgtcaaccactgggatattagcgggagtgaagatgtcgcacgcggccacaagcgccttatgccgctccataaagctgcagtgtgagctgtacccctcgcggcagatcgccatctgcctcgacccctactgtggccttggttttgccctgtggtgtctgtgcagtgtctactcgggacaccaatcagtgctggtgcccccgctggagctggagagcaacgtgtccctgtggctgtcggccgtcagccagtacaaggcccgcgtcaccttctgctgctactctgtgatggagatgtgcaccaagggcctaggcgcacagacgggtgttctcaggatgaagggggtgaacctgtcatgtgtgcgcacgtgcatggtggtcgccgaggagcggccccaggattgcgctgacccagtccttctccaagctcttcaaggacctgggcctgccggcccgcgccgtaagcaccacgttcgggtgcagggtcaacgtggccatctgcctccagggcacagctggcccggaccccacaaccgtctacgtggacatgcgggcactgcgccatgacagggttcgtttggtagaacggggttctccgcacagcctgccattgatggagtctggaaagatcctccccggcgtgaaggtcatcatcgcacacaccgagaccaaaggacccttgggagactcacacctgggagagatctgggtaagcagcccccacaatgccaccgggtactacaccgtttacggggaggaggcgcttcatgccgaccacttcagtgcccggctgagttttggagacacacagaccatctgggcaaggaccggctaccttggcttccttcggcgaacagagctcactgatgccagtggagggcggcacgatgcactgtatgtggttgggtctctggatgaaactctggagctcagaggcatgcggtaccaccccatcgacattgagacctctgtcatccgagcacacaggagcatcgctgagtgtgccgtattcacctggaccaacctgctggtggtggtggtggagctggatgggctagagcaggatgccctggacctggtggccctggtgaccaacgtggtgctggaggagcactacctggtcgtgggagtggtggtcatcgtggacccaggggtgatccctatcaactctcggggtgagaagcagcgcatgcacctgcgggacggcttcctggctgaccagctggaccccatctatgtcgcctacaacatgtgagcgcagcacaccggcccaggtgccggagatgaatgagccccagcagtccaaggtgtgatgtgggaagacaccgcagagctcactcaccgggactcgcccttcctgtgctcttacagatccctctcaacaatccccgcatctccttttagaaagcacttcctgaattatttaaagaaatattttgaatctgccaagtacatttacaaaaacacggatgctggtattttaacagatggagagacaaggaaaggaaaggaaaggcctggcatgggcattgtgaggaatcacaggcaccgaggttgttctctgctgtactgcaagtttgcactttctttaggctaaaaatatagttcctgatttttaaaattcagttatttattcccacttcaaatgacaagttcatatatagaatttacgggagaaacttgagaccatttacggggagaaacttgattctgggaagatagcagagtacaaaccagctgcctcacttctgtttcacagggaggctgatggaaaaaggaagcaagctggacccatcctccctgctcacagagggcactgtggtcacacacagtgcctcctctgccagttcctttattgaaagaggtgtgctggctggccacggtggcttacacctgtaatcccagcactttgggaggccgaggcgagcagatcacgatggtctccatctccttacctcgcaatccgcccgcctcagcctcccaaagtgttgggattacaggcatgagccaccgtgcccggcctatagaaatcaatctttttgactcttctcacttttatctccccatgcccaaggtttgcctgttccataacactcactcccttcccccttgctaatcagaagccatctcctctcagtgtctgatctctgctcttcatacatgattacagtcatggggtagagagtgcttgctaaattatgcagttaatcctatggtgctttaattttcaggccttcaaaaaacacttgtacagtgatgtgcagatttttaaacagttgaacttccttgtactacagtttttgtattgacagccaaatttgtctttcattcttcagattgtgaataaagtgatttttacagggcttccagcaaagtttttcctttcatctaaggcttgtagaaccctagcttatatagctgcttacatgagaaatgcaaaatctgtattcaccatgactttagtaacaaaggtaaagttttttagtagtgccaaggcaagaggaacaatcttggtggtagtactaagttttgtcaatattgtggtttcctgattgtattgttggctttctctctgagcattgaggtatactagaagtagagcttctcaaacataatatcattacctcataagcattaacaaatcaggcccaaagagcgtaagtcctagaaatttgttttaaagcagccctagtcatggtgctggtgctaccgccttgttttaggagcctgcctcctgtcagtatgaaaccctcacctgaaaaatgccagcctggacaccaaacactgagccccttcaacaggcacattatttccccctgagatccataagggaatttagtttctactattgtagagttctgaaaagaggtaaaatagtagtcctttggtcatcctatttttgctttcaattttgatatttcagactgtaaaaggccttgggggatgatagtacatgtggtagcagtaatttttttgaagcaactgcactgacattcatttgagttttctctcattatcagattctgttccaaacaagtattctgtagatccaaatggattaccagtgtgctacagacttcttattatagaacagcattctattctacatcaaaaatagtttgtgtaagttagttttggttaccatctaaaatatttttaaatgttctttacataaaaatttatgttgtgttttaaaatccttaggggctttatctatttttctaagtcagttaactgtacttctaaaaaaagtattttgtatctacttttgtaacttcgtcagaataaaatatattgaaagcaagaaatggctgattaaagtatgtatatcaacacacccttctatttaaatatagaaacttgagaatttagcaaaaaaaaaaaaa

SEQ ID NO: 65330 - DNA, 1620 bp, Homo sapiens
ttttttttttttaaattaatttaatttaatttaatttaaaaaatcatgcaagtagaaatgactttttcccccttttatcaataaaatgctgcccaaaatgactagcttattttttttttaattgaacccaaaagaagcttctagtatggagcaagtctggtggaaaagcagcatatctcccaggagagaagggaaacggagcagggccaatcatcaggtgacagtgcagtgctactcatcaccatcatgaaaaactcatgagcgtcagacgcgccacagggattcctgatcaggtaatatctgctattattatgacaagctccatagaaaaatgtagacagcagggcagaaagacattattctttataaataaaaggttcatctgtgcaatattgacattagaaaaatatacattgcttgccatagaccttctctggataaaatcagacgaatctaggatctgactccacttcactgtgagggctctggctccacggtgacgaccgactccacagcttctagaggaactccttctagcgggcccatccgcaggcacgcccctctgcatcagtcactgtgacaatgtcctcctcctgagacactattgtacctggaggggacaagataagcccatcggaagtctgaataaaaatctgcttctgtccctgagacagtaactcatggctcccattggaaatttcaaaagccatggcttcgccaacagcaaccacgctctccagttctctctggccagagtgcacctccatcccacaggggaaccggttcaagtcccccgaaaggcttctgagacacccttcagtcaatagtgatccatgtgggccaggctgaggccctggcttgggcacagtcctgtaggcacagtccactgccacgctatccacagacaaaattttctcaagcggaggggctgccacctctgtaggcaggacgctggtggggctgggctgctggtggttcaggtggaagtcacaaaccttgccgaggtgtcctgcctctgcatgtccaggccccccaggcggcagggactctgctccaccaccagatgacaaagggctgcagaaacccgggctcctcaggctgtcccaggtgtcctggtctgaagagtgttccaaagcattctctccaggaaacgctgccacctgtgcctgggtcagcctcctaggctctcctgactgagcataaacaggcagcccactgacatcccgggatgagagagcagcacctatagaccccctcctggcttctaagttagccagtgcctgaagctgcgggcccgcctggaacacgctcccattgccaccagaaaccgtcgttgtatggctttcttcagaacggggagagacagtcacatttactggaggggaaaaacctaaacattttgggaaacaggtgaacatggcgtgtactgtgtcatggcccactcactgcactcaccacccaaaaccagctaggccaagtcacctgccctgcagaaaagtcaaagcatcgatgctccttgctccttgggattggtagcaattttaaaaaatacgtccctattctctattcacaaaaacagattttgtattaaaaatatgctctaagagccaaaaaaaaaaa

SEQ ID NO: 65331 - DNA, 4487 bp, Homo sapiens
gccgggtcgacgatttcgtccgagtacctcacgcaagatggcggagctggaggaggtgactctggacgggaagcctcttcaggcgctgcgggtgaccgacctgaaggccgcactggagcagcgaggcctagccaagagcgggcagaagagtgccctggtcaagcggctcaaaggggctctaatgctagaaaatttacagaaacactcaacaccccatgctgcattccagccaaattcccagattggtgaggaaatgagccagaacagtttcataaaacagtatctggaaaagcagcaggagctacttaggcagcgtctggaacgtgaagctcgagaagctgcagaacttgaagaagcttcagctgagtcggaggacgagatgatccatcctgagggagtggcttccctgctgcctcctgactttcagagcagcctggagagaccagagctggagctcagcagacattcgcccagaaaaagctcctcaatttctgaagagaaaggtgactctgatgatgagaaaccaaggaaaggagaaagacgatcatctagggtcagacaggcaagagcagctaaactgtctgagggcagccaacctgctgaggaggaagaggatcaagaaacaccttccagaaacctaagggtcagagcagatcgaaatttgaaaacagaggaggaagaagaggaggaggaggaggaggaagaagatgatgaagaagaggaaggtgatgatgagggacaaaaatctagggaggcaccaatcctgaaagagtttaaggaagaaggggaagagatacctagagtaaaaccagaggagatgatggatgagagacccaaaacaagatcccaggaacaggaggtgttagagagaggagggagatttacaagatcccaggaagaggctagaaaaagtcatctggccagacagcagcaggagaaggaaatgaaaacaacatctccccttgaggaggaagaaagagaaataaaatcttcacaaggcttaaaggaaaaatcgaagtctccttcccctcctcgactgactgaagatcgaaagaaggcctcacttgtagcgctgccagagcaaactgccagcgaggaggagactcctccacctttactaacaaaggaagcatcttctccaccacctcatccacagctccatagcgaagaagaaatagagcccatggaaggcccagccccccctgtcctcattcagttatctcctcctaatacagatgctgacaccagggagctattagtatctcagcatactgtccagttggtaggaggcctgtctcctttgtcaagtccttcagacaccaaagcagaatctccagcagagaaagtgccagaggagagtgtcctgcctctggttcagaaaagcacactggctgactactcagcccagaaggatcttgaacctgagtcagacagatctgctcagcccctccctctaaaaattgaggaattagcactggccaaaggaatcactgaagaatgtctgaaccagccatctttggaacagaaggaaggcagaagagcttctcatacccttctcccaagccacagattgaaacagtcagctgattcatcctctagccggtcctcctcatcttcctcctccagttctagatcaagatctcgctctcctgacagttcaggttctcggtctcattcaccgctcagatccaagcagagagatgtagcccaggcacgtactcatgccaaccctcgtggtagacccaagatgggctccagatcaacatcagagtccagatcaaggtcacgttcacgttcacgttctcgttcagcatcaagcaacagcagaaaatctctgagccctggagtctccagggacagcagcaccagctatactgaaaccaaagatccctcttctggtcaggaggttgcaactccaccagtgccacaactgcaggtctgtgagccaaaggagaggacttccacctcctcatcctctgtccaagcaaggcgtctgagtcagcctgaatcagctgaaaagcatgtgacccagaggttacagcctgagcgggggagcccaaagaagtgtgaagctgaagaggcagagccaccagctgccacacagccccaaacctcagagactcagacctctcatctgccagaatcagaaagaattcatcacactgttgaggagaaggaggaagtgaccatggacacaagtgaaaacagacctgaaaatgatgttccagaacctcccatgcctattgcagaccaagtcagcaatgatgaccgcccggagggcagtgttgaagatgaggagaagaaagagagctcgctgcccaaatcattcaagaggaagatctccgttgtctcagctaccaagggggtgccagctggaaacagtgacacagaggggggccagcctggtcggaaacgacgctggggagccagcacagcccaccacacagaagaaaccttccatcagtatcaccactgaatcactaaagagcctcatccccgacatcaaacccctggcggggcaggaggctgttgtggatcttcatgctgatgactctcgcatctctgaggatgagacagagcgtaatggcgatgatgggacccatgacaaggggctgaaaatatgccggacagtcactcaggtagtacctgcagagggccaggagaatgggcagagggaagaagaggaagaagagaaggaacctgaagcagaacctcctgtacctccccaggtgtcagtagaggtggccttgcccccacctgcagagcatgaagtaaagaaagtgactttaggagataccttaactcgacgttccatttgccagcagaagtccggagtttccattaccattgatgacccagtccgaactgcccaggtgccctccccaccccggggcaagattagcaacattgtccatatctccaatttggtccgtcctttcactttaggccagctaaaggagtggttggggcgcacagaaaccttggtgaaagaggcctctgggattgccaagatcaaatctcattgctttgtaacgtactcaacagtagaggaagctgttgccacccgcacagctctgcacggggtcaaatggccccagtccaatcccaaattcctttgtgctgactatgccgagcaagatgagctggattatcaccgaggcctcttggtggaccgtccctctgaaactaagacagaggagcagggaataccacggtccctgcaccccccacccccacccccggtccagccaccacagcacccccgggcagagcagcgggagcaggaacgggcagtgcgggaacagtgggcagaacgggaacggcaaatggagcggcgggagcggactcgatcagagcgtgaatgggatcgggacaaagttcgagaagggccccgttcccgatcaaggtcccgtgaccgccgccgcaaggaacgtgcgaagtctaaagaaaagaagagtgagaagaaagagaaagcccaggaggaaccacctgccaagctgctggatgaccttttccgaaagaccaaggcagctccctgcatctattggctcccactgactgacagccagatcgttcagaaagaggcagagcgggccgaacgggccaaggagcgggagaagcggcgaaaggagcaagaagaagaagagcaaaaggagcgggagaaggaagccgagcgggaacggaaccgacagctggagcgagagaaacgtcgggagcacagtcgggagagggacagggagagagagagagaaagggagcgggacaggggggaccgagatcgggatagggaaagggaccgagaacgaggcagggaaagggatcgcagggacaccaagcgccacagcagaagccggagtcggagcacacctgtgcgggaccggggtgggcgccgctagctgggaaaacactagagctgcaggtaccagccactcggccccagggggttatggccacagagggataggcacagtctccaccaccctggagccaagggtctttcacatcacctatccctacatacataccaaatggaaaagtggccatccttttccccccaaacacacccccttaacctatctcttgggacttagcccgaccctccctctcatttcccattaagtctgagaggcaagagctaggttaggcaaggaggtggttggccagagatggggaacagccaggtgccccagtcctctgatttttcctccatcctgcttaccacctccctgggtacttacagccttctcttgggaacagccggggccaggactgggtcacctatgagctgaatcagcatctcctcctgagtcccagggcccctgcagttcccagtctcttctgtcctgcagcccttgcctctttcccacaggttccactttatatccaccttttccttttgttcaatttttatttttattttttttattattaaatgatgtggtctatggaaaaaaaaataaaaatctgacttagttttaaaaaaaaaa

SEQ ID NO: 65332 - DNA, 1969 bp, Homo sapiens
tgaaaagtttgccaaactgtcgttgatgtgggagagaaaacgtcagagttcaaggccaaaggctacttagctctggggctcacgtacagtctgcaggccactgacgcttctttgcgagggatgcaggaggtcctacagagaaaggcgcttcttgcatttcagagggcccacagcctgtcacccacagatcaccaagcagctttctacctggctctgcagcttgccatctccagacagatcccagaggctctggggtatgtccgccaagctcttcagcttcaaggtgacgatgccaactccctgcacctccttgccctcctgctgtcagcacagaagcattaccatgacgctctgaacatcatcgacatggccctgagtgaatacccagaaaatttcatactactgttttccaaagtgaagttgcagtcactctgccgaggcccggacgaggcactgctgacttgtaagcacatgctgcagatatggaaatcctgctacaacctcaccaaccccagtgattctggacgtgggagcagcctcttagatagaaccattgctgacagacgacagcttaatacaattactttgccagacttcagcgatcccgagacaggctccgtccatgccacatcggtagcagcctcaagagtggagcaggcactgtcggaagtggcttcgtctctgcagagcagtgcccctaagcagggcccgctgcacccctggatgacgctggcacagatctggctccatgcagctgaagtctatatcggcatcgggaagcctgcagaagccacagcctgtacccaagaagctgccaacctcttcccaatgttcccacaatgtcctctacatgcgcggccagattgctgagctccggggaagcatggacgaggcgcggcgggggtatgaagaggccttagccatcagccccacccacgtgaagagcatgcagcgactggccctgatccttcaccagctaggccgctacagtctggcggagaagatcctccgggacgcggtgcaggtgaactcgacagcccacgaggtctggaacgggctgggcgaggtcctccaagctcagggcaacgatgcggcggctacggagtgcttcctgacagccttggagctggaggccagcagccccgccgtgcccttcaccatcatcccccgcgtgctctgagcaggcgcctgccagcctcacctgccgctcaggcctcagaggccctgccgggcaccagggcttgtgccatcgccccaaggggatgaatctgccgcactgaggccagggacgagtgttcagtgggccacagtgaaccaaccaaaccaaccccgaatcatcgctctcgccatgtgcgtttctcttgttttttttgccagcccaatggtagtttctgaacctattgacattgttcaaaatggatcatgtgccatattttgttagttgacatctgagttttcagtaaaatgattatggaattaatcagcaaatgtagaagaatatattcaaagttaaaattcagtggcagcacagattatttttatcagagctgtaaagaaaacaactgtccttttctccccaccacccctcctgccccactttggcccagaaaccaaatgtgaacttcctgtctcccacctcagcactagtccatgccaggacaccagctgacaatttcttggttttactgtcaataattgtaccatgtgatcaattactgtcctcacttagaacaaagcctgagtccgagaatatttatattttaccaatatatgcctgttacaagagaaggaaatatgagttatttaagtttaacttttttatgtgaattcagagtttatttatcgagggaaatatgtacaaagaagcttcaaatggaatatttaccgacattccttatacatgacagacacttggctacatgggaagatgatgttaataataaaatgatttttaaatggaaaaaaaaaa

SEQ ID NO: 65333 - DNA, 2263 bp, Homo sapiens
ttttttttttttgctctttaaatttgctcttttaattgcattaaataaatccatttcattgttttactttctgggaaaagggttaaacttcaaatatctgaaatacttttcatttataccaggtcaagaaaaatgccacagccagaaaaatttattttaaaatagaaacatacattaagctttaaaacaaccaactctcaaactgaaagaggaaagagcctttgatcccagagtccatgcggaatgaattccatacggtgtttgaaattcacataaggagcacttaggaaaaccacctgaaatgggaaatccaacaggcccccttggcctgtgagggcttcccacccctggcccgtgtgagggacatgggccgaaccccgggacactcgtgtgccgggaggccaccacagctcaaggtgaccgggcagcacccagctctgtgaccaagacagatgttcacacgtgggggcatcgtaagcgctaccagctccaaatctgacgtgatgggaacttgggagatgtctgagaaatgtccgaagggattttggcaacacagaaaacgcaatgtctaggaattcctccaaatgcttccaaaaatactcattgacaattcaagttgcacttggctggcggcagcccgggcggccttcagtccgtgtggggcgcccgcgtggccttctcctcgtaggactccccaaactcgttcactctgcgtttatccacaggataaagccaccgctggtacaggtagaccagaaacaccacgtcgtcccggaagcaggccagccggtgagacgtgggcatggtgatgatgaaggcaaagacgtcatcaatgaaggtgttgaaagccttgtaggtgaaggccttccagggcagatgtgccactgacttcaacttgtagttcacaaagagctggggcagcatgaagaggaaaccaaaggcatagaccccgttgacgaagctgttgattaaccaggagtaccagctcttatatttgatattcaggagtgaatagacagcacccccgacacagagagggtacagcaggtatgacaagtacttcatggcctgagtatcgtactcctcggttttcctctcagattcgctgtaagtgccaaactgaaattcgggcatcaggcctctccaaaaaatagtcatcttcaatgccttcttcactttccacagctcaatggcggctccaacacccgccgggaccagcaccagcaggctcgtctgctcgtccagcaggaacagaaagatgaccacggtgctgaagcagcgccagagcactgccttggtggacatgccgatcatgctcttcttcttcttccagaaactgatgtcatttttaaaggccaggaaatcaaagagaagatggaacgctgcgacaaagaaggtcagcgccaggaagtataagttggtatctacaaaaattcctttcacctcatcagcatctttctctgaaaacccgaactgctgcagggagtacacggcgtcctgcatgtggatccagaagcgcagccgccccagtgagaccttgtcgtaggacacggtgaggggcagctcggtggtggagcggtttatgaccatcaggtccttcacgcggttgctgagctggtcgatgaacaggatgggcaggtaatgcacggttttccccagctggatcatcttcatgtaccgatgcacatcggcaggcagggaggacccgtcaaagacaaagttgtccgccatcacgttcagcgccagccgcggtcgccagtgggacactggctcatccagggcactcgtcggcttcttgtccgcctcgatctgctgtgtatcagactccccggtgagcaggttgatttcttctggcttggggaccatgtaggtggtcagaggactgaccaggtgcacctgcttcccgtcgtgccacggcaggaccccagcgtgatggaggaagatgtaggcatacagcgtcccattgtttctcgttttctttggtacagaaacattaactgtcctttcaaatttggactccacatcaaagtcttccacattcaagaccaggtcgatgttgttctcagcacccaggtgggacctcgtcgtggtgaaggagtgcgctcagctgcagcttgggccgccgcgccaggtagggctggatgcagcttgcgtcgccggagcacgggcgggtgtagacgatgccgtacatgacccagcaggtgtgcaccacgtagaccacgaacacgccgcaccaccaagctggtgaaggagctgcggccgc

SEQ ID NO: 65334 - DNA, 1878 bp, Homo sapiens
gtatctcatgctaatgctctacaaaggaaaggccgagcaggccgtgttgcatctggggtctgcttccatttattcactagccatcactacaatcaccagcttttaaaacaacagctaccagaaatacaaagagtgccattggaacagctgtgtctaagaattaaaattttagagatgtttagtgctcataatctccagtctgtgttctctcggctcattgaacctccacacaccgattctcttcgtgcctcaaaaatacgattacgagacttaggagcattaactccagatgaaagattgacccctcttgggtatcatttggcctctctgcccgtggatgtgagaattggcaaactaatgttgtttgggtctatcttccgctgtttggatcctgctctcaccattgctgccagtttggcttttaagtcgccgtttgtatctccctgggataaaaaagaagaagctaaccagaaaaagctggaatttgcattcgcaaacagtgattatctggcccttctacaagcgtataagggatggcagctaagtacaaaagaaggcgtgcgtgcaagttataattactgcagacaaaacttcttgtctggaagagttctgcaggaaatggccagcctcaaacgacaattcacggaactgttatcggatatagggtttgcaagggaagggctcagagcaagggaaattgagaaaagggcccaaggaggagatggtgtcttagatgccacaggagaagaggcaaactcaaatgctgagaaccccaagctgatatcagcaatgctgtgtgcctgctttgtatccaaatgtagtgcaggtgaaaagcccagaaggaaaatttcagaagaccagtactggagctgtcagaatgcaaccaaaatcagctgagttgaagtttgtcaccaagaacgatggatatgtacacattcacccttcatcagtgaactatcaggtgagacactttgacagcccctacctgttgtaccacgagaagataaaaactagtcgagtattcatccgagactgcagcatggtgtctgtgtacccgctggtcttgtttggaggaggccaagtgaatgtgcagcttcaaagaggagagttcgttgtctccctggatgatggttggatccgttttgtagctgcttcccatcaggtggctgaactggtaaaggagcttcgttgcgaacttgatcagcttctccaggataaaattaaaaacccaagcattgatctgtgtacgtgtcctcgaggatcccggatcatcagcacaattgtgaaacttgtcaccacacaataaaaagcagtcttagagagtgcttgctactcacctgcttctagctcacctgggaaataacagcagaacctctacctcgaactaaagacctattggggctggccctggtggaggagcccagggcatgaagcccaaggcagctgaggcagtgtatatacccttagggccatttctaacaaagccttggccactcccagcacaatttggagtgtcaagggtgagagcctaaaacccagcttgcctgtctttgtctctgtgattgttctggagtgaattaagttcacctgataactcaaaagtgaatgtataatacaattctgttttaatctgtgtattctttttctcctactttttactggggtgagaggggcatgaagagaaatacgccttttttttttttttttcctgtcgccaaggctcgactgagagaagtcaaaacagagaaggggaaaaaaaacccaaaattatgtgaacaagcaaaattaaaatttcattttaggcttattggcttactgagtaaacttgacttgtgaggggtttttatttttactcattaaaagtcaacaaaaaaaaaa

SEQ ID NO: 65335 - DNA, 6436 bp, Homo sapiens
atggggccccggctcagcgtctggctgctgctgctgcccgccgcccttctgctccacgaggagcacagccgggccgctgcgaagggtggctgtgctggctctggctgtggcaaatgtgactgccatggagtgaagggacaaaagggtgaaagaggcctcccggggttacaaggtgtcattgggtttcctggaatgcaaggacctgaggggccacagggaccaccaggacaaaagggtgatactggagaaccaggactacctggaacaaaagggacaagaggacctccgggagcatctggctaccctggaaacccaggacttcccggaattcctggccaagacggcccgccaggccccccaggtattccaggatgcaatggcacaaagggggagagagggccgctcgggcctcctggcttgcctggtttcgctggaaatcccggaccaccaggcttaccagggatgaagggtgatccaggtgagatacttggccatgtgcccgggatgctgttgaaaggtgaaagaggatttcccggaatcccagggactccaggcccaccaggactgccagggcttcaaggtcctgttgggcctccaggatttaccggaccaccaggtcccccaggccctcccggccctccaggtgaaaagggacaaatgggcttaagttttcaaggaccaaaaggtgacaagggtgaccaaggggtcagtgggcctccaggagtaccaggacaagctcaagttcaagaaaaaggagacttcgccaccaagggagaaaagggccaaaaaggtgaacctggatttcaggggatgccaggggtcggagagaaaggtgaacccggaaaaccaggacccagaggcaaacccggaaaagatggtgacaaaggggaaaaagggagtcccggttttcctggtgaacccgggtacccaggactcataggccgccagggccccgcagggagaaaagggtgaagcaggtcctcctggcccacctggaattgttataggcacaggacctttgggagaaaaaggagagaggggctaccctggaactccggggccaagaggagagccaggcccaaaaggtttcccaggactaccaggccaacccggacctccaggccttcctgtacctgggcaggctggtgcccctggcttccctggtgaaagaggagaaaaaggtgaccgaggatttcctggtacatctctgccaggaccaagtggaagagatgggctcccgggtcctcctggttcccccgggccccctggacagcctggctacacaaatggaattgtggaatgtcagcccggacctccaggtgaccagggtcctcctggaattccagggcagccaggatttataggcgaaattggagagaaaggtcaaaaaggagagagttgcctcatctgtgatatagacggatatcgggggcctcccgggccacagggacccccgggagaaataggtttcccagggcagccaggggccaagggcgacagaggtttgcctggcagagatggggttgcaggagtgccaggccctcaaggtacaccagggctgataggccagccaggagccaagggggagcctggtgagttttatttcgacttgcggctcaaaggtgacaaaggagacccaggctttccaggacagcccggcatgccagggagagcgggttctcctggaagagatggccatccgggtcttcctggccccaagggctcgccgggttctgtaggattgaaaggagagcgtggcccccctggaggagttggattcccaggcagtcgtggtgacaccggcccccctgggcccccaggatatggtcctgctggtcccattggtgacaaaggacaagcaggctttcctggaggccctggatccccaggcctgccaggtccaaagggtgaaccaggaaaaattgttcctttaccaggcccccctggagcagaaggactgccggggtccccaggcttcccaggtccccaaggagaccgaggctttcccggaaccccaggaagggccaggcctggccaggagagaagggcgctgttgggccagccaggcattggatttccagggccccccggccccaaaggtgttgacggcttacctggagacatggggccaccggggactccaggtcgcccgggatttaatggcttacctgggaacccaggtgtgcagggccagaagggagagcctggagttggtctaccgggactcaaaggtttgccaggtcttcccggcattcctggcacacccggggagaaggggagcattggggtaccaggcgttcctggagaacatggagcgatcggaccccctgggcttcaggggatcagaggtgaaccgggacctcctggattgccaggctccgtggggtctccaggagttccaggaataggcccccctggagctaggggtccccctggaggacagggaccaccggggttgtcaggccctcctggaataaaaggagagaagggtttccccggattccctggactggacatgccgggccctaaaggagataaaggggctcaaggactccctggcataacgggacagtcggggctccctggccttcctggacagcagggggctcctgggattcctgggtttccaggttccaagggagaaatgggcgtcatggggacccccgggcagccgggctcaccaggaccatggggtgctcctggattaccgggtgaaaaaggggacccatggctttccgggctcctcaggacccaggggagaccctggcttgaaaggtgataagggggatgtcggtctccctggcaagcctggctccatggataaggtgtacatgggcagcatgaagggccagaaaggagaccaaggagagaaaggacaaattggaccaattggtgagaagggatcccgaggagaccctgggaccccaggagtgcctggaaaggacgggcaggcaggacagcctgggcagccaggacctaaaggtgatccaggtataagtggaaccccaggtgctccaggacttccgggaccaaaaggatctgttggtggaatgggcttgccaggaacacctggagagaaaggtgtgcctggcatccctggcccacaaggttcacctggcttacctggagacaaaggtgcaaaaggagagaaagggcaggcaggcccacctggcataggcatcccagggctgcgaggtgaaaagggagatcaagggatagcgggtttcccaggaagccctggagagaagggagaaaaaggaagcattgggatcccaggaatgccagggtccccaggccttaaagggtctcccgggagtgttggctatccaggaagtcctgggctacctggagaaaaaggtgacaaaggcctcccaggattggatggcatccctggtgtcaaaggagaagcaggtcttcctgggactcctggccccacaggcccagctggccagaaaggggagccaggcagtgatggaatcccggggtcagcaggagagaagggtgaaccaggtctaccaggaagaggattcccagggtttccaggggccaaaggagacaaaggttcaaagggtgaggtgggtttcccaggattagccgggagcccaggaattcctggatccaaaggagagcaaggattcatgggtcctccggggccccagggacagccggggttaccgggatccccaggccatgccacggaggggcccaaaggagaccgcggacctcagggccagcctggcctgccaggacttccgggacccatggggcctccagggcttcctgggattgatggagttaaaggtgacaaaggaaatccaggctggccaggagcacccggtgtcccagggcccaagggagaccctggattccagggcatgcctggtattggtggctctccaggaatcacaggctctaagggtgatatggggcctccaggagttccaggatttcaaggtccaaaaggtcttcctggcctccagggaattaaaggtgatcaaggcgatcaaggcgtcccgggagctaaaggtctcccgggtcctcctggccccccaggtccttacgacatcatcaaaggggagcccgggctccctggtcctgagggccccccagggctgaaagggcttcagggactgccaggcccgaaaggccagcaaggtgttacaggattggtgggtatacctggacctccaggtattcctgggtttgacggtgcccctggccagaaaggagagatgggacctgccgggcctactggtccaagaggatttccaggtccaccaggccccgatgggttgccaggatccatggggcccccaggcaccccatctgttgatcacggcttccttgtgaccaggcatagtcaaacaatagatgacccacagtgtccttctgggaccaaaattctttaccacgggtactctttgctctacgtgcaaggcaatgaacgggcccatggccaggacttgggcacggccggcagctgcctgcgcaagttcagcacaatgcccttcctgttctgcaatattaacaacgtgtgcaactttgcatcacgaaatgactactcgtactggctgtccacccctgagcccatgcccatgtcaatggcacccatcacgggggaaaacataagaccatttattagtaggtgtgctgtgtgtgaggcgcctgccatggtgatggccgtgcacagccagaccattcagatcccaccgtgccccagcgggtggtcctcgctgtggatcggctactcttttgtgatgcacaccagcgctggtgcagaaggctctggccaagccctggcgtcccccggctcctgcctggaggagtttagaagtgcgccattcatcgagtgtcacggccgtgggacctgcaattactacgcaaacgcttacagcttttggctcgccaccatagagaggagcgagatgttcaagaagcctacgccgtccaccttgaaggcaggggagctgcgcacgcacgtcagccgctgccaagtctgtatgagaagaacataatgaagcctgactcagctaatgtcacaacatggtgctacttcttcttctttttgttaacagcaacgaaccctagaaatatatcctgtgtacctcactgtccaatatgaaaaccgtaaagtgccttataggaatttgcgtaactaacacaccctgcttcattgacctctacttgctgaaggagaaaaagacagcgataagctttcaatagtggcataccaaatggcacttttgatgaaataaaatatcaatattttctgcaatccaatgcactgatgtgtgaagtgagaactccatcagaaaaccaaagggtgctaggaggtgtgggtgccttccatactgtttgcccattttcattcttgtattataattaattttctacccccagagataaatgtttgtttatatcactgtctagctgtttcaaaatttaggtcccttggtctgtacaaataatagcaatgtaaaaatggttttttgaacctccaaatggaattacagactcagtagccatatcttccaaccccccagtataaatttctgtctttctgctatgtgtggtactttgcagctgcttttgcagaaatcacaattttcctgtggaataaagatggtccaaaaatagtcaaaaattaaatatatatatatattagtaatttatatagatgtcagcaattaggcagatcaaggtttagtttaacttccactgttaaaataaagcttacatagttttcttcctttgaaagactgtgctgtcctttaacataggtttttaaagactaggatattgaatgtgaaacatccgttttcattgttcacttctaaaccaaaaattatgtgttgccaaaaccaaacccaggttcatgaatatggtgtctattatagtgaaacatgtactttgagcttattgtttttattctgtattaaatattttcagggatgttttcagggttttaaacactaatcacaaactgaatgacttgacttcaaaagcaacaaccttaaaggccgtcatttcattagtattcctcattctgcatcctggcttgaaaaacagctctgttgaatcacagtatcagtattttcacacgtaagcacattcgggccatttccgtggtttctcatgagctgtgttcacagacctcagcagggcatcgcatggaccgcaggagggcagattcggaccactaggcctgaaatgacatttcactaaaagtctccaaaacatttctaagactactaaggccttttatgtaatttctttaaatgtgtatttcttaagaattcaaatttgtaataaaactatttgtataaaaattaagcttttattaatttgttgctagtattgccacagacgcattaaaagaaacttactgcacaagctgctaataaatttgtaagctttgcataccttaaaaaaaaaa

SEQ ID NO: 65336 - DNA, 1709 bp, Homo sapiens
ttttttttttttactatgcttgaactttaggcatttattgtataaacttatacatgccatataaacaaactaaactcttttagctgctataccaagtttccataaaactgtctgctggttggggaggctacagcctgaccacattctttgccattgcctacaaggggtaagaaatggcacatggaaacatggcaggccgactcacgaacacaggcctgggccagcgctttcttcttcctcttttattcccatcagtcctagaccagagagtgaaccatgagtgctcttggttcctggcagcaggatgaggcagagagtgcccgggcacaagctgttgtagagctttccaatcttccggctccagcgccaggctgctatcttcgggtggtccagtttcagagtctgcaaggcctcctgttcaaaggggggaggtacaacacgaagccctgggagccttgttgattcaggtggtaagcctctgagccaggccatggaggtgccctgggggttagggcatgcctgcctttcagcttccagtccttgcctgtgagaatgttgagggcctgctgggcactgccaaaacttttgaatttcaggaaaacagtattttttctgctttccacttttaagatctttaggcaagatcacagcttccaggccaagaaagaggcggggctcctgcaatagctgttctttgaaggtttcactcactccagacagatatatagagccttggttttcagaatctccttccagctcattcacgagggtgtcacaatcaagcgtgagctctgtcacaggcctctgcaccttgatgcagataccatctaccagaataccatccaaggactctatggccagctgggcagcttctaggacttcatactgtatacagagatgaggctgacgggtttcaagaacaaaagtcattgactggactgggccaaagcttttaaacagcctcttcagagccctgagattgcaatttttgctaaatggcccagcatagacagttgatatctctgtccacttgatcctcatccttttgttcatctcctcagtgaggacaggtgaaaaggccttaaaagagaactgaacaatgctgaagggaaacagggggatttccactctggcctgctcaagaacctctttatttgaaagacacttaatagtttgacaatttctggaagatggaagttcaccagcatctgtctcccgggtcaaaaaaagaagcttctgacccactgaatccaagcattctaaaacacttgtgtttgggtgctgaagtacttctgctgtgtttttaggctcttggcctgctgcttgtatttcttggtgattagctagtgcttctagatttagttctgcaatcttttttgggccatgcttaaggaaataccgagccaattcaaggattgttctagcatcttctgtggcatcatgaccaagtctgtctggacactgtatatccttccccaaaataactttggctaagaacttgagcttaaatcttctgccctgctctctgacataaagcaacgatgtatcaataacatatggatgtatcattttcagtgctctgagatccaaatctaaggagtggcccactaacacagcatcaggaggaagcagtgcttttaactgcctctgtacatctttgagtttggtcgtcactgggttaagaatcttcttcgtgattcccgaaaagc

SEQ ID NO: 65337 - DNA, 1320 bp, Homo sapiens
tacgccaagcttggcacaaggccaggctgcacgcggcggactgggcaggccgggcccgggcactggtgggtgacagtcatacttcgtggagcccagcgagcatcccgggcaagcactaccaggctgtgggtctgcacctctggaaggtagagaagcggcgggtcaatctgcctagggtcctgtccatgccccccgtggctggcaccgtgtgccatgcatacgaccgggaggtccacctgcgttgtgagctctcaccgggctactacctggctgtccccagcaccttcctgaaggacgcgccaggggagttcctgctccgagtcttctctaccgggcgagtctcccttagcgccatcagggcagtggccaagaacaccacccccggggcagccctgcctgcgggggagtgggggaccgtgcagctacggggttcttggagagtcggccagacggcggggggcagcaggaactttgcctcataccccaccaacccctgcttccccttctcggtccccgagggccctggcccccgctgcgtccgcatcactctgcatcagcactgccggcccagtgacaccgagttccaccccatcggcttccatatcttccaggtcccagagggtggaaggagccaggacgcacccccactgctgctgcaggagccgctgctgagctgcgtgccacatcgctacgcccaggaggtgagccggctctgcctcctgcctgcaggcacctacaaggttgtgccctccacctacctgccggacacagagggggccttcacagtgaccatcgcaaccaggattgacaggccatccattcacagccaggagatgctgggccagttcctccaagaggtctccgtcatggcagtgatgaaaacctaacagggtggccccctgtgccagctcaggtgactggagcccgagggcctgacaggttcccagcagctgggccggccagccttgcactgtgggggctggtcctgagtcttggcctgcctcccagccctgccagggggctgcggcctaggggtccacgggaagcctccgtcaggagagacgcagccctgggggccagctggtgctgcaaggaagggtgggaagcttgctggcttctgttgcgccactgagacggcagagaccccaggatcccagagcttcccaggatccctcccagatcctctgctgactccatatggaggcctcacacccagagggtagggcagcagatcttctttataactatttattgttcgaatcacttttaggatgtaactttataaataaacatgagcgctgatgatttgcaaaaaaaaaa

SEQ ID NO: 65338 - DNA, 954 bp, Homo sapiens
cgcaagcctacgcggaagggaatggccaagggaaaacctcggaggtcgtcccaagcccctacccgggcggcccctgcgccccccagaggcatggatcgcaatggggtgcccccctctgccagagggggccccctgcccctggagatcatgtctggagggggcacccacaggcctccccggggccctccgtccacatccctgggagccagcagacgaccccgggcacgtccgccctcagagcacaacacagaattcctcaacgtgcctgaccagggcatggccggcatgcagaggaagcgcagcgtggggcaacggccagtgcctggtgtgggccgacccaagccccagcctcggacacatggtcccaggtgccgggccctataccagtacgtgggccaagatgtggacgagctgagcttcaacgtgaacgaggtcattgagatcctcatggaagatccctcgggctggtggaagggccggcttcacggccaggagggccttttcccaggaaactacgtggagaagatctgagctgggccctgggatactgccttctctttcgcccgcctatctgcctgccggcctggtggggagccaggccctgccaatgagagcctcgtttacctgggctgcaatagcctaaaagtccagtcctttggcctccagtcctgcccaggccctgggtcaccaggtcactgctgcagcccccgcccctgggccctggtcttcctccaacatcacacctgctgcccattctccatttctgtgtgtgtcaaaggggactaacagcagaatctacctcccaactgccatgtgattaagaaatgggtcttgagtcctgtgctgttggcaaagttccaggcacagttggggaggggggggtccttaacaagcgtgactttgctcattctgtcatcactaaggcaataaacctttgccaggtgaaaaaaaaaa

SEQ ID NO: 65339 - DNA, 4009 bp, Homo sapiens
agaaaatgcagttgggagctggacagatgacttgacccagttgagcctgctgaaggacaccctctctgcctatatcagtgctgatgatatctccattcttaatgaacgcgtagagcttctgcaaaggcagtgggaagaactatgccaccagctctccttaaggcggcagcaaataggtgaaagattgaatgaatgggcagtcttcagtgaaaagaacaaggaactctgtgagtggttgactcaaatggaaagcaaagtttctcagaatggagacattctcattgaagaaatgatagagaagctcaagaaggattatcaagaggaaattgctattgctcaagagaacaaaatacagctccaacaaatgggagaacgacttgctaaagccagccatgaaagcaaagcatctgagattgaatacaagctgggaaaggtcaacgaccggtggcagcatctcctggacctcattgcagccagggtgaagaagctgaaggagaccctggtagccgtgcagcagcttgataagaacatgagcagcctgaggacctggctcgctcacatcgagtcagagctggccaagccaatagtctacgattcctgtaactcggaagaaatacagagaaagcttaatgagcagcaggagcttcagagagacatagagaagcacagtacaggtgttgcatctgtcctcaacctgtgtgaagtcctgctgcacgactgtgacgcctgtgccactgatgccgagtgtgactctatacagcaggctacgagaaacctggaccggcggtggagaaacatttgtgctatgtccatggaaaggaggctgaaaatcgaagagacgtggcgattgtggcagaaatttctggatgactattcacgactttgaagattggctgaagtcttcagaaaggacagctgcttttcccagctcttctggggtgatctatacagttgccaaggaagaactaaagaaatttgaggctttccagcgacaggtccacgagtgcctgacgcagctggaactgatcaacaagcagtaccgccgcctggccagggagaaccgcactgattcagcatgtagcctcaaacagatggttcacgaaggcaaccagagatgggacaacctgcaaaagcgtgtcacctccatcttgcgcagactcaagcattttattggccagcgtgaggagtttgagactgcgcgggacagcattctggtctggctcacagagatggatctgcagctcactaatattgaacatttttctgagtgtgatgttcaagctaaaataaagcaactcaaggccttccagcaggaaatttcactgaaccacaataagattgagcagataattgcccaaggagaacagctgatagaaaagagtgagcccttggatgcagcgatcatcgaggaggaactagatgagctccgacggtactgccaggaggccttcgggcgtgtggaaagataccataagaaactgatccgcctgcctctcccagacgatgagcacgacctctcggacagggagctggagctggaagactctgcagctctgtcggacctgcactggcacgaccgctctgcagacagcctgctttctccacagccttcctccaatctctccctctcgctcgctcagcccctccggagcgagcggtcaggacgagacaccccggctagtgtggactccatccccctggagtgggatcacgactatgacctcagtcgggacctggagtctgcaatgtccagagctctgccctctgaggatgaagaaggtcaggatgacaaagatttctacctccggggagctgttggcttatcaggggaccacagtgccctagagtcacagatccgacaactgggcaaagccctggatgatagccgttttcagatacagcaaaccgaaaatatcattcgcagcaaaactcccacggggccggagctagacaccagctacaaaggctacatgaaactgctgggcgaatgcagtagcagtatagactccgtgaagagactggagcacaaactgaaggaggaagaggagagccttcctggctttgttaacctgcatagtaccgaaacccaaacggctggtgtgattgaccgatgggagcttctccaggcccaggcattgagcaaggagttgaggatgaagcagaacctccagaagtggcagcagtttaactcagacttgaacagcatctgggcctggctgggggacacggaggaggagttggaacagctccagcgtctggaactcagcactgacatccagaccatcgagctccagatcaaaaagctcaaggagctccagaaagctgtggaccaccgcaaagccatcatcctctccatcaatctctgcagccctgagttcacccaggctgacagcaaggagagccgggacctgcaggatcgcttgtcgcagatgaatgggcgctgggaccgagtgtgctctctgctggaggagtggcggggcctgctgcaggatgccctgatgcagtgccagggtttccatgaaatgagccatggtttgcttcttatgctggagaacattgacagaaggaaaaatgaaattgtccctattgattctaaccttgatgcagagatacttcaggaccatcacaaacagcttatgcaaataaagcatgagctgttggaatcccaactcagagtagcctctttgcaagacatgtcttgccaactactggtgaatgctgaaggaacagactgtttagaagccaaagaaaaagtccatgttattggaaatcggctcaaacttctcttgaaggaggtcagtcgtcatatcaaggaactggagaagttattagacgtgtcaagtagtcagcaggatttgtcttcctggtcttctgctgatgaactggacacctcagggtctgtgagtcccacatcaggaaggagcaccccaaacagacagaaaacgccacgaggcaagtgtagtctctcacagcctggaccctctgtcagcagtccacatagcaggtccacaaaaggtggctccgattcctccctttctgagccagggccaggtcggtccggccgcggcttcatgttcagagtcctccgagcagctcttccccttcagcttctcctgctcctcctcatcgggcttgcctgccttgtaccaatgtcagaggaagactacagctgtgccctctccaacaactttgcccggtcattccaccccatgctcagatacacgaatggccctcctccactctgaactaagcagatgccatctgcagaagtgctggtagcataaggaggatcgggtcataagcaatcccaaactaccaacaagaggaccttgatcttggcgaaagccctcggtgtggcagctttagccctcctccagatcacatgtgtgcaaattatggcttcagaggtggaagataaacagtgacgggggaacaaacagacaacaagaaggtttggaagaaatctggtttgagactctgaaccttagcactaaggagattgagtaaggacctccaaagttccccggactcatgaattctgggcccttggcccattctgtgcacagccaaggacttcagtagaccatctgggcagctttcccatggtgctgctccaaccatcagataaatgaccctcccaagcaccatgtcagtgtcgtacaatctaccaaccaaccagtgctgaagagattttagaaccttgtaacatacaatttttaagagcttatatggcagcttcctttttaccttgttttcctttggggcatgatgttttaacctttgctttagaagcacaagctgtaaatctaaaaggcacttttttttagaggtataaagaaaaactagatgtaataaataagatcatggaaggctttatgtgaaaaaagttgaatgttatagtaaaaaaaaaaagatatttatgtatgtacagtttgctaaagccaagttttggtttggtaattgatttctttgcatttattatagatattataaaataaaaaaaaaaaag

SEQ ID NO: 65340 - DNA, 2368 bp, Homo sapiens
acttagtgcatagactttatcaaatgttgaataaaaacagaaacaaaaaggagacaatcctacaatgaaaaggagacactcaggtccaccctagtgattccttgtatgtggaggaggtaagtgggacatggacagttctaaaatatagtacgtatatacccgacaaccacagtgttttgcatttctttatcagtgaaaaacaaactgatatctgaagtgtataaacagttccctagtagtctatttgagaaaaagtatcaaatgtgcatcaatatgttaaaactgacaaatacaagaaaagcattcagctagagaaaattcacagcattttattcaagttaatcaatttcattcaataatctgccatattgttcccagcaccactattactgttattatttctctttgaggaagaccaggtattaagaaatctggtttgaatttccatgatgcctaactctatggttaaaaatccttttccttaccaaaaaggaacttcttaatcaccagagaaacagagggaagactgagatatgtttgcagaaatttatctctactagagacaattcatagttcataatctttcagggttgtgctttacttgggggctccgttttcgggagcgggttgtttcccataaatgtttgcttaatacaaataatttgccccactgtaccacagaagggaaatgagggctagtgtccccagaaagcaagcaggcagtcctccagggaagaagccctaatggctcctagtggtgacagagtcattctgcctccccagcctgtgagcaataataaagtataactaagtgaacaggagaggtaataactagccagataacccatgggctagaatctctaaacagaaatgcttgtgttttgaataaatcagagctggaaagacacacttttggagaagtgattgagaatagaaaggtatgaaaaagataaaggtttctcaccaacgaaaccacaaaaaaggtggtaccagtcaaaggtagacttgggcttttattttggggtgagggtaccccaaatgggttgtgccattttcacataaaaattggaatgataatgaacaagtgaaagtgaaatcagtttccctcctttgttcaataaacatggttagagcacctgtgtgcaagatagtgggacaggtgctgaggggaaaggtaaagctgtttaagctgtggccctgagctgaaggagcaatctagcagtgccatcaggccctgcacactgcagagcacagtgtcccaggggccaggtggagggaaggatcacttccggctgcagcatcagggaaggcactctgcagtctcccctccaggttctcagcgtgcctctatgcctgtgtgactgctcagcctgccccattccaggcacttgctcatcttccttatctttctctgtagcatgagaaatggaagtttgagaggataggatcctacctcacaggtacctaataaatgtgtgtggaattgacatatagtggaagtgtcactttatcttagtgcagcaaggtggaaagagctttggaaaggagaggaaagatggtggttgtgagggtaaggtgttttcatcagaaggcgggagcaagggtatacaaaccaaaaagtcagtttagtatgtggcttagctcagagcacacgagggtaccaacacagccaaagactgtaagaaggtagctgaagtcctctgccaaataggattgaaaagctaaaatctttctctgtttctttcttaagtaacaactggtctattcaagctcaaccagagcatataagagaaaaactgactaacgagggggtcttaaagagctttgaaggacagtttctagaaagtagaaagatcactgagtaaattactgcacctcctctaccccacaaaaaaaagggtgaggatgaatgtaaaagtgtagagcaagctttcagacaacttcaagtttgtttttggcgcttccgtttgtaagcaatcaagatggtgagagacgctatcccaaagaagaaagtctgtaggaaccagagtagctgagcccgaccacttgtgatgcctttatgcttgcacaatactatggcatacaaggactctcccacatgaatcagccaggcaagccaatacccattgcacaggagggtgtgatggtggtccaccaagtactgagtgaaggggcccaggggcccaaggttctgataagggatactctgaggccagaagacaacccatgtgtagtagccaaagctgagggtgatgactgtgaaccagaacagactgcctcgctgaaagtaggtcgcgccggctgccgtagccatggctgcaacacctccccgcccacgcgtccgcccacgcgtccgcccacgcgtccg

SEQ ID NO: 65341 - DNA, 3790 bp, Homo sapiens
cggacgcgtgggttggattttttccgtggatctatcaattcacaattcgaatttggaagaaagaaggaaaacatgacgtctccagccaaattcaaaaaggataaggagatcatagcagagtacgatactcaggtcaaagagatccgtgctcagctcacagagcagatgaaatgcctggaccagcagtgtgagcttcgggtgcaactgttgcaggacctccaggacttcttccgaaagaaggcagagattgagatggactactcccgcaacctggagaagctggcagaacgcttcctggccaagacacgcagcaccaaggaccagcaattcaagaaggatcagaatgttctctctccagtcaactgctggaatctcctcttaaaccaggtgaagcgggaaagcagggaccataccaccctgagtgacatctacctgaataatatcattcctcgatttgtacaagtcagcgaggactcaggaagactctttaaaaagagtaaagaagtcggccagcagctccaagatgatttgatgaaggtcctgaacgagctctactcggtgatgaagacatatcacatgtacaatgccgacagcatcagtgctcagagcaaactaaaggaggcggagaagcaggaggagaagcaaattggtaaatcggtaaagcaggaggaccggcagaccccacgctcccctgactccacggccaatgttcgcattgaggagaaacatgtccggaggagctcagtgaagaagattgagaagatgaaggagaagcgccaagccaagtacacggagaataagctgaaggccatcaaagcccggaatgagtacttgctggctttggaggcaaccaatgcatctgtcttcaagtactacatccatgacctatctgaccttattgatcagtgttgtgacttaggctaccatgcaagtctgaaccgggctctacgcaccttcctctctgctgagttaaacctggaacagtcgaagcatgagggtctggatgccatcgagaatgcagtagaaaacctggatgccaccagtgacaagcagcgcctcatggagatgtacaacaacgtcttctgcccccctatgaagtttgagtttcagccccacatgggggatatggcttcccagctctgtgcccagcagcctgtccagagtgagctgctacagagatgcctacaactgcagtctcgcttatccactctaaagattgaaaacgaagaggtaaagaagacaatggaggccaccctgcaaaccatccaggacattgtgactgtcgaggactttgatgtgtctgactgcttccagtacagcaactccatggagtccgtcaagtccacggtctctgaaaccttcatgagcaagcccagcattgctaagaggagagccaaccagcaagagacagagcagttttatttcacaaaaatgaaagagtacctggagggcaggaacctcatcaccaagttacaagccaagcatgaccttctgcagaaaaccctgggagaaagtcagcggacagattgcagtctagccaggcgcagctcaactgtgaggaaacaggactccagccaggcaattcctctggtggtggaaagctgtatccggtttatcagcagacacggactacagcatgaaggaattttccgggtgtcaggatcccaggtggaagtgaatgacatcaaaaatgcctttgagagaggagaggaccccctggctggggaccagaacgaccatgacatggattccatagctggtgtcctgaagctttacttccgggggctggaacaccctctcttccccaaggacatctttcatgacctgatggcctgcgtcacaatggacaacctgcaggagagagctctgcacatccggaaagtcctcctagtcctgcccaaaaccactctgattatcatgagatacctctttgccttcctcaatcatttatcacagttcagtgaagagaacatgatggacccctacaacctcgccatctgcttcgggccctcgctaatgtcagtgccagagggccacgaccaggtgtcctgccaagcccacgtgaatgagctgatcaaaaccatcatcatccagcatgagaacatcttcccaagccccagggagctggagggccctgtctacagcagaggaggaagcatggaggattactgtgatagccctcatggagagactacctcggttgaagactcaacccaggatgtgaccgcagagcaccacacgagcgatgacgaatgtgagcccatcgaggccattgccaagtttgactacgtgggccggacagcccgagagctgtcctttaagaagggagcatccctgctgctttaccagcgggcttccgacgactggtgggaaggccggcacaatggcatcgacggactcatcccccatcagtacatcgtggtccaagacaccgaggacggtgtcgtggagaggtccagccccaagtctgagattgaggtcatttctgagccacctgaagaaaaggtgacagccagagcgggggccagctgtcccagtgggggtcatgtagccgatatttatcttgcaaacatcaacaagcaaaggaagcgtccagaatctgggagcatccggaaaacttttcggagtgacagccatgggctgagcagttccctgactgactcctcctccccaggggtgggggctagctgccgcccatcctcccagcccatcatgagccagagcctccccaaagaagggccagataagtgttccatcagtgggcacgggagcctcaactccatcagccgccactcatccctgaagaatcggctggatagtccacagatccggaagactgccacagcgggaaggtcaaaaagcttcgataaccatcggcccatggaccctgaggtcattgctcaggatattgaggcaacaatgaactcggccctgaatgagctacgggaactagaacggcagagcagtgtcaaacacacccctgacgtggttctggacaccttggagcccctcaaaacctccccagtggtggcccccacgtcagagccctccagccctctgcacacccagctcctcaaggaccccgagcccgccttccagcgcagcgccagtactgctggggacatcgcctgcgccttccggcctgtcaagtctgtcaagatggctgccccggtcaaaccaccagccactacggcccaagcccacatgtcttccccaaaacaaatgccactagccctggtgtcaactcatcaacttccccacagtctactgacaagtcttgtactgtctgagggataataatttaattgttctagacaaggggactatagggactgactgttattaaaatcttcctatttaactagcttggggacttcagttgaaaattaggttctaagttgttcttgcaggaattagcctccccgtctcccaaaaccttgagaatgaagcccttggtatcgcctctcccttcccactgccctctgcttcccccagtcgtcgtaattcagccagctgcagtccgtaccgttcttaggttagccagagacaggttttcattatcaggtcactgtgaaatctggtaaggcagtcctgaggacatgggctcaagtctcagtcccctcagaccacggtgatgccttgaccagatggttggctactgccatccagctttcagtggcatcttgttttgggaactgattatagagaatcatatatagtccagtcttcattttacatacacacacatattttacacacacacacattttacacacacacacactgtatt

SEQ ID NO: 65342 - DNA, 2343 bp, Homo sapiens
ttttttttttttaaaattaaataaacttttattttggaatgatactagatttacagagaagttgcagagatagtacaaagagttcctgtatacccttcacccagcctaccccaaggtcaacatcttacatcaccatggtacatctgtcaaaaccaagagactgaaattggtatattaactaaaattcagacttttttcagatttccaattttcccactaatgtcctgtttttgttccaagacccaatccaggatgccacattgcactgaagacactctcccttttcaattctattactggtcacctcagtcaactttcccggggaaagagaatgcatgggaaaagctcttgtccttattattgaactggagaaactgaggcttaaaagtgccgagtgaccaagttcccttagagggcagtgagaacaaggcctgccttactctgttccctttccccagggactcttggttttcagaagcccctctggaatgtcctacctggcctaaccccataccagcagtgcagacaaggaggcactcctactacagtgggtccagcccatggagagactcacttcctgccccaacacctcttcccctagaccctgagggccaggacaatgtcttagtgccttccaacttggcagagtgaggccccatgagacagagagaaagggggaagagggaaatacctttatccaaataaatacccatccaaaattatttgtgataggtgaaaaatggccacaagctctttgtggttcccctcatcaagacatgtagtctgtttctcatcccttgaatctgggtaaagccttgtgatttgctctgaccaaaagaacttagcagaagtgacactgtcctagtcccagttccaggccaagaactcaagaagtctttcagcttctactctcactctctttggaatcctgaagccatcatgtgaataagcctgagctagcctgctggagaggccacatggaggagaaccaagcaattccagccaacagcctgtcacctgccaggcaagtgagtaaggctatcctagaccatccaggcccagctgaggtaacagctgaccttagctccatgagggatcccaggtgtgagcagcagaactgccctgttgagcccagcccaaattgccaacccataggattgtgggaaaatacagggtttgtttctagctgccaagtttggggatggtttgttacacagcaaaagctaactggtacacaattctgcatttctctcttggtaatgggatcccagttttattgcaggaggcagtgtgccagtctcagtagatggaacacgattggtctattcagccatgacaattctgttccctgctgtcttagctttgtttgcagctagaggtgcaatggtagctggctcgggccaagggcatctaagtgaagatatgcagagggagagagcaggaaacagacttctgacgaggttttactttctgatagaaggtgacgggtccagctagtttggcccttcctcttcctccacccctccttccttgaacgcagacatgattcttggggatacagcagccatcttgggaccatgaagtaacgagcactgagattaaggcaaaaggatccaagacgtgacccctaccttcgtggagttgttgaaccaataccattagccacccatctccagaatccatgctatgtggaaaaacaatcttctgtttgtttaaaccactgcaatcaaggttttcctttccttgcagctgaatgtagtccatataagaggttacatagacaaaaatgcagagggatccttgtccttgggaatttggagccggcagcacgtggctcttcaagcccatctctgttctccttctcggtaatgcttcaagggtaaggccatgatcctattgtcacagaggtgggaactggggctcccacactgtacagtgagtccaaggccttgtagccggtgagaggggtgcccagagtcagaccctctcgccaggtgcaaagagaatgcacccctgctatcccttctgcatggcccagcctgctggaggccaggtgtgtcttctgggctcttgaaggtggcagcaggtgccaaggaggctgctactgcaagtctggtgtggatgctcccaggtacacccttaggtctgagagagtggactggacaagcttggcggggatggtctctcgctgcagttgctggtaggccgcgtagcggtggcagcccccaaaggagtagaagtagtcacctccctgggcccctttgatccagaggacatcgatggggggcacgctgtctgggtcctcccggatcgtgtccacgaggctctgcaccttggcggggt

SEQ ID NO: 65343 - DNA, 981 bp, Homo sapiens
gccgcggtcgctatggaggagccggagatgcagctcaaggggaagaaagtcacggacaagttcactgagagcgtctacgtcctggccaacgagccatccgtggccctgtaccggctgcaggagcatgtgcgtcgctccctccccgagctggcccagcacaaggcagacatgcagcgttgggaggagcagagccagggagccatctacactgtggagtacgcctgcagcgccgtgaagaacctggtggacagcagcgtctacttccgcagcgtggagggtctgctcaaacaggccatcagcatccgggaccatatgaatgccagtgcccagggccacagcccggaggaaccacccccgccctcctcagcctgatcctggaagagactcggggccccccagcctccgccaacccagagacggggtttcaccatgttggctaggctggtctcaaactcctgagctcgtgatcctcccgcctcagcctcccaaagtgctgggattataggtgtgagccaccgcacccagccttggttctccctttcttcatctggataaggaaggctggactgcaccttctctacaggctgagttggacattcgcagatctaccctcccaacctgcattctgcctcaagcagcaacgcccaccccaggctcaggccacatggagaagccacccctagttccagtggtggatgtggcacctcggcctggccaatcagagctcccttgtcctaggttcctagtgattggttcgagatggacacgtgacccaatgagcggcctttcctgggagttctaccaggagcatcaggaaggttgagctgggtgtatgggaaccaggccggggcgaggggttccaggggggacctgagaacattgcgtggagccctggatccaactgtacctgacactagccaatttcatttcttcagtttcatggacccctaaattatgatttttgccaaaatgaaaaaaaaa

SEQ ID NO: 65344 - DNA, 4362 bp, Homo sapiens
gcggcggggctccggctgcgctcgtggccgggccgggcggggaggccggtcccgcgggcgggggcaggggcggctccgcggcttctcccgccgccgccgccaaggggagtttccaggaagtggccatattggatccattcagccgcagccgcccgggcggagcgcgtcccgcagccggctggtccctgtcgctgcccctgcgctcgtcccagcccacccgcccggtgcggagctcgccatggcggccaccgacctggagcgcttctcgaatgcagagccagagccccggagcctctccctgggcggccatgtgggtttcgacagcctccccgaccagctggtcagcaagtcggtcactcagggcttcagcttcaacatcctctgtgtgggggagaccggcattggcaaatccacactgatgaacacactcttcaacacgaccttcgagactgaggaagccagtcaccatgaggcatgcgtgcgcctgcggccccagacctacgacctccaggagagcaacgtgcagctcaagctgaccattgtggatgccgtgggctttggggatcagatcaataaggatgagagttacaggcccatagttgactacatcgatgcgcagtttgaaaattatctgcaggaggagctgaagatccgccgctcgctcttcgactaccatgacacaaggatccacgtttgcctctacttcatcacgcccacagggcactccctgaagtctctagatctagtgaccatgaagaaactagacagcaaggtgaacattattcccatcatcgccaaggctgacaccatctccaagagcgagctccacaagttcaagatcaagatcatgggcgagttggtcagcaacggggtccagatctaccagttccccacggatgatgaggctgttgcagagattaacgcagtcatgaatgcacatctgccctttgccgtggtgggcagcaccgaggaggtgaaggtggggaacaagctggtccgagcacggcaggtacccctgggggagtggtgcaggtggagaatgacgaatcactgcgacttcgtgaagctgcgggagatgttgatccgggtgaacatggaagacctccgcgagcagacccacagccggcactacgagctctaccggcgctgcaagttggaggagatgggctttcaggacagcgatggtgacagccagcccttcagcctacaagagacatacgaggccaagaggaaggagttcctaagtgagctgcagaggaaggaggaagagatgaggcagatgtttgtcaacaaagtgaaggagacagagctggagctgaaggagaaggaaagggagctccatgagaagtttgagcacctgaagcgggtccaccaggaggagaagcgcaaggtggaggaaaagcgccgggaactggaggaggagaccaacgccttcaatcgccggaaggctgcggtggaggccctgcagtcgcaggccttgcacgccacctcgcagcagcccctgaggaaggacaaggacaagaagaattaacgcacgcacagacttacatgtcaagagtggactttagactttcatgtgttaagttgcttgagttacaccttgtgacccttctcccataacatggtgtgaggacggactgggagccggtacagactccagtgtttacagccttgctttcctcccaccgaccctggccccaggctgccccgggcctggcgggccacccctctctatgcaaacacgtaaaagccatgaatgctggaatccaaaactgacgaggtttatttttttcagagccagtggctggtcttccatttacagtgtcactattccctgacggagctgttatgtgccgctctagcgaaggccccagccgggatgctaggcctaattgttcagcgtggagatggcaactcacgtggtgccctagggtgcagctgcgtggtctggtatacatgctgcaaaattcacccagctcccctcattttaatttttctaacctacagcttaattttaataactttaaaacacttctaaatatttattttggcaccagcgtcaagacaaataatatcctctcccattattttcataagtaacacagattccctgatttttaaaaactaaaaatacagctaaacctttcttatgtataaagtatgcctatcatatacagggagaggtgggtaataaacttcctgtaatgacagtgtttggcatttctttatggatggaattggaacatgaacaagaccatgtccagcgtttttactgtgaatgtaaatggaacagcagcccaaagctgttgtctgtgccccagaggtgctacctgtagacagggaccaactccatgtgtgtgtgttaagtgtttgactccaattaagactcccaagcgaatcctgcatattccaaatgtaaagagtactcagtgggaaaaaggttgttacctcaaagtcattgcttctttcctgggctgggtcacagggtgaagagatgaaggtgtctgatgtatatagacaattagggaaaaatgagcgggcaaaggagctttccccttcagctgcactctaaaggggaacattttaagggagtactagcagctttgactcttctatgctcctgttggttttacaagccaccaggatgttcagtgttgagaatacggcctggtaaaatgggagatgtaaaatgactaaatgaaaggaagggtagttttaatgttgaagcaccgtgctgggcactggagctacccagaggaatgcacaacgctcccctcaaggagctcacagtctagcctactccctggctggaagcctcaggaagacgtgctaatttattgtggaattggtagtttgcttttcatgcccctgtcttccttctcatgaccatttccccctttctgtctggcttgcattattgatttccaggaccaagtcctggcttcctcctgccttcctgagatgatgttctgctcagggagaagtggaggggtgagctgtgtgtgtccactgaggcacggccaggaagaggcagcctttacctgtgaggggctccatgctccagcagcagagcaggttctagtgacaattcaactttttatgctatgaccaggggtggatctaaattttatggggctgaaagcttgaattatttagaaagacttctttaagaaaaacaatgttaatataaaattaggtacagggtcttggaaggggccctgaagattaagcttccttagcgtcacaataagtccgtatctggttgcaattgaaaactgatgcttcagtgagggtatctaaaaaggtaaactggcatatccagggcaaatgtgggctgccaatggctcatctctagggtaattttatgtctgaaagtgtatgcagttgggtcagagcatgacctttaagatagcctctctcagctaacatatttatgaagatgaggcctggtgacccagcaggttcattggatacataagaaatgagaattcctggttcatgggccaacctaggactctggagtatgcagacttggccattcgtccattgtggcctgccgggtcgcaccccaggcatactgaaaggccatactcgtggctggctgcctgcgggcctaagccttcccaggatcttcaggacacttgacagacttgtgttttctggtctgagctgcctccacaggtccctccagcaagcctcactgcacctctcccctgctgtttgtgtttggaattttgtcttctttagctgagaccaaattaaaccttggtgcataaagtgagcttaaaacttgccactgtttagtaagttagcccccatagaatgtgaccctgtctgcagagtctcatttacccctctttttctcattgtcatttgttggctttattagggctgtcttacaggatcatgttggcatttactatcatgtctttatcataaaccatgtttgtttgaggtagaagaatcaccatataattcgttgcccaaattgggactattgagagagaaaggggatgctattaattacaccagatcaaaaggcataaaccagacctgtcccaggccgatgtggaaatatgttctttctagttgtgggtaccctgatctaggtggtttgtaattgtgcattactgactgcatatgtttgtgtatgtgtaaatgtgggctccctgttaagtggggctcatggatacgaggcctgaggaagtgtggcttgctagtctgttacgttaacatgcttttctaaaattgcttcacgtgttaattcatttactcctgcattcattgactgtttttgttcttttccattcactttgtacttatttttttcattaaattttgcatttattttgaaaaaaaaaa

SEQ ID NO: 65345 - DNA, 1128 bp, Homo sapiens
  misc_feature (1)...(1128): n = a,t,c or g
tttttttttttttggagggagaaacaactttattttcatccagaaattagtaatgtttataaatttgtttatagtagtttgtaaattattatcagaaatagtaatgtctataaaccacttactttaagagacaatcaggaactatgatgagggcaataataaaaggagaaatcttaccaaaaaattaacctggatcgttgtgcttgctctaaaggttaaagtcacttaggggaaacagattcagtattatccaatgggcttaaccatccttccttctttctgtttgctttttggtggtggctgggttacaaagagcagtgtcttctgccctgaaggtagcagtattatggtgggtgcctagaggtcaattattggtttagaagagattcaggcccttaacttttacatgtgctttccaggaaaggagacactttctttctcagccctgtgtgaggactatgttagcccagaaagtgttcttggaccactgggtgcccattctcagtgctaggaacaggaagaccctggtttcctggtagaatttatggatcctacagctttctctccatcaaactttaagtcacagtaagataggactctggagtcacaggcacagccaggagaggtcagcgtccttatgctgactcctggtcctagacatgggtcttaagatccagtagtcagtaggtctgttgcaaagtcagggactggctagatctctccacagcagaagaaagctcatacatgctgacctgaggaacttaatctgacagtttaccgacacactcataacgcatctcttccttcctgtgatgagagtactgctttcatgtgtactgtctgatgacgggtgagggcagagttcttagtgaagcctctctcacagtgagaacacctgtaaggcttttcaccagtgtgggtttttcggtgggcactgaagtgggagctattattgaagattttcccacacactgcacacttgtatgggctctccccagtgtggatgcgccggtgagcactgaactgggaactagatgttgaatctctttccacagacaatgcactggtaaggcttttccccggtatgggtcgaattccncgcnntggcctagtggtctgctattcaag

SEQ ID NO: 65346 - DNA, 1203 bp, Homo sapiens
tttttttttttctgttttcctgttgtttttaattaaagtcgcagctctctagaggagcactgtccacctagggaggaaagtaggaggccagtagcaaacccctcccagagctggggacatgtattcccctggggaacccggtggcatccgccctgaggagcgcaccaccccgcccagatccaggtcccgtcagggtgccacctgctgcatgggcctgaggttcggggacacagcaaaggcacaccccgtgctctttttgattgtcgtccacccgtaggccctcccagagctccctcagcgtcagctctttcttcctgtgcacgtcaaacacgggcttctcggtgatgatgcggtccacgcaccgttttcccggtcagcggcatggtgcatttctccatgatctttgggggtgttgtcctttgtgcagtgctgcatggtgaccaccactctggtcttctgactggacaccaagtccatggcaccgcccatgcctttcaccttcttgccagggatcatccagttcgccaggtcgccgtatttggaaacctgcatggctccaagcatggttagttggatgtgtccccctcggatcatggcgaaggagtcgtcgctggcgaagaagcagcccccgggaagcaccgtgaccgtctgcttgcctgcattgatgaggtcggcatccacctcatcttccgtgggaaacgggcccaggcccaggatcccgttctcactgtgaagatggacagtcatgctgggactgatgaagttgctggccagcagggggatgcctatgcccagattggcgtacatgccgtcctcaaattccagagctgcgcgtctgatgatgcgcgtcctggcgtcctcttcctttccagcgtctccatcttcctctttccggatcgttaagcgctcaattcgtttctcgtatttctgcccctttatcacgcgacctacataaatgttaggaacgtggatgtcttctggggggaagcccccacctccaccgccgtgacgtctgcagctttgcacatgggcacgttgaaattgcgggcgcttctcctgaagaccacgtttcctgcccggtcggccttccaccctttcaccagggcgaagtctgcccggatggcgcgctccaaaaggaagtggtcgccgttgaactccctcacctctcggggctggctcatgagcgccaggtggccgtccggg

SEQ ID NO: 65347 - DNA, 1266 bp, Homo sapiens
ttttttttttttggggggctaggtataattttattttatataaaaagtgtttctgtgattcttcagagcccaggagtcagtgctggtggttggagggacctgcccccactggttcatttaaccctctgtctcggtgccctcagaacctcagccagaaaggcaaggaggaaatcagagcaggagcctcatactcttggtgatctattcattctgtgacctcaggggtcacatataaggtcagtgtttctcgtccccgccggatctgcactgccaactgggattgggttcgaacagcttcataaacatcttcagcattttgtaccatctgctccccaatggccaaaatcacatcaccaggccgcagaccagcccggtgtgcaggggagcccaggatgactttatggatgagtacaccatgctgaacatcgggaaagcttggttctcgaagctgtagttcagcaaggatgctgggactcagggtcagcatcatcaccccaatgtagcgccgctgggacccactgattccggaggaggaattcttcttttccccacgatgcagaaactctcgaagacgatcagaagggatggcaaaggagattccagctgtgaccttcatggtgttcactccaatcacctccccatccaggttaaccaggggacctccagagtttccaaaatcaatagctgcatcagtttgaatgtattccacattggtttgggggagtcccaggtctctggctggacgctgagcagagctaacaatgccggatgtgatcgtgttctgcagtgcaaagggacttcccatggcaacaacaaactccccttgccggacatcagctgagcgtcccagaggcagcgtggggagaggctccttagtctgaatcctcagcgttgcgatgtctgccacgggatccacagctgtgaccacggcctcatacgtgtcgccgcttagcagtctcacacggactctgcgccgatcagccaccacatgggcgttggtgacaatgagcccatcggcagccaccacgaatcctgagccgttcgagatagggacctcgcggcccaagaaagggtgccggtccaggatctcgatatagaccacggcaggtgctgtcttctccaccacatctgcgatgaagttgtactgactgaagtccttcagaagtgcacgccgggaccaggattccgggaggccgactcctccctgccccacgaatgccgggaattgtggtctccgccggacgcgagttgtgagacggcccaagg

SEQ ID NO: 65348 - DNA, 3899 bp, Homo sapiens
gactgcctcaacaaagaaggctttgacaaaatagatatcagtgcagttgtggcatataccatcgctgtaaaggaggatggggagctcaacctaatgaagaaagcagccagcatcacttctgaagtcttcaacaaattcttcaaggaaagagtcatggaaatagttgatgcagatgagaaagttcgacacagcaaactggctgagtctgtggaaaaggccattgaagagaaaaaataccttgctggggcagacccttctactgtggaaatgtgttaccctcctatcattcagagtggtggcaactataatctcaagttcagtgtggtgagtgacaagaatcatatgcactttggggctatcacttgtgccatgggtattcgcttcaagtcttactgctccaaccttgttcgcactttgatggttgatccttctcaagaagttcaagaaaattataactttttgctccagcttcaagaggagctgctgaaggaattaagacatggtgtgaagatatgtgacgtgtataacgctgtcatggacgtggttaaaaagcagaagccagaactgctgaacaaaattaccaaaaacctagggtttgggatgggaattgaattcccgtgaaggctccctagtaatcaatagcaaaaatcaatacaaacttgaagaaaggaatggttttcagcatcaatttaggattctccagacctgactaacaaggaggggaaaaagccagaagagaaaacctatgccctgtttcattggtgacacagtgcctgtggatgaggatggcccagctactgttctcacttctgtgagaaagaaagtgaagaatgtggggatgttcctaaagaatgaagatgaggaagaagaggaggaggagaaagatgaggcagaggaccttttgggaagaggttctcgggcagcattacttacagaaagaacaagaaatgaaatgactgcagaagagaagcgaagagcacatcagaaagaactagcggctcaactcaatgaagaagcaaagaggcgattgactgaacaaaagggagaacagcagattcagaaagctcgcaagtctaatgtgtcctataaaaacccatctctgatgcctaaggaaccgcatattcgggaaatgaagatctacatcgataagaaatatgagactgtaataatgcccgtgtttggcattgcaacaccgtttcacattgccacaatcaagaatataagtatgtccgtggaaggagattatacttacttgcgaatcaacttttattgcccaggcagtgctctgggcaggaatgaaggcaacatctttcctaaccctgaagcgacttttgtcaaggaaattacataccgagcatcaaatattaaggcacccggagaacagacagtaccagccttgaaccttcagaatgctttccgaattattaaagaagtacagaaacgttataaaactcgagaagctgaagagaaagagaaggagggcattgtaaaacaagactcactggtgatcaatctaaaccggagtaatccgaaactgaaagatctatacattcgcccaaatattgcccaaaagaggatgcaaggctcactggaggcccatgtcaatggcttccgcttcacatctgttcgaggagacaaagtggatattttgtacaataatattaagcatgctttgttccagccctgtgatggagaaatgattattgtcttgcactttcacctcaagaatgccatcatgtttgggaagaagcggcacacggatgtgcagttctacacagaagtgggagagataaccacggacttggggaaacatcagcatatgcatgaccgagatgacctctatgctgagcagatggaacgagaaatgaggcacaaactgaaaacagcctttaaaaatttcattgagaaagtagaggctctaactaaggaggaactggaatttgaagtgccttttagggacttgggatttaacggagctccctataggagtacctgcctccttcagcccactagtagtgcgctggtaaatgctacggaatggccaccttttgtggtgacattggatgaggtagagctgatccactttgagcgggtccagtttcacctgaagaactttgatatggtaatcgtctacaaggactacagcaagaaagtgaccatgatcaacgccattcctgtagcctctcttgaccccatcaaggaatggttgaattcctgcgacctgaaatacacagaaggagtacagtccctcaactggactaaaatcatgaagaccattgttgatgaccctgagggcttcttcgaacaaggtggctggtctttcctggagcctgagggtgaggggagtgatgctgaagaaggggattcagagtctgaaattgaagatgagacttttaatccttcagaagatgactatgaagaggaagaggaggacagtgatgaagattattcatcagaagcagaagagtcagactattctaaggagtcattgggtagtgaagaagagagtggaaaggattgggatgaactggaggaagaagcccgaaaagcggaccgagaaagtcgttacgaggaagaagaagaacaaagtcgaagtatgagccggaagaggaaggcatctgtgcacagttcgggccgtggctctaaccgtggttccagacacagctctgcaccccccaagaaaaagaggaagtaacttctgaactttggccctgagctccattcttcctccagccaacccctgaaaattttacatgacatagaaactgtatttttcctttcgttttcatttgaagttttgccatttgtgtttatgggtttagggggccatttgtgtggaccaatctactcggggaattccaggcccaccaggacacgtgccaatggccccattcagatggcaagggaggaggtgttcttgaagacaggaggaggctcccgctgttaataaatattggttcattcttctctcttcctgtcaccttctgccaagacattgatggcttctgacatcttatttggtgtctcaaagctgtatttccaagacagtggtacaaggtgacccttaattacccgtatcatggttcttgaccagcacattcaatcctccaacctaccctactgccatgaccttccgcacatctctaagttttatctttgcaatactcaaggttctcggaaatttgctaatggttgtgataaaccatacagcttgagccagtgaggcagattgggctggtgccttcgtctgagttttcctgctttcctgcctcgtgcagattctgaggtatatctgctgccttggaagacataagaagcagtgatactccctggctcggttattttctccatacaatgcacacatggtacaatgatagaaggcaaaattgccactgtcttcttttttttctcatatatctaaggaagatatatcaggttgtgcctcatgtaccgcttctagtgaaatgtagaggaaggctcaaaggagtcaacatttagatctggaagggacaagtcatgccttgggcctagaataccctgatgagaaaagagaagaggaagggaggccatatctacaacacagcctctcggcactgctgctccttattttaactttgtcttgcattgtcctgtatttatcacagtttctgttgaacagcttttcaagtatttggggagtttatcttgccatcctccccttctggttctctgcacccacctgtcccactgcagttccttccgtgctctgtgactttaagagaagaaggggggaggggtcccggattttatgtttgtttgttttttctccttagcagtaggacttgatattttcaattttggaagaactaaaagatgaataaactgggttttttttgttgtgggtttttgtaaaaaaaaaa

SEQ ID NO: 65349 - DNA, 1145 bp, Homo sapiens
  misc_feature (1)...(1145): n = a,t,c or g
gggcgccggggccgcggccgggccggctccagggccggccgccgcggtggggcgcaggccgcttgtgcgagtgaatcgaggcggcgggcccatccggaaccggccggccatcgcccgcggcgcggccggcggaggcggcaggaaccgaccggcgccctacagcaggccaaaacaacttcccgacaagtggcagcacgatcttttcgacagtggcttcggcggtggtgccggcgtggagacaggtgggaaactgctggtgtccaatctggattttggagtctcagacgccgatattcaggaactctttgctgaatttggaacgctgaagaaggcggctgtgcactatgatcgctctggtcgcagcttaggaacagcagacgtgcactttgagcggaaggcagatgccctgaaggccatgaagcagtacaacggcgtccctctggatggccgccccatgaacattcagcttgtcacgtcacagattgacgcacagcggaggcctgcacagagcgtaaacagaggtggcatgactagaaaccgtggcgctggaggttttggtggtggtggaggcacccggagaggcacccgcggaggcgcccgtggaagaggcagaggtgccggcaggaattcaaagcagcagctttcggcagaggagctggatgcccagctggacgcctataatgcgagaatggacaccagttaaacagaccagcaaatccgcgtgcggaacaggacccaggcgtctcctcttgctccctggttggggggcggtggctggggctgtgcggccaatgatggatttgtttcttttatgtttaaaataggatttaaaaactcatgtaaagggttatttttttcctttttttttttttaaaacccaaaacagacctttttttccccgagttatttttgggaaaaaatttactggttgctgttgggaaaaaggggcctttcccccttttcctataaaaaaaaaaaaatgtgtgtagaaaaaaaaaaaccaaaaaaacanggggggggcccccttttaaaaaacccctcgggggcccccatttaccccggggttggcaaaggttatttttcttttttttaggggggaatataaccccctctgggtccttttggaaaaccccttttttttggcg

SEQ ID NO: 65350 - DNA, 455 bp, Homo sapiens
  misc_feature (1)...(455): n = a,t,c or g
gtagaggtaggagctgggagacaggtagagccatggagaggtgggatctgggtgaggcacggggccttggagaggtgggacctgggtgaggggtggaacctcggagaggtgggacctgggtgaggggtggagccttggagaggtgggacctgggtgaggggtggagccttggagagctgggacctgggtgaggggtggagcctcggagaggtgggacttgggtgaggggtggagcctcggagaggtgggacctgggtgaggggtggagcctcggagaggtgggacctgggtgaggtgtggaacctcggagaggtgggacctgggtgaggggtggaacctcggagaggtgggacctgggtgaggggtggagcctcggagagactgtccctggacaggggtgggaccttgagagacctggtgctgagatgaggtangacccanatgtcctcttgccg

SEQ ID NO: 65351 - DNA, 1619 bp, Homo sapiens
ttttttttttttagaatgaaaaattttatcatcactcctgttcaccccgcagagtctgcggagtgctaaagggcacaccaataaggatccgagggagggggtctacatctgctttttcagcccccaaagccatatattggggtggcccaatataaagctactcattagtttggttcctgagcagacctgctaataaacctcaaaaacacaaaagtctacttcactagccagaaatgaaagcaggatctagatctgagtgggaagggcagagggcagcatgggttgactctagttggaattgtgccagtcttctctggaggccgactcactcgtggagtggggaaaggggtggccaggccccagtctagaaaccccaggcctatgggaagtgatgccaggggaagggaagcagataagctggtggctagttcccaggaaggcaccaacctccaaaatcacctaggcaaggacagatgcccaggggtgccatctgtgaaaggggggaaaaggcaagagagcccagaaagaaacttggatgctatagggggttccagaaaggtgctccttgctacccccatttgggggctctgacatgggaaagactccgagtcacccagggaggagctgggcatgctgggcaggaaccaccctgctagcctctcccaaaagcaggggtctcaggccaaatgcccctcctgttcccttccactgtcaaccctctccagggaggcccaggctagccaacaggccactgggtaaaggccctgctgccctctggggtggtccagccctgcctcagatatcccggcggggctgggcagaagagagtgttgctggagtgtgctgggcccaggttttcaagggctgggaatgatttttttagagaaagggaaaaggcggtgtcaggaaccgaatgggacgacctccacaaagcaggctgggcaaagtcccatgatggcaggtcgctaggaagaggttccaggggcggcaggccgctgctgctcccaacccacacctgacacttgtgaggccgctcagaagtgtgcacctgcttgatatgtccgttcaagtgatcaggcctggagaagcctttcccacagctctggcagatgtaaggcttgcccacggacccatcatgggaccgcacatggtaggacatgcggtcttttctcttgaaccgcaacccacacacagggcaggagtagggcttctccccagagtgggacagcttgtgccggttaagatgatacacatcacggaagatcttgccgcagatctcacaagccacctgcttcctggtccggctcctctttcgggggccgtcggggtcttcagagatgggtagcccattctcacccagcctcggaggaggaaggtcgatgtagcccagctggaggctggtgaccccgtgctgggcctcgtgctgccggagccggttggcatcagtgaacaccttaccacatagaccgcatggaaggatgcctgcctccctcaggccccctggggacccaaacattgagtccagcaggttggccttccttgggcggccccggcctcgcttgccagtcagggcctcgtgccaagatgggcgtcaacgtggtcaagatgggttttcaata

SEQ ID NO: 65352 - DNA, 1771 bp, Homo sapiens
tcgcgtacgtacgttgggatgctctacagcggccgcgccatccccatcaagcaggggatcctgctaaagcggagcggcaagtccctgaacaaggagtggaggaagaagtatgtgaccgctctgtgacaacgggctgctcacctatcaccccagcctgcatgattacatgcagaacatccacggcaaggagattgacctgctgcggacaacggtgaaagtgccagggaagcgcctgccccgagccacacctgccacagccccgggcaccagcccccgtgccaacgggctgtccgtggagcggagtaacacacagctgggtgggggcaacagaggcagaggagtcgtttgaatttgtgggtgggtgtccctcactggggcagacgtgggcactttcgagggtttcaacgggcggagggagcgggagctgtgggttcagagtgtgcaggcccagatccttgccagcctgcaaggctgccgcagtgccaaggacaagactcgactggggaaccagaacgcacctctggctgtgcaggccgtccgcaccgtccgcggcaacagcttttgtatcgactgcgatgcacccaatccagactgggccagcctgaacctgggtgccctgatgtgcattgagtgctcaggcatccaccgacacctgggggctcacctgtcccgggtgcgctcccttgacctcgatgactggccgcctgagctgctggctgtcatgactgccatgggcaatgccctcgccaacagcgtctgggagggggccttgggtggctactccaagccagggcctgatgcctgcagagaggagaaggaacgctggatacgggccaagtatgaacagaagctcttcctggccccactgccaagctcagatgtgccactggggcagcagctgctccgggccgtggtggaagatgacctgcggctgttggtgatgctcctggcacatggctccaaagaggaggtgaatgagacctatggggacggggacgggcggacggctctacatctctccagtgccatggccaacgttgtcttcacgcagctgctcatctggtacggggtggacgtgaggagccgggacgcccggggcctgactccactggcatatgctcgccgggccggcagccaggagtgtgcagacatcttgatccagcatggctgccctggggagggctgtggcttagcgcctacccccaacagagagcctgccaatggcaccaacccctctgctgagctgcaccgtagtcctagcctcctataaggcccaggaagagggcagaggggccagaaggactccatggcccaaagaccctcctccctgcaggcactgtgggaacagacacagagatggagaagcagggacatgctgagaggacgaagccaaggaaattagggaggagagtcaaagggatcaaggagagttggggatttgagctgcagcagagagggatgagggatttagccctctgccctaaggtgccattgaaaagggacaggacccttcggaggtgcctgtgaggagaggggagcaggacctctccctcctccagatccctgcctcctagtgccagcccctcacacgccttcatcctgaaacaggaagaggacggcaccaagttgggggtgctggatgaaagagacgaggggtgatctgtgagtcccatgtaaactttgtacattggaatatttatgtttgtgtacatatttgatgtgtgtgtgtatgatgagccaataaaccagactgtgtgcgtgaaaaaaaaaa

SEQ ID NO: 65353 - DNA, 2239 bp, Homo sapiens
ttttttttttttctcctttcctcaacagttttattgccttttaagaaaatttttgtaaaatataaatacaaaggcagagaatttacttacaaagttaaaacacagatttcaaacataaacacacgattcagaaaaattttagttttatgtacatttccaagcaacctcaacatattatgttagttttcaatattttacagggtacagaaaaaaatagctcaaagtcttctttaaataagagcataaaatgtttaaacatataaacaatccggtttgatgcgtgaaaactaatttcacagcttttaaattaggatataaaagtttcatacaattagttgttgtgtgtggatatggtttgaatttatattacacactactggattacatccaatagcatttacctggcccgagcaggtactctgtaaacaaaacaaagttatatcaccaagtgccttccccgaattcgctccctcaaaccaaccacacagttctgaccactctacagtcatggcctgtcatcagagctttgtatgaaattaagtcaaagtgtggagctccttttactcatttttttttctccttaaaaaagaaaagaaacaaatgttccaagtaaaaacaaacgtatcccaaagcatgtgtgcattgaaaagtaaagaaacattataacaacttcataaaaactgacttaaaagtttaaaaggaaaaaaacatgtttctaagtccttctgactggagtaatttctcttatataaagaagagatattttcatatgtaatagtgtcctttctttacagaaatagttgtattatgacacatatgcacaaggattaacactataacacactgtacatggtgggtccagcttgctcaccagtagttgtctgaggccagatcactggggtggagccactctacagaggagcccagcagagtctgaatttcgttcgtgaattccaccagatctaacagctccttactttcagggttgaaggcttccaggtctttggagcaagagaacaagagacttgcagaaacctgccgataaaattctgcctctgcaatggtgacaatttccacgtttggaaaattgcagcgaaatatgcgggaggacattttcaatttcttaaggacatccgaaagcagtagccagtttcgtggcccctgagccacagatacttggatgttataacacggtaagaggggggtctctgaaaattcaaattcaaacacatcgctataggcatcgtcatcatcatcctggtcttctggtcctggggggttggctaaaacatcatagccactttcatcatctggttcacaaacagagctgccatagaagtcccaagtgccactggcgtcatcatcattgcgaccctggaggtcatttaaataatctgttaagaacttttccataagttcactgtgggtcattttcatgatggttctacctgagtacgtagccaaggtggggtcagcaccataagagagaagtagtcggacaatttccaagtgatcgttctcaacagcatcgtgcagaggcctggttccatcctgggcactacagttgacatcagcgccatattcaaggaggtgtcgcacaatgttgagccagcccctagcacaagcttcatgcagggcgcagtaacctgcgttgtcccgatgatttacatcacaaatcttgttctctaagcagtacaggaccacttcctcatagccaagcctggctgcccgctgcagaagggtctcgccagcgttcttattgacaataagtctccgtgcttccggcggcatagggcgagactgggtggtctcctgaggggaacttgagcatggcagctgtgtggactgggaggctggtagcagttgctgcaagcggtcgaagggctttggctcctgcttggctggtgacagatcatagtccgaactgggctccggccgctttctgaatctccggacagtcaccttgccatcggcattctccacgtagtattcccctgtcagtggcaatccccgcctggactcctgagggatcaagtgtttggttttgcacagtctcttcccggatggcttctcgctgttgtcggtgtatttctgcagcagggaggcagcctggcaatcctcttcttcgtctgcacacagcacatctgtcttctggttttctttaattttctgctgtttggcaggcggcctggaggctggtgcgcagcttggctgttatctatatcaggtctcatggtag

SEQ ID NO: 65354 - DNA, 2062 bp, Homo sapiens
tttttttttttttccaatttaaaatggtagaatttattttaatataatgatatatatgtgtccacatatactattttaaaaataagcatgtaaattataatcattataaaacataagttaggccctaatttaatattatcaaggtaaaatgagcacatataggaagtcagtctaactttgttcgcacttgtcttttaaagttagaatacattaaaagatttagcaccgttgtattttatcttatttcagttttcatgttatcatcaactataaataccccttaggaaatgtaccaccttataacttacattggaatagcccaatatttcttaggtaggttattaaacgtaccatttaaatcaccctaaaccaaataatcctaaaaaaatactgggtttaaattaaaaccctgaggaattaaaatttggttttacacaatagttttgggttaagtggcaatttccatggtacatacctacctttggtttaagggatgtacttggtaaggcatagtaaaaataaaatctacgtaagtaacaatctaatactatatttaatttgttgctacaaagttgttttgtttctctaaaaagtagtttttgcatatcattctggacctcttcacccatctgctggcttatttgctttatatacaacagttaaaatttgtgcactaagctgagctgccttcacaattgtggttcagacaaaatgcacccaaagaactacatgttaagagagttcatgtccatgctcaaccatggcttgcacaaattgcttgaagacacgatccatgtaagtggactgtcttggccagattccctccagaaaaccaatatggcctccataagaagtaaggaccaaagcaacattaggattttgcttagcagtttctattggaatagcatgactgggtgagaaaacatcatccacagaatttagacacaatactggaattcctactgacttcagtctaggactcggactggcatcagtataataatcatcaattgtttggtatccaaacatgactgaagtgaatcgcttatcaaactctctgatggatttagccttcatgacatgatccatatcaacttgttttacaaacatatgtcggtgcttattaactgaagactgaaggcaggttgtcaaatagtaattaaaaagtagccagttcagtggtttttccaatgactctgagcaagcgaaggtgttccaaccaacggaaaaagttgcagctgccatcaaaggcgttttggacccaattttgcccaagtaatttagaagcagcattcctcccattgaaacccctgctgccaggaaaggagcagaagggtacaggctgtgtacatggtgaataactgtctccaagtcttcagtgttagcacaacaataagtccttggcgtcaagagattctcccccgccactcctctgttgttaaaaaccacacatctgtatcctaattcttcactaagatggatcatatgaaggatatatgactccttgcttgttcccgtgaggccaggcaacaataagatagtaggtctggtgctggcatccatataacacgtactgttatcattatcaaaccagtccagtgaaatctgtcctccatctgcagttttaataagttcattcctgtactgcaccgggggcttcgaagtgatgaaaaggtctaagcagggtctgtcctcgaccctcccagcaccagaccgtcgggtagtacgtttctgtaaccacgggacagtggtcttgaaggaagcggctgaaactctcacccccggtcactaactggggtttcttggcaatgctgctcaggtagtagaaggcataagcgacgctgaagcccaggataagggataagcccacccccgagccgaagaaccccacccggacttggtgttccaggtagagggagagctcccgggacaacatccgcaggtccatggccaggcgctgcatggcccccgagcgcggcgcgcgggtcctgcggcgggaggagagccggctggcgagcgggcgagagcgggcgagagcggacgcggcgccgctgcctactcc

SEQ ID NO: 65355 - DNA, 1188 bp, Homo sapiens
ttttttttttttgttgagcagttgtttattctggccctcacagccttggctagtccacaaaggccctggggatgggcaacaggctacaggaacccacctgtcttcctggtcagggcccctggcccctagcagcaggccaatcctggtggggcacagggttctgtgccctttggctgcctacctctgaatatcctggccagcaagccatgccttccccgcccctggggccctgggagcccttcagctcctgtccccataatgggtcctgggcctaggatgaggggaaggtcccagtttcttgtagggtgttatctgggggtcctggtgtgggttgagctggagggctgtggggccccaagacccctgtgccattggggtgctccaccctctcaaacaggatgagcatctcacagtgcggggtctgcgggaacaggtccactgcccacagccttgaccggccggaagggaatgcccttcacccggttagatggggctctgcagaggtccacaaagttgcccatggctgcccgggggttgcatgagacgtacagcagccgcctgaggttcttagctctccggatggccaggatcaccttggaatgcaagccagcacggggtgggtccaggatggccacgaggtgctgggaggccagtctgctcaccagggtgggcaccaggtcctcggccctcccgcagtggaactccacattactcaactcattgtcctgggcgttcacccgggcgtcctccacagcctctgggcatagctcgaccccaatgaccctctttaccttccgggccagggccaggccaatggtgccggtgccacagcacacgtccagcaccatgctccccgcatccaattgggcccagtcctggatgactgtgtagagcacctcggctgcgggtgtgttcacctggaagaaggcgtgtggagagatccggaaggtcagccctagcaggtcctcgtggatgcaccggtccccagccacatgctccaggggcaggccctcctggctaggagtctttcgctgtccctcctccacgaagtagaggcaggtcactccactggccctgcctggccctgctgtgaagtgctgcgctagggaggtcttcagctctgccagctcctcagggctcagctgggggtggaagtaggcaatggccatggcctggtggcctcgtgcc

SEQ ID NO: 65356 - DNA, 5017 bp, Homo sapiens
ttttttttttttggagggcaaagactttttttttttaattggacttggctttgatgagtatctgacaaaccctgcagacactagtacaatttgatcgtaaacaaagtccttgccagcatagtccagcaaattctgataaaacacatacaaaagttaagagacagctcgatttcatcttcctcccaacacctgcaactgtttccagattttctgtgtagtcttctttgtgctttcagttcagtaaaaattagaaaggataacaaacttgtaaagtcagatacctaattgtacaaaattgactagaccatggagaagggggaagcatcattttacaaaatattgttaagatcaccagcattaatttaaattattttcctttctggacttccaagtccacttggcaattttacttaggaaaatatcatgcgtaaatagaaaaccagtattctaaacacattttctttatgtgacatattcttgtgcgtctatgtaatgagaatttttaaaaaattgttttcttcctgctgtcaaaacttaggcattaaaaataagggactgtaaacctagttgacttacccataaaaaggagtaagttcggagaatgagagaaggaccaatagaatctaagaagcaccctgtcactcccagccgggacctctcaggcatggttttgacaggaggtgcatttataggacattcactggttcctcagaatggacagataatatagaaatgctaggaaaaaacattcctgcaatagtctgcagaacaaatgtgccagttttgccttagatgtcctaagacatctcaacaatgttggattatatggcccgtttggctatatgacccatctttaaagctgaaataaaaattgttagaaaaatattctaggaagaatgaaacttaaaaaaaaaaagaaaagttaaaactatttgctccccttaattgtttcactgtatcagttttggttctgaatgggatgtgaggatcctatctaatgcagccattaaaccacgcagccaccacagctatgttgtacgtaagacttctcattacagtgacgattaacagcacaagttcattacttttttcatggctcattatgacaaaacgattacagagtaggcgaagaacagagtgctttctcctcaccagggccttcatcagtgagtcaactgctcttgacgccagcaagtcagtctgatgttcgcaggtgaaaccccacccttggctccatgaatgaatgagaccgaggtaaacccaatgcaagctctgcaaccccaggggccgaagccacgttgtccaaagccatagctgggaccttggagatcctggggccctctgctgaaaggcagcagtggagaaggggactggccgcgttttgctgaaaaaccgaggctcctgtatggggggcataacgggaaggaggcggctttcacttccaggcctgagcagagcgtggctggctgggagagctgcacgccagcccgaaccgtgtgcccgtgccctctcaccgtgcagacggtagctgcggaagccacggagaaggcgagcagccttggcggctctcctcaggagccgctcactttgaatctgcaccttctccagctctcaggcccaggtcagacacttcctcaaacagatcaatgatccagcaatcgctgctcaaaagaaggccttatttctgtttctccaacgaaagcctgagtgccttccgcccgtgtttgtaatgaacttacaggagaacggtctgaactgtaagtgcacgcttccgcatttgagaggaaaggtcgctgagccggagcgcaggctccagatgcgcaggcagcctctagggaagatggggagctgccatggagccggtcaggcaggcagtgactcggctggaacgtggacggagagagagagaaacgggagcgcaagggcttggaggaatgagtgtgctccacgcaaggacctcagcagaaggctcagcacggggcggggtcctgggtaagagccgggggctgcgctgggctcccgggaagacactttgggcttgccgtagaggtaggaaaacagggagggaaaccgggtagggggaggagaagaaaaagcccccagaacgcagagcctcttctttccccacccctacctgtccacacccccagctgagcacatgtagaaaaactatggtattgctgattctgtgacaagaatcttccccatcggtaacctgccaaacacccacagaacatggcaatgaagccctacatgcttttaaaagaaaacagactgttaagactaacagaaaccaacttagtacggcgaatacggtaatgagtaccaaattccgcagaactgagagctcaacacaagtgcagttccacctttcattgtgccagcagcactgattgatttaaagttcagatcaacgtgctctcctcagcttcagagagggtctcatttcctacaccaatgggaatcactgaggttacccaaaaatgtaaaatcctggagagctcaaacgcaaacatggtttgtagcaaaagattcaaccaagacgcccgcagccactacagaggggccaggacgcagcagcctgcgggcactctcagaacctcgtgcacacaacttatgggaacttacaaaatcataaaaaaaggccccacattcttaaaggtataatttatagcgcattctgtacaaaagcagtcttttacaagggactctgctgctcctcagaagaaatccatagccctgggccttctccttggtgtggtggtcaggggcttcttggccaccaggggtgagctggcaggtgagctggtgggggtcttcagcaccccgtggaagggctgtctgttcagggtcgaaggccactcgagaagggcccgtgggactgaccaagatactcttgtctgtcttcttgaattcggcagtcatgtttctgttcagcccaaaggtgactttcttggagctggatggtgtcttgtttagctggacggcagggcctggagggtgggtggcagtagctgctcttgggtcttctgaagaacaagggctttggtaagaaaggggtgttaaacttcacaaagtcgctctctgccctcaggttctgcttcttcagggaactgcaagtcccactgcttcccagagcctggggttgcccagcttcggactccagcaccccgttgtgctccaccaagtttgacatcactctcattttcttcctctttttcaaacttgctgttttctggctgggcaggccacagagctccaggctgccgggccctgccttctttttctgcagcctcctgcgctggggcagcgtggtgtggctgttcgccccctctgcggggcctgtgggagggccttcctgctgcaatggaggccaggccggcgtggacaggccactgccattgacgggcacaactccaagtttccgcttcctttttaggagttgggctccacctgtcggggaccctctaggtccctgaggatgactgccactcgggccactctgagacatgtcctctgggggcaacactgctgattccaacatttccctgtgggccctcgggctcttcttccgtggccgtttccttttattgtgcatggggacggctggaggatgctcggagccactctcctccccagtgctggacgtggcctctgcacctggctcggccacacgtgccttcagggctttcagcccagaggcctcgggctccctgccccggttctgttccagggacggggctgcaccccctgggcctggattttcaggctgcaggtggtgcttcttcttcttcttccttcttctcttttgaagactgctttcactgtcctcttcctctacacaaaagactctgcttcctttctccttttccaagttagttttctctaaaagtttatttcctttcttcttatgctttccttgactgaggatttggtcatcttcatcagcagaaatgtcctccgcaaaactgagttgagatatactgcttccttcagaaaggtcttggaatttcttgatgagtttggagaggcgcttcctgttgaagtggggcgtgttcttcctgctggtcatttccagggagtcgatcagcaacagcccttatagtcaaactgggagaagggggccctgtgtccctcaaaggttccacagtcatctcttcctctttcatcactgagtccatcttttctggaatggtttttgcccagtgctgtcttctttttactgacagctcttctcaaggatacctcattttcaggtatctcctcagcagagaggtcaccatcacccacttttgtcttctgttcctccatcgtctcttcaggcacaaaaggagactgaatctacgatagcttcgaagacaccccgagctatggtctgtaccagggtgtggtccttcgtctttgcagcaattttgcagaatggatcgataaacttgagattctgatctgctaaaagctccttccccccgactttggagagttcatccaggtaaatatcaatgaagtggaatctcactccattaggagactgactctcaggacacaggacctccttcatcaggacatccaagaaaaccttgattcggctttcttcccagccatttcgcttcaagacttcaaaggactgcctcaggaccagacgaatcagcatatagtatttgtccaggcgtagcctgtctattcctttccattctcgattcatggtttgccaaaaggtctgaatgaacaggtgttgagccgctgagttgttaacagcatggactagctgtgcaatggtgttggcgagctcttcctgtagaagttcttcctgactgaaacctcctgtctccctctgcgtcttcacgctgatgtactggcgcagcttcttcaccgctcggtcccggatgcccttctcgctggacgccagccgctgggcaaattggatctcggccggctgcatggcgggggccatcgcgcccgctggagcatccccggccgcgcaacccgcggtgccgctgcagccagccgagcgctgcgg

SEQ ID NO: 65357 - DNA, 4872 bp, Homo sapiens
ctccatttgacagcattcctgattcggagctgcttgtgtcaccccgggagggctcctctctgcacaagctgcttactctctctcggacacccccagaacgtgacctcatcaccccagttgacccactggggcccagtacaggcagcagtagagggagtggggttgaaatgtctcttccagatccctcttgggacttctccccaccctctttcttagagacctcttcccccaagcttcctagctggagacccccaagatcaagaccacgctggggccaatccccacctccccagcagcgcagtgatggagaagaagaggaggaggtggccagcttcagtggccagattcttgccggggagcttgacaactgtgtgagcagtatcccggacttccccatgcatttggcctgccctgaggaggaagataaagcaacagcagcagagatggcagtgccagcagctggtgatgagagcatctcctccctgagtgagctggtgcgggccatgcacccatactgcctgcccaacctcacccacctggcatcacttgaggatgagcttcaggagcagccagatgatttgacactgcctgagggctgcgtagtgctggagattgtggggcaggcagccacagctggcgatgacctggagatcccagttgtggtgcgacaggtctctcctggaccccggcctgtgctcctggatgactcgctagagactagttctgccttgcagctgcttatgcctacactggagtcagagacagaggctgctgtgcccaaggtaaccctctgctctgagaaagaggggttgtcattgaactcagaggagaagctggactcagcctgcttattgaagcccagggaggtcgtggagccggtggtgcccaaggagcctcagaacccacctgccaatgcagcaccaggttcccagagagctcgaaagggcaggaagaagaagagcaaggagcagccagcagcctgtgtggaaggctatgccaggaggctgaggtcatcttctcgcgggcagtctactgtaggtacagaagtgacctctcaggtagacaacttgcagaaacagcctcaggaagaacttcaaaaagagtctgggcctctccagggtaaggggaagccccgggcttgggctcgggcctgggcagctgccttggagaattctagccctaagaacttggagagaagtgctggacaaagtagtcctgctaaagaaggccctctagacctctacccaaagctggctgacactatccaaaccaatcctataccaacccatctctcattggtcgactctgcccaagccagccccatgccagttgactctgttgaagctgatcccactgcagttggccctgttctagctggccctgtacctgttgaccctgggttggttgaccttgcttcaaccagctcagaactggttgagcctctcccggctgagccagtgctgatcaacccagtcctggctgactcagcagcagttgaccctgcagtggttcccatctcagataacttgccaccagttgatgctgtcccgtctggcccagcgccagttgatctagcactggttgaccctgttcctaatgacctgactccagttgacccagtgctagttaagtccagaccaactgatcccagacgtggtgcagtgtcatcagccctggggggttcagcaccccagctcctcgtggagtcagagtccttggacccaccaaagaccatcatccctgaagtcaaagaggttgtggattctctgaaaattgaaagtggtaccagtgctacaacccatgaagccagacctcggcctctcagcttatctgagtaccggcgacgaaggcagcaacgccaagcagaaacagaagagagaagtccacagcccccaactgggaagtggcctagccttccagagactcccacagggctggcagacatcccttgtcttgtcatcccaccagccccagccaagaagacagctctgcagagaagccctgaaacaccccttgagatttgccttgtgcctgtaggtcccagccctgcttctcctagtcctgagccacctgtaagcaaacctgtggcctcatctcccactgagcaggtgccatcccaggagatgccactgttggcgagaccttcccctcctgtgcagtctgtgtcccctgctgtgcccacacctccctcgatgtctgctgccctgcctttccctgcaggtgggcttggcatgccccccagtctgcccccacctcccttgcagcctcctagtcttccattgtctatggggccagtactacctgatccgtttactcactatgcccccttgccatcctggccttgttatcctcatgtgtccccttctggctatccttgcctgccccccccaccaacggtgcccctagtgtctggtactcctggtgcctatgccgtgcctcccacttgcagtgtgccttgggcaccccctcctgccccagtctcaccttacagttccacatgtacctatgggcccttgggatggggcccagggcctcaacatgctccattctggtctactgttcccccacctcctttgcctccagcctccattgggagagctgttccccaacctaaaatggagtctaggggcactccagctggccctcctgaaaatgtacttcccttgtcgatggctcctcccctcagtcttgggctacctggccatggagctcctcagacagagcctaccaaggtggaggtcaagccagtgcctgcatctccccatccgaaacacaaggtgtctgccctggtgcaaagtccccagatgaaggctctagcatgtgtgtctgctgaaggtgtgactgttgaggagcctgcatcagagaggctaaagcctgagacccaagagaccaggcccagggagaagccccccttgcctgctaccaaggctgttcccacaccaaggcagagcactgtccccaagctgcctgctgtccacccagcccgtctaaggaagctgtccttcctgcctaccccacgtactcagggttctgaagatgtggtacaggctttcatcagtgagattggaattgaggcatcggacctgtccagtctgctggagcagtttgagaaatcagaagccaaaaaggagtgtcctcctccggctcctgctgacagcttggctgtaggaaactcaggcggcgttgacattccccaggagaagaggcccctagaccggttacaagccccagaactggccaacgtggcagggctcacccctccagctacccctccccaccagttatggaagcccctggctgctgtctcactgctggccaaagccaaatctcctaagtccaccgcccaggagggaaccctgaagcctgaaggagttacggaggccaaacatccagctgcagttcgcctccaagaaggggtccatggccctagtcgagtccatgtgggctctggggaccatgactattgtggtccggagcaggaccccccccaaaaaagatgcctgccctactcattccagaggtgggctcccgatggaatgtcaagcgccatcaggacatcaccatcaaacctgtcttgtccttgggcccagctgcccctccgcccccatgcatagctgcctcccgggagccgcttgatcacaggactagcagtgagcaggcagatccctcagcaccctgccttgccccatccagcttgctgtcccctgaggcctcaccctgccggaatgacatgaacactaggactccccctgaaccctcagccaagcagcggtcaatgcgctgttaccgaaaagcctgcaggtcagccagcccctcaagccagggctggcagggccgccgaggccgcaacagccgttctgtcagctctgggtccaaccggactagcgaagcatcttcctcatcctcatcatcgtcttcctcatcccgatctcggtccaggtccctctcccccccacacaagaggtggcgaaggtccagctgtagttcctctggacgttctcgaagatgctcttcctcttcttcgtcatcatcttcctcttcgtcttcctcatcctcatcatccagttctcgaagccgctcacgatccccatccccccgccggagaagtgacaggaggcggcggtacagctcttatcgttcacatgaccattaccaaaggcaaagagtgctacaaaaggagcgtgcaatagaagaaagaagggtggtcttcattggaaagatacctggccgcatgactcgatcagagctgaaacagaggttctccgtttttggagagattgaggagtgcaccatccacttccgtgtccaaggggacaactacggcttcgtcacttatcgctatgctgaggaggcatttgcagccattgagagtggccacaagctgcggcaggcagatgagcagccctttgatctctgctttgggggccgaaggcagttctgcaagaggagctattctgatcttgactccaaccgggaagactttgacccagcacctgtaaagagcaaatttgattctcttgactttgacacattgttgaaacaggcccagaagaacctcaggaggtaaccttgggcccttccctgctatcctttttctcctttggaggtgcccaacctcctccacccccttcccctactctaggggagagagctgctagtgagatgactgttttataaagaaatggaaaaaagtgaaataaaaaatatgttgaatcagatttttttaaaaggggtatttggtttttttataaacaggtattgaaacaagttaacttgcattcctatgtaagataggaggggctgaggggatccccagtgtttggaacataagtcactatgcagactaataaacatcaactagagagaactcca

SEQ ID NO: 65358 - DNA, 1740 bp, Homo sapiens
tttcgtgttttgaagaaggcctccagaacatctctggggcatggaggcaatccaatccagatcctgcacctgcccacccagctggtcaccaattttacagggggtcctgatgacaacttaattgaaggtggaggaacaaaatttgtctgcaaacctggagccagaaacattaccgtcatattccacccattactaagatttattcaggagattgagcatgctctgggtcttggcccagccaaacagtgtcctcttcgagagtttctcaccgtgtacatcaaaaacatctttctcaatcaagtcttggctgagatcaacaaggagattgaaggagtcactaaaacatctgaccctttgaagattctggccaacgcagacaccatgaaggtgctgggagtgcagcggcctctcctacagagcacaatcattgtggagaagacagttcaagacctcctgaacctgatgcatgacttgagtgcatattcagatcaattcctcaacatggtgtgcgtaaagctccaggagtacaaggacacctgcactgcagcttacaggggtattgtccagtcagaagaaaaacttgtcatcagtgcatcctgggcaaaagatgatgatatcagcagactcttgaaatctctaccaaactggatgaatatggctcaacccaaacagctgaggccaaaaagagaggaggaagaagatttcataagggcagcttttggcaaggagtctgaagttcttattgggaacctgggtgataaattaatccctccacaagacatccttcgtgacgtcagtgacctcaaagccttggccaacatgcatgaaagcctggaatggttggcaagtcgaacaaagtcagctttctccaatctttctacatcccagatgctttctcctgctcaagacagccacacgaacacggatctccccccagtgtcagagcagatcatgcagactctcagtgaacttgccaaatcgttccagggatatgggctgaccgctgcttgcttgtcttacatctgggaagtgagggttcactgtttccactatcttatccctcttggcaaaggaggggaactatggccattgtgggttaatgtgggaaagtatggattatgaccccctggtggtcaagctcaacaaagatatcagcgccattgaagaggccatgagcgccagccttcagcagcacaagttccagtatatcttcgaaggcctgggccacctgatctcctgcatcctcattaatggtgcccagtacttcaggcgcatcagtgagtctggcatcaagaaaatgtgtaggaacatttttgttcttcagcagaatttgaccaacatcaccatgtcgcgggaggcagacctggactttgcaaggcagtactacgagatgctttacaacacagctgacgagctcctgaacctggtggtggaccagggtgtgaagtacacggagctggagtacatccacgctctgaccctgctgcaccgcagccagactggggtgggggaactgaccacccagaacacgaggctgcagaggctcaaagagatcatctgcgagcaggctgccatcaagcaagccaccaaggacaagaagataactaccgtttagcagggcgtactgcggttggtgacgggggtcccctcagtcacactcacttttttccttggtatgttattgagtatattctgagcttagttttctctacagtgatactttagtggagagctcgtgcc

SEQ ID NO: 65359 - DNA, 4236 bp, Homo sapiens
ctttgctaaaggacagatcaccatgtgggatttggccagtggaaaacttctaagatcaataacagatgctcatcctccaggaacagcaatattgcatatcaagtttacagatgatccaactcttgcaatttgcaacgacagcggaggctctgtttttgaattgacatttaagagagtgatgggagtgagaacctgtgaatctagatgtctgttcagtggttccaagggtgaagtctgctgtattgagcctctgcattctaagcctgagttgaaagatcatcccatcacacagttttcattattggccatggcatccttgacaaaaatactggtcattggattgaaaccatccttgaaagtatggatgacttttccctatggccggatggatccttccagtgtgccactgctggcctggcactttgtagcagtacaaaattatgtgaatcccatgcttgccttctgcagaggagatgttgttcattttctattggtaaagagagatgaatctggagcaatacatgttactaagcaaaagcatcttcacctatactatgacctcatcaactttacctggataaattcacgcacagttgtgctcttagacagcgtagagaagttgcatgtgattgatcggcaaacacaagaggaattggagacagtggagatctcagaagttcagctggtctacaatagcagccatttcaaatcactagccactggaggaaatgttagccaggcactggctttggttggagagaaggcttgttatcaatccatcagtagctatggtggtcagatcttttatttggggacaaaatctgtttatgtgatgatgctgaggagctggagagagagagtggatcatctcctgaaacaagattgtcttacagaagcgttggctcttgcgtggtctttccatgaaggaaaagcaaaagcagtagtgggattatcaggggatgccagtaagcgaaaggctattgttgcagaccggatggtagaaatcctattccattatgcagatcgagctctgaaaaagtgcccagaccaaggaaaaatccaagtgatggagcagcattttcaggatatggtgcctgtcatagttgattactgccttctgctgcagcgaaaggatcttttatttagtcagatgtatgataaattaagtggagaattcagtggccataggggtatttttgggagtgccttgagccatatattttaagtggataaattggtgggaatcacaccccaagtaatgaaagacttgattgttcatttccaagataaaaaattaatggaaaatgtggaagcgctcattgtacatatggatatcaccagcctagatattcagcaggtagttctcatgtgttgggaaaatcgtttatatgatgctatgatctatgtctacaacagaggcatgaatgaatttattagtccaatggagaaacttttcagagtcattgctcctcctctgaatgcaggaaaaacactaacagatgaacaagttgttatgggcaataagctccttgtatatattagctgttgtctagcaggtcgtgcctatccccttggtgacatccctgaagatctggttcccttggttaaaaaccaggtttttgaatttctaattcgcctgcattcagcagaggcttctcctgaggaaagaaatccaacccttacaattccgggacctttggctacattttgacacaagagaatttctcaatgtattggcactgacttttgaagattttaaaaatgacaagcaagctgtggaatatcaacagcgaattgtggatattttgttgaaagttatggtggagaattcagactttaccccctcacaagtaggatgtctctttaccttccttgctcggcagcttgcaaagcctgacaacaccttgtttgtaaacagaacactttttgatcaggtccttgaattcctttgtagtcctgacgatgactcccgacactctgaaagacagcaggtccttttagaattgctgcaggctggaggcatagttcaatttgaagagagtcgactcatccggatggcagaaaaagctgagttctatcaaatttgtgaatttatgtatgaaagagaacaccaatatgacaaaattattgattgctacttacgtgaccctctgcgagaggaagaagtctttaattacattcacaatatcttatccattcccggacacagtgcagaggagaagcagtctgtatggcagaaagcaatggatcatattgaggaactcgtgtccctgaagccttgtaaagctgcggagctggttgccacccacttttctggacatattgaaacggtcattaaaaaacttcagaaccaggttttgcttttcaaatttttgaggagtcttcttgacccaagggaaggtattcatgtaaatcaagaattactgcaaatatctccttgtatcacagagcagttcattgagctgttgtgtcagttcaacccaacccaagttatagagactctgcaagtccttgagtgctaccgtctggaagaaactattcagattactcagaagtatcaacttcatgaagtcaccgcttatctattggaaaagaaaggagatattcatggtgccttcctaataatgttagagagactacaaagcaaacttcaagaggtaacacatcaaggtgaaaataccaaagaggatccctcattgaaggatgttgaagatactatggtggagaccattgctctttgccagagaaattcacataatttgaaccagcagcaacgtgaggccctttggtttccgttattggaggcaatgatggcccctcagaagctgtccagttcagccattcctcatctacactctgaagctctgaagtctttgaccatgcaagttttaaatagcatggcagcatttattgcccttccatcaatcttgcaaagaatcttacaggatccagtttatggaaaaggaaaacttggagaaatccagggacttatcttgggaatgttagatacctttaactatgaacaaaccctgctggaaacaacaaccagccttctaaaccaagatctccattggtcattgtgtaacctgagagcttcggtcaccagaggactgaatcccaaacaagattactgctctatatgtttgcagcagtacaagagacgccaagaaatggctgatgaaataattgtctttagctgtggccatttgtatcactcattctgcctacaaaacaaagaatgcactgtggaatttgagggccaaacaagatggacatgctacaaatgcagttcaagtaacaaagtaggaaaactcagtgaaaattcatctgaaattaaaaagggaaggataaccccatcacaggtaaaaatgtctccatcgtatcatcagtccaaaggggatcccactgctaaaaagggaacctcagaacctgttctggatccacagcaaatccaagcatttgatcagctttgccgtctctaccgaggaagctccaggctggctctcctcacggaactctcccagaatcgcagcagcgagagctataggccattcagtggctcgcagagtgctcctgctttcaacagcatcttccagaatgagaacttccagctgcagctcattcctccacctgtgactgaggattgatgactccatggagcctggcccaggagaaccagagatgatcccgaggcagctggggagaggccccgcctctggtgggcttggcctccaccacctcccatgcttctgagaagaggttccaaattgggctcctgtgcccagagcgtccacagcaccattcccagtgtagactcccagtcttctccacattgctgtcatggcgtcagttcaccagactcattgattttgttttgcttgttaagcaaaggaatgtcacatacctctgtccagctttttaggaaatacatttcgcctattgcgactttttccatttaccctgaagcctagaaagtaggtggaactcacacaaatggcattccagagtctgccatactccgtctcctccagctgctggataatacagaggaacttcaacttctacagggaacagtggttggccaggctgcagtataactgaagcatgccttggagagagcagacactgtgggggccagggccatctccctttaatgtgttcatgttaaaacctatttgagtgtaagacttgccctttctaacaataaatgctccgtgtttaagttcaaaaaaaaaa

SEQ ID NO: 65360 - DNA, 939 bp, Homo sapiens
cggccgcaagtgtttttgttttttttgttttgtgattttttttgtttttttgtttttgcccttcatggtccgagaaggaaacggtggaaggtttcacatggttccaatgctgtaggtcgccgcgggcccgatggtgtgatggtacgggtcggcagctgcgtagactctgccgtaactgtcgctgtaggctgccgccgctgcagcgggctgagcgtatctgtaggctgcgtagcctccataaatctcagcaccataaaatccatcctgatacacgaccgctccgtaagtcgggatggggggtgggggtggcgcagcccgaaatgtattatacacggcccggccccggccccgaagatgtgcgccccggtaggcaacggctgtgccggtggtggggtaggggaaccccgtcactgcatagaattcaggcccgtagactgcgccgaccactggatttagcttccagccgttggtgtaggggttccccgtcttcttgttggtcatcactcgggccgtggcattattgacctcaattttccgtccctctacgatcgtcccattcagcttctcccgggctcggtcagcatctgagctagtttcaaaagttacaaacccaaaacccttggagccccgctcgttaaaaatgatctccacgtctaaaatttttccgaattgcccgaacatttgccgcaagtcggggtccctgaaccggaaggggatgttggagacgtgtagccgcttgggctgctgcttctctgtagggtcggaggggtggagcggctggctgtccgtctgtgccgcctcgtctgtctgcggcactgtctgggtcccggcgatgggctgtgtgctggcctcggagcctggctgctcggggtgggtctgtgctggtgtgtacagggtcatgccatgctctgtggggaccggggtctggccggagtagtc

SEQ ID NO: 65361 - DNA, 1522 bp, Homo sapiens
gaggacgacttggtgacagtctggtcctttgtagactgccgagtaatagccagaggccacgggcacagagtcctgggtcagtgttgtagcgtttgacccttataccactagtgtagaagaaggtgaccctatggagtttagtggcagcgatgaggacttccaagaccttcttcattttggcagagatcgagcaaatagtacacagtccaggctctccaaacggaactctacagacagccgccccgtaagtttcacgtatcggtttggttccgtgggccaggacacacagctctgtttatgggaccttacagaagatatccttttccctcaccaacccctctcaagagcaaggacacacacaaatgtcatgaatgccacgagtcctcctgctggaagcaatgggaacagtgttacaacacccgggaactctgtgccgcctcctctgccacggtccaacagccttccacattcagcagtctcaaatgctggcagcaaaagcagtgtcatggacggggccattgcttctggggtcagcaaatttgcaacactttcactacatgaccggaaggagaggcaccacgagaaagatcacaagcgaaatcatagcatgggacacatttctagcaagagcagtgacaaactgaatctagttaccaaaaccaaaacggaccctgctaaaactctgggaacgcccctgtgtcctcgaatggaagatgttcccttgttagagccgctgatatgtaaaaagatagcacatgagagactgactgtactaatatttcttgaagactgtatagtcactgcttgtcaggagggatttatttgcacatggggaaggcctggtaaagtggtaagttttaatccttaatgctgcaccagatctagaacttgaataggtagtgacttttttctttttcgtgggaggggtggggtgtacaatgaatgtgaatgacacttcttattcttaatgtaaatctcaatgcatcagagccataattttggatactgcatgccatgtaattctgaatcatttgataatttaccttagagcatttaaaaaaatataatcaaactaattgccagccaagtcagtcatcctcctgggagtatatagagtcccaaggttagcgctcctgtattagactatttcaattttaggaaaatcatgaccatgtggggaaacaatgactttaaaatgctgaaattaaaatttatgctttaactggaatattttttgcttaactactcaattagaatattgtacacctgatcaatgtgtgttcagcacagatggccatgaattgtcatttatagtccaattttttatcttaatcataaaatgtttaggaatctatgaaatttaactttaggaacaaaacgtttagcaggggtgattgatattatttttacattgttctggcaatccacagaaagagaagagccttaatttttaaaacacattttagtcattttatgacaattaaagttgtttaataaacatcttttttcaaagaaaaaaaaa

SEQ ID NO: 65362 - DNA, 3999 bp, Homo sapiens
tttttttgagctgtagcacttttattgttccttgtctctctacccctgcccagggtaagggcaaacgccttccaagctgtccaagggcacccgcctggcctggttaggttctcctagttgcctgcagaggaatgactccacatggggctggggagagaagggggtaccaccttcctctcccctggcagagcctggacaccagtacacaaagagctgggcccccaggttctgccctaccctttctgggccttggttagggctgtcttggcggcaagaaggtgggggtcagctaggggtggggcacagcgtggcacctgaagggaatgctgggatttgggatagaaggtgggatgtctcttatggggaagaggaaagaaagaggcttctgccgaggctgacatggaacttgctgagatgggcagaggcaagctgggcagagggcaggaaggaggagggacaggctggaggaaggcagtgttggtgaagtggggaggaaaggaactggtagaaacagggctgttcaagagagacaaacatggtccagtggcaggagagaggagaagcctggcaagaaggggcgtagaaaggtgggaacagctgaccaggagcagctgatctgagccaagcagttccagggctttccagccctgggtgtgctctacccctcccctcccccatccccacctcctacgtatcccaggacccgttgccaccccaagtcctggaaagcctcccataggtgtggcttaacccatcagctcccaggcgccctcaccctcctgccgctgcccagttggctttactcaccctctaccagcagccgtgtgtgggtgctgtcctggccggcctgagcagcagtaagtgccttggtccttaaggtcaaacgtcatggatgaccaggctgtgggtggggccgtggctgcgcatttaatacttatttcccgggcacagttcggccccctcccgcagccagcacacgtggcccccccgagcgggacacagtcaccttccagcaccgcccggcggcccaccagaacggtcttctcgcgaggggggtggcggcacatctggagaggcaatgcctccacttccagtagagccagggactgggcgggccccgcctggaagcggacttcaccggcgtcctcggcgcgcagctcgctaagcaccagaatgtgtttcttcccttcctgttggatgcggacgcgggctccgggtctcagcgggcggcctccgagctcccagcgccccgtggtctcgacctccgacacgggtgcactcgaacgtagcgccgtcgccttcgcgggcgctcaccgaccgcagctcggagagtaccgccacagtacgctctggggcggagcccggggcgtgagcggggcggggcagagggcagttaccggtcacgccccctccacgccccctttctagaagcacgcgcggtcatcagggtccggggaagacagctccgcaagtctcgcgcccaaagcagtgcccagcctccacatcaccccgtacccaccgcgcacggtcaggcggaccggtccggcgcgggccgtccccaccgcgcagctgtaggtcccggcgtccgaggggccgcagcgtcgcagctggagaaggcggcgcgtgccgagggcctggagccggagccgcgggctaggcgtaagcgcgttcccgtcgcctcacgctgagcctggccagggtgcgatcgtggtggctctcgcagccgtaggtgccctggtcggccagtatgacaccatggatgaagaggcggtggatgtgcccatcctgggccatggacaggcgagagtcgtggggcaggggctgcccacctcgcacccagcgcacggcccccgctgcacccactcggcctgtctccacttcgagacacacgtcctggccttcctctgcccgcacatcctgcaaccgccgtaggaacagcagctctgtctctggggccctggagtgacgacggccccattgcgcagccaggtgacatcggcatctggtggggagacttcacaccggaacgtggcatcatcgccctcgtggacagtgagtggtgtcaggtccgagaccagcttcaccagcagtggctcttccacgctgacaaggaagatgcggctgtcctggggcgcatcgcacaggtactccccagcgtccccgctccgtgccccctgcacccgcagcacctgcctggccccggcctgctccagctgcacccgcccctggcttgccagtcgctccccgtccttgtaccagcgtacagggccccctggcccggagaggtgcaccaccagctctaggtccccgcctggggtgctccgaaccctcgtctgggctgcctcgggagctaccacccgcacagggggctcagccacctggacggtgaagctgaggcttggggctccgggggctgctccagactggcaggtgtagagccctgcatgggctgggcctgcagcctggatgcagaggactcggcgggggccctcggcatggagctctaggccctcgccctcctgcacgggcctcccattgtggctccagaccacgggggcgccagcccgggacagttcacagctcagcaccactggctccccaggggccacacagagcgggcttggagttgtctctagagcaaggaactgcactggaggctctgtgacagtgacagtgaagaaggccgagtcatctccagcatcacatacaaactcgcccccgtcctcgggctgagcagcaggtagcaccaggcggcagcgtggcccatccctctccagcaccagggcctcgctctcctccacttccagcccatccttgtaccagcgcacaggggcatcctcccgagacagttcacacatcagcaccacacactccaaggtcacggcgatcaaggtcacctcatcgcgagggtatatgatccgcactgggggttctgtgacggtgacagtgaaggaggccgactcatcgtcaatttcacacaagtactcgccggagtcctcgagctggacagcgggcagcaccaggcggcggacagtgtcttccttctgcaggagcagcgcggggctctccaccacctcctctccatccttggtccagcgcacctctgcccagggccggcatagctcacaggtcagcaccacacgctccaggcgcacggctgccacatacaccttgccgctgggatacacgatccacgaggagacgtctgtgatggtgacagtgaagtaggcacactcatctccagcgacgcactgaaactcgcccccgtctgagggctgggtggcgggcagcaccaggcggcgatggggcccctcattctccagcaccacgaagtcactctcctccacctcctgcccgtccttgtaccaacgcacaggggcgtcctcttcggttccacctcacaggccagcatgacacactcggaagttatggcatgcacgaacacatgttctcgggggtccacgatgtgcacgggaggatcttggacagtgacgccgaagaaggccgagaccccttctgtcctgcactcaaactcgccactgtcctggactttggcctcaggcaggatcagacggtgtttgcgcccatccatcttcaccaccagcaactcgctctcctccaccttctgcccatccttgtaccaggttgccgggaagtccacccttgagagctcacaagtcagcaccacccgctctgaggttgtgaaggtcaacgacaccttgtcctgggggctcaggatgtgcaccgggctctcttggattgtgagggcagctgagtcctgcacgccggggcagctgaagccgaccagggcaccgctgtcctggtgcttgacggcatgcaggatgagtctgtgctgcagacccttctgctctatacggtaccgcagggccccaggttccacctggccctccggctcgttactcttgagctcttccccattaaggaaccaggtaccctggatgatggtggagagatcgagggagaagacggcatcttccc

SEQ ID NO: 65363 - DNA, 373 bp, Homo sapiens
gcctcataaaactctgcaaatctaaggccaaaagctgtgaaaatgaccttgaaatgggcatgctgaattccaaattcaagaagactcgctaccaggctggcatgaggaattctgaaaatctgacagcaaataacactttgagcaagcccaccagataccaggcgagctgaaggaaatcaagcaagatatctccagcctgcgctatgagcttcttgaggaaaaatctcaagctactggtgagctggcagacctgattcaacaactcagcgagaagtttggaaagaacttaaacaaagaccacctgagggtgaacaagggcaaagacatttagcagcccacatcggcgtctgtgacttctaccagcattccaagg

SEQ ID NO: 65364 - DNA, 6076 bp, Homo sapiens
cctccaggcccagaacggagccgccttggcctcggggtctccctacaccaacggtcctgtccaaaatgcattgctgtcttcacaagagtcagtgagccaaggatacaatttccagcttccaggatcctaccctcatccaataccagcaaagactttgaatccagtctctggacagtctaactatggtggttctcagggatctgggcagactcttaatagaccacctgtggcctctaatccagtgacaccttcgcttcatagtggtcctgctccccgaatgccattacctgcttctcagaacccagctactacaccaatgccttctagtagctttcttcctgaagccaacctgccaccacctttgaattggcaatataactatccatccacagcctcacaaacaaaccattgtcctcgtgcatcatcccaaccaactgtatctggaaatacaagtttaaccacaaatcatcaatatgtttcttctggatatccttcacttcaaaatagcttcataaagtcaggtccttctgtacctcccttagtgaatccacctctgcctacaacttttcaaccaggagctcctcatgggccccctccagctggaggcccacccccagtgagggccctcacgcccctgacatcatcatatagagatgtaccccagcccttatttaattcagctgtcaaccaagaaggtattacatcaaataccaataacggatctatggtggtccacagtagttacgacgagattgaaggaggtggcttattggcaacaccacagcttactaacaagaatcccaaaatgagccgaagtgttggatattcatatccctccttaccacctggttatcagaacacaacaccacctggtgcaactggagtaccaccctcttccttgaattacccaagtgggccacaagcctttactcagactcccttaggtgctaatcatttaaccacaagcatgagtggattaagtctacaaccagagggtctaagagttgtcaatcttcttcaagaaagaaacatgcttccgtcaacacctttgaagcctccagttccaaatttgcatgaagacatccagaaactcaactgtaacccagagttatttcgatgcacgctgactagcattcctccagacgcaggccttattgaataaagccaaacttcctttggggctgctgcttcatcctttcaaagacttagtgcaattgcctgtggttacctccagtacaattgtgagatgccgttcatgcaggacgtacatcaatcctttcgtcagctttcttgatcaaaggagatggaagtgtaacttatgttatcgagtcaatgatgttcctgaagaattcttgtacaaccctttgaccagagtttatggagaacctcacagaagaccagaagttcaaaatgctactattgagtttatggctccttcagaatacatgttacgaccacctcagcctccagtgtatctctttgtatttgatgtgtctcacaatgcagtcgaaactggatacttgaattcagtttgccagagtttgttagacaatctggatttgcttcctggcaacactagaacaaaaattggcttcataacatttgacagtacaatccatttctacggtcttcaggaaagtctctctcaacctcagatgctaatagtttcagatattgaagatgtttttatacctatgccagagaacttattagtaaacttaaatgaaagtaaagagctcgtgcaagatttactgaaaactttgccacaaatgtttaccaagactctggagacccagagtgccttgggtcctgcactgcaggctgcctttaagctgatgtctccaactggtggtcgaatgtctgtctttcaaacacaactcccaactcttggagtgggagccctgaaaccacgagaggaaccaaaccacaggtcatctgctaaggatatacacatgacaccatccactgacttctataagaaattagccttggactgttctggtcagcaagttgctgttgacttattccttctcagtggacagtattctgatttggcttctctgggttgtatttctcggtattcagcaggtagtgtctattactatccctcttaccatcatcagcacaacccagtccaagtacagaaattacagaaggaactacagagataccttactcggaagattggctttgaggcagtcatgaggattcggtgcaccaaaggtctttccattcatactttccatggaaacttctttgttaggtcaaccgacttactgtctttgcctaacgtcaacccagacgctgggtatgcagtacagatgtcagtggaagagagtcttactgacactcagttggtttcttttcagtcagcactcttgtatacatccagcaaaggcgaaagaagaattcgtgttcatactttgtgtttgccagtagtttcgactctgaatgatgtctttcttggagctgatgttcaagcaatttcagggttattggccaatatggctgttgacagatctatgactgccagtctgagtgacgctcgggatgctctagtgaatgcagtcattgactcccctttcagcttacccgttcttcagtcttaagtaaccagcagcctggactcatggttcctttttctttgcggcttttcccactttttgtgttggctctccttaaacagaaatcattccagactgggacaaatgcacgtctagatgaacgcatttttgctatgtgtcaagtgaaaaaccagccccttggtttaccttatgctcacaactcatcccagtttgtatagagttgacaatctctcagatgagggagcactcaacatcagtgatagaaccatacctcagccccccattcttcagctttcagtggagaagctgagcagagatggagctttcctcatggatgcaggctctgtactgatgctttgggttggaaaaaattgtacacagaattttctcagccaagttctaggagttcaaaactatgcatcaattccacagcctatgacagaccttccagaacttgatacaccagaatctgccagaataatagctttcatctcttggcttagagagcagagaccatttttcccaatactttatgtaataagggatgagagtccaatgaaagcaaacttcccttcaaaacatgatagaagacagaacagaatctgcattatcatattatgaattcctgttgcatatacagcaccaagtgaataaatgaatgaatgaagaaatttgacttatttttaaggaatgtcacgatagtgcagaatacctggaaatgtgtaataccttctttttctattatgtttgtgggactaatgtgatggattgaggtgttcctcactgtgatttcaacaacctataagcaaataaaagaccacagcagagaatcaaacatgcaactctgaaatactgtatttttcaaatcagaatatagctacgtatgattggatacttttttcttgccaattatgtttgagttgttatggattaaaataagaatattgcagaggcaaagtacattttggaaaataaagatttctgtgttctacatgtatatttctcatttttaatttttctgaatctttggctgctacatttaaaacctcacaaacctaagtgttgcagggaagttacaaattgattggtagtgatgtttttaaaataaaaacaatggaaagtaaatataatgtaggaaaactagaattcattccccacacgtgtcttttttttttctttgttaagggaaaggatcatgttgactaaaactaaactaattctagtatagcttgagaaaaatatgaagaaacacattcaagctttaaaatctgtcagtattctttatgcttgaagaacaaagtcactttgatttgaagtgagaactatcattagggggttttctgatttcctgatgaaaagttggacatactgtcttaatctatagtgaaaagaatttgagctgtcttcataaacactgggactagcaatgataatagggagataagaaactttaattatcttgatcctttaagtggattttatttggtgcatttctgctctgggtatataataaaagtgggggtttttggtgaaatgagtgaagaaatgaaaggtttctaaagtgctatccaaatacatcagtaacatttttctaaggagtttaattgttaaattggaagtcattcataagaaatatttatgcttgaatatgaaaatctatgaaagcataaatgctgctgtttgatttggtggatattaagattatacacatccaacatattaaagttatgaaagaaacttgacttctgaaaatccttaagagactgctttcttgattcagctagagaaatattatagtcaaaactattgagtgaattttgtttacaaataggtaaattatacatttgtatatttaaagggctgtgacatagtatctttaagagtttggctcagttttcacagattcattttgtcttaagaatttcttaaatatgttcatgtataatacttgatcaaaatatttttgggttttttgttttgttttaatgggttagaaaatgtttacaatcttggtcttatatgatcaccaatggaatagtaacttccaggtttatatcaatatgagctgactttaactgagttgtttgggatagggaagaagcagtccctctacagtatacaactactgcttgccagctggatcaaaataatcatgttttatgaaaatatctcccttaagcagtgttaaggttggcttgcagtgtgtaagtggcacattgaactggaagttttcttgaaagctgcttcatctattaagaagcaattttcaaattgtagcgaattatattatcccctcttttaaagaaacagtcgttatatgctgatgtttcttaaaataactaaaatgttcctcttaatgtgattttaaatggagttatttgtaggtcctttcttagtagtaaagaatcttctagagggaaacatttgtgcttttagggataatcttccttgtgcctcactacatccctaagtgggtatgactcttgttattaccacatgcttttttagtatatttcacaaatttacttttaaatattattttagatacggtgtaacatgtgcaattcagaataattttataacaggtcatgaaaaacataactttagttaggattcacaatatttgttctccacataatgagagaatgaatgagcctttggagatactgatataaggcaattattttttgcaatgttgaatgtgttttttagtttgattctttttttttcccccaatagggcactacctgccatatcatcttgtattactttttgatgtaaagcgactaatatttacactatgccatattttttttaattatagttgtaaattatgaaagatccttgaattttctacagatctacaactactaatgtaacagacaagggcaatcttggtatttaaatctgagcatggcagttctaccataaaaagtactctatttttctaatttctaggatttttaaaataacatttctgtaagtctgacatactaatagtcactcaagcagtaccatttattttagtttgcatatattttcactgtttttaatttaatgtattgagtctaataggactgttttgcaataattaggaataaaggatttatttcttctaatcaaagatgccataaccagcctattatcctagggggaccccccaaatgtgatttcaaaattttgttaactattacaaatgtaatccttatatagaaattttaattttgtaaagtagtgtataatattgtaatattaaattcttgttcttaaattcaaatatgtattgatcttcaatgtgctgtgttaaatcttgcttctctgaaaagttggagacaagatttgtcttcctttttacagtttgtaattttcactgttttattcctgttaaaaaaaaaaaaaagtcaattggtacccatggagacccatggttgaatctatgctaacttatcaacttggctattcaataaagttaattgaaaagaaaaaaaaaa

SEQ ID NO: 65365 - DNA, 1479 bp, Homo sapiens
ccttgcttcgcctgccgttttttttggaaagaggttttagtgcggccgcagggagcaccacctcagcctcaggcgctagtgaggacacaggccgtcctccggcggggagcacggtggggtcagggtgctgtgtggtcccgcaaagaggcagctgagcttgggcctcaggtcgttccacaccttgctcatctccttgtgcccttggatctgagagttgacgaaggcgcggaggatgtgggaggtgaggggcaggtagacgtggatgagctgcgtctcctggtgcaggcagtacagggagaagtagttccgcagctccatcgtctgaatcgcgttctcctgctccacgatgcgggactccagctgctccacggactccggctcgcgggttctgcgcgggtggcggctcatcatctgcctcttcatcaggctgtacttgtgcagggcccgctggtgcttgtgcaacacgcccttctcatgccgctcgcacaggtccttataggactgcagcagatccaagaagaggttcagcttctccaccacgtcgttctcttcctgcttaccctgttgtgcagccttgtcggcgagcagcgcgaattccacagacaggcctttcagagcctgcttcagggacccccacgtgctgctattcagagcggcccaggagggcagcggggtcgtgtcagaccctattgcacttagctccttcccgaatatgagaagatctgccgcattgtcgatggcccgcgacgcgatccgctcggccctgtcgcgaagcttgtgaaagctattgtagatgttccggatcagcttcccggcttgatggcaaactgagcctggatgtcagctgggaggaagtccttggccctggtagccagcttacagttcaggaattcgtccccgacgcactgtgctgactcctttaacttgttcctgcaacatcccgaacccgctgaaaggaacaaggaaaaagcttgaaggaaccacatccctcggaagaacagggggtgtcgcgcccacccaggttgacgaagcgcttcagggctctcctcctggcctcgatgaactccctgtcagctcccagcattctcttgggtggcagggcaggcaccatacggtaggggaacttgtgcaggagcatctcctggaagaccacgaagtcattgtaccgtctgtataccgaggacttgaagcgctggctggaaacctcatactccacatgcttcaggaagaggcccttcttctccggaatgagctccacctgcacggtgtccctggccagcagctcctgcagggtgtgggacagcagcagcgggttcccctgcggcatctgcattcgactgggggctgggacctgctgcacgatggcctggggctcgatggcctggggtgtcggcagatctgacgccgggggatccgcctcctcgtcagcctccgcctcagctgccgccccgactgcagccgcgggcagcgggtccatcg

SEQ ID NO: 65366 - DNA, 4696 bp, Homo sapiens
ccgagccctgaggcaggcggcggcggaggagccctcaaggcgagcagcgcgcgcgcggctgccgcgggactgctgcgggaggcgggcagcgggggccgcgagcgggcggactggcggcggcggcagctgcgcaaagtgcggagtgtggagctggaccagctgcctgagcagccgctcttccttgccgcctcaccgccggcctcctcgacttccccgtcgccggagcccgcggacgcagcggggagtgggaccggcttccagcctgtggcggtgccgccgccccacggagccgccagccggcgcggcgcccaccttaccgagtcggtggcggcgccggacagcggcgcctcgagtcccgcagcggccgagcccggggagaagcgggcgcccgccgccgagccgtctcctgcagcggcccccgccggtcgtgagatggagaataaagaaactctcaaagggttgcacaagatggatgatcgtccagaggaacgaatgatcagggagaaactgaaggcaacctgtatgccagcctggaagcacgaatggttggaaaggagaaataggcgagggcctgtggtggtaaaaccaatcccagttaaaggagatggatctgaaatgaatcacttagcagctgagtctccaggagaggtccaggcaagtgcggcttcaccagcttccaaaggccgacgcagtccttctcctggcaactccccatcaggtcgcacagtgaaatcagaatctccaggagtaaggagaaaaagagtttccccagtgccttttcagagtggcagaatcacaccaccccgaagagccccttcaccagatggcttctcaccatatagccctgaggaaacaaaccgccgtgttaacaaagtgatgcgggccagactgtacttactgcagcagatagggcctaactctttcctgattggaggagacagcccagacaataaataccgggtgtttattgggcctcagaactgcagctgtgcacatggaacattctgtattcatctgctatttgtgatgctccgggtgtttcaactagaaccttcagacccaatgttatggagaaaaactttaaagaattttgaggttgagagtttgttccagaaatatcacagtaggcgtagctcaaggatcaaagctccatctcgtaacaccatccagaagtttgtttcacgcatgtcaaattctcatacattgtcatcatctagtacttctacatctagttcagaaaacagcataaaggatgaagaggaacagatgtgtcctatttgcttgttgggcatgcttgatgaagaaagtcttacagtgtgtgaagacggctgcaggaacaagctgcaccaccactgcatgtcaatttgggcagaagagtgtagaagaaatagagaacctttaatatgtcccctttgtagatctaagtggagatctcatgatttctacagccacgagttgtcaagtcctgtggattccccttcttccctcagagctgcacagcagcaaaccgtacagcagcagcctttggctggatcacgaaggaatcaagagagcaattttaaccttactcattatggaactcagcaaatccctcctgcttacaaagatttagctgagccatggattcaggtgtttggaatggaactcgttggctgcttattttctagaaactggaatgtgagagagatggccctcaggcgtctttcccatgatgtcagtggggccctgctgttggcaaatggggagagcactggaaattctgggggcagcagtggaagcagcccgagtgggggagccaccagggggttttcccagaccagtatctcaggagatgtggtggaggcatgctgcagcgttctgtcaatggtctgtgctgaccctgtctacaaagtgtacgttgctgctttaaaaacattgagagccatgctggtatatactccttgccacagtttagcggaaagaatcaaacttcagagacttctccagccagttgtagacaccatcctagtcaaatgtgcagatgccaatagccgcacaagtcagctgtccatatcaacactgttggaactgtgcaaaggccaagcaggaaagttggcagttggcagagaaatactaaaagctggatccattggtattggtggtgttgattatgtcttaaattgtattcttggaaaccaaactgaatcaaacaattggcaagaacttcttggccgcctttgtcttatagatagactgttgttggaatttcctgctgaattttatcctcatattgtcagtactgatgtttcacaagctgagcctgttgaaatcaggtataagaagctgctgtccctcttaacctttgctttgcagtccattgataattcccactcaatggttggcaaactttccagaaggatctacttgagttctgcaagaatggttactacagtaccccatgtgttttcaaaactgttagaaatgctgagtgtttccagtgtttccactcacttcaccaggatgcgtcgccgtttgatggcttatgcagatgaggtggaaattgccgaagccatccagttgggcgtagaagacactttacaacgacaacaacacaacagcttttgcaggcatctgttcccaacaactatctggaaaccacagagaacagttccccttgagtgcacagtccatttagagaaaactggaaaaggattatgtgctacaaaattgagtgccagttcagaggacatttctgagagactggccaggatttcagtaggaccttctagttcaacaacaacaacaacaacaacaacagagcaaccaaagccaatggttcaaacaaaaggcagaccccacagtcagtgtttgaactcctctcctttatctcatcattcccaattaatgtttccagccttgtcaaccccttcttcttctaccccatctgtaccagctggcactgcaacagatgtctctaagcatagacttcagggattcattccctgcagaataccttctgcatctcctcaaacacagcgcaagttttctctacaattccacagaaactgtcctgaaaacaaagactcagataaactttccccagtctttactcagtcaagacccttgccctccagtaacatacacaggccaaagccatctcgacctaccccaggtaatacaagtaaacagggagatccctcaaaaaatagcatgacacttgatctgaacagtagttccaaatgtgatgacagctttggctgtagcagcaatagtagtaatgctgttatacccagtgacgagacagtgttcaccccagtagaggagaaatgcagattagatgtcaatacagagctcaactccagtattgaggaccttcttgaagcatctatgccttcaagtgatacaacagtaacttttaagtcagaagttgctgtcctgtctcctgaaaaggctgaaaatgatgatacctacaaagatgatgtgaatcataatcaaaagtgcaaagagaagatggaagctgaagaagaagaagctttagcaattgccatggcaatgtcagcgtctcaggtagccctccccatagttcctcagctgcaggttgaaaatggagaagatatcatcattattcaacaggatacaccagagactctaccaggacataccaaagcaaaacaaccgtatagagaagacactgaatggctgaaaggtcaacagataggccttggagcattttcttcttgttatcaggctcaagatgtgggaactggaactttaatggctgttaaacaggggacttatgtcagaaacacatcttctgagcaagaagaagtagtagaagcactaagagaagagataagaatgatgagccatctgaatcatccaaacatcattaggatgttgggagccacgtgtgagaagagcaattacaatctcttcattgaatggatggcagggggatcggtggctcatttgctgagtaaatatggagccttcaaagaatcagtagttattaactacactgaacagttactccgtggcctttcgtatctccatgaaaaccaaatcattcacagagatgtcaaaggtgccaatttgctaattgacagcactggtcagagactaagaattgcagattttggagctgcagccaggttggcatcaaaaggaactggtgcaggagagtttcagggacaattactggggacaattgcatttatggcacctgaggtactaagaggtcaacagtatggaaggagctgtgatgtatggagtgttggctgtgctattatagaaatggcttgtgcaaaaccaccatggaatgcagaaaaacactccaatcatcttgctttgatatttaagattgctagtgcaactactgctccatcgatcccttcacatttgtctcctggtttacgaagatgtggctcttcgttgtttaagaacttcaacctcaggacagacctccatcaagagagctactgaagcatccagtctttcgtactacatggtagccaattatgcagatcaactacagtagaaacaggatgctcaacaagagaaaaaaaacttgtggggaaccacattgatatctacggccatgatgccactgaacagctatgaacgaggccagtggggaacccttacctaagtatgtgattgacaaatcatgatctgtacctaagctcagtatgcaaaagcccaaactagtgcagaaact

SEQ ID NO: 65367 - DNA, 2915 bp, Homo sapiens
gcagacacacacggacacacagagacaccagacacacatatacacatgcacacacagatgcacacacatgcacacacatgcacagagacacacagatgcacacacacacgatatgcagaaaaaaatatgcactaactaacatccaggcggccatgggcctctcggatccagctgcacagcccctgctgggaaatggctctgccaacatcaagctggtgaaaaatggggagaaccagctccgtaaggctgcagagcaagggcagcaggaccccaacaaaaacctgagccccactgcagtcatcaacataacttctgagaagttagagggtaaagagccccacccacaggattcctcgagctgtgagattttaccctcccagcccaggagaactaagagctttctaaattactatgcagatctggaaacctcagccagagaactagagcagaaccaaggcaatcaccatgggactgcggaagagaaatcccagccagtccagggccaggcctccaccatcattgggaatggcgatttgctgctgcagaaaccaaacagaccccagtccagccctgaagacggccaagtagccacagtgtcatccagcccagaaaccaagaaggatcatccgaaaacaggggccaaaaccgactgtgcactgcaccggatccagaacctggcaccgagcgatgaggagtccagctggacaacgttgtcccaagacagtgcctcacccagctccccggatgaaacagatatatggagtgatcactcatttcagactgatccagatttgccgcctggctggaaaagagtcagtgacattgccgggacctattattggcacatcccaacaggaacgactcagatgggaacggcccgtctccatcccagcagatctccagggttctaggaaagggtcacttagttctgtaacgccatctcccaccccagagaacgagaaacagccatggagtgattttgctgttctgaatgggggaaagattaatagtgacatttggaaggatttgcatgcagccactgttaacccggaccccagtttaaaagagtttgaaggagcaaccctacgctatgcatctttgaaactcagaaatgccccacaccctgatgatgatgattcttgtagtatcaacagtgacccagaagccaagtgttttgctgtgcgttctctgggatgggtagagatggcagaagaggacctcgcccccggtaaaagtagtgttgcggtcaacaactgcatcaggcaactttcctactgcaaaaatgacatccgagacacagtcgggatttggggagaggggaaagacatgtacctgatcctggagaatgacatgctcagcctggtggaccccatggaccgcagcgtgctgcactcgcagcccatcgtcagcatccgcgtgtggggcgtgggccgcgacaatggccgagagagggattttgcttatgtagcaagagataaagatacaagaattttgaaatgtcatgtatttcgatgtgacacaccagcaaaagccattgccacaagtctccacgagatctgctccaagattatggctgaacggaagaatgccaaagcgctggcctgcagctccttacaggaaagggccaatgtgaacctcgatgtccctttgcaagtagattttccaacaccaaagactgagctggtccagaagttccacgtgcagtacttgggcatgttacctgtagacaaaccagtcggaatggatattttgaacagtgccatagaaaatcttatgacctcatccaacaaggaggactggctgtcagtgaacatgaacgtggctgatgccactgtgactgtcatcagtgaaaagaatgaagaggaagtcttagtggaatgtcgtgtgcgattcctgtccttcatgggtgttgggaaggacgtccacacatttgccttcatcatggacacggggaaccagcgctttgagtgccacgttttctggtgcgagcctaatgctggtaacgtgtctgaggcggtgcaggccgcctgcatgttacgatatcagaagtgcttggtagccaggccgccttctcagaaagttcgaccacctccaccgccagcagattcagtaaccagaagagtcacaaccaatgtaaaacgaggggtcttatccctcattgacactttgaaacagaaacgccctgtcaccgaaatgccatagctgcacatgcaaaaggactcggctatttacctgaagattgactagctacactaaagaaaatgaactccgccatccgaccttccatccagttgctgatgctttgtcttcagagaatttacccttaaccaagcagtgttagacaagcatgttctctcggtcttgccaccgatcatgtgatatgaaaagaagcatgaataattttttttgctgtaagttacatcatgcgcagtggaaggtctttttcttattgtaaatattgtgaacattacttaacttcacacacacacagagaagagtgtggccccacccctcctagtgaactaacgctgcgtccttggaatgaatgatgcgtgagttagtttcactgtcttcttggctggacctgtcacaagcaacctttaagtcctacagcactttgccctgttttcaacattggagtaggcactgcatagcagataccattgaattgctgtaaaaataggatggcgagtttgtgttttaatttttcataaaattgaacctgttggttgacaaaattggctgttggcatcagtatagaaaccaactggcagctttccctgacaagctctttgacacatggacaccatttcatgtctacagctgtttgtgggatgttggaaaaaaatgaaacttcaaaattgatgaaaaactaaattcgaggaattaaaatcgaacaaaacataaaaaaaaaa

SEQ ID NO: 65368 - DNA, 2429 bp, Homo sapiens
ataacaaattttcccattcccaaggttttaaaaaacgcccccggcccaaactttaaaatccccccccataaagaaaaaaatattatttttcctccccccgtaaaacttgggccccccaaggattctttaaaaccgcccccccttttttttttttttgagatttaacattgtacattttattaaatactggactttattacaacaaattaatttacttccgatagaagtttcattttaaaaaatgtggttgtgttcaaattcttaattgacacttgttttggggtaaacatcctatttttactggtggtatcatcaatcattatgagcagaaagattaattttgtaccacagaacaaaggaatttctcaagtgggtacaatacttcaatatatataaaggggaatatactccccaaaggagtggggcatgaccacagcagagtatatgatcagagaacatattgcttttatggtatatatatatatatatatatatctctacatataacatcaagtcatgcacattaagtctttactacctactgaaggcttctaccttacacatgaaaattgttcatgtcccagggtttggcatccagccaaaatttaaacaatgatgaagaatggctgtcaaactggcttttcagaccacccctgaaaagctgtcagctgtaatatccatcctggaatcgtggcggaaagttcctgggagttgccttttcctgtgttttgatcaagtctataatagctgacagtactgcacagtctctggatttagtgtcattccagtctacaggatgaggactttcaatcttctcttgcagaagaatatctagttcctttcttaattccttaacaagatgggcaattcttgctggagactgaaatacaatccactcatctacagcaatagtttcctgatcgttatccttctggatggaaatgtcacctccaaaaaacaagagacagtatggggaaacctctgtgcagtcatacaagtatatactgcttgttctcatctttaggtgatagataagccagttgtagtgaaagtctgtttgctccacattaacagatttaggatgaacagcaaccaggccatcggtttttgtgtaaacttttaccatttttctttttttacccaaatttagtcgaattttagcaactttgggatataaaccagcacagatgacagctttaattatcttctcattatctgaatttatattagattctggatctttaggatttctactgcttacaaatccagctccaagaagatgctcagcaaactgtcctttcatgttatgcagcatctgcagtgtgtttgaagacagaaaatattcccagcaatagtccttttcgtatctgaaaccacgtcgcctagcctcttcccagccctcaaacgcattcacaactgttaagtgatcacttctagtatcctttgccaattcctttcttcttgcatctgcaatcttttcttttcccagtggaatgacaaatggatctttgaaactgagactagcagcaatagtgagtactgggtctaagcagcagaacagtgctccaaaaagaatcatttttccaatatgtggctcaacgggtaatcgtgccaagtggactccaagaggtgtcaattcttcttgtttatccaaagcgttcagctccatcaggtgtcttatggagagtaacactgcctcatttgatggtgggtccattaatctactcagaaaataagcaattccacctagccttaaaatctttatttgtaaacaaagttcttccaaaggagttctcaaaatttctggcagttgatagtcatctagaagacttgctctaagaccattatacagatgatagcaatgaccaggttgaactcttccagctcgaccttttctctgtttggcattagctttactaacccactcagcggacattgtactgatattgttctgagtatcaaaatgcgtctcttttatttttcctccatctatcacataaacgacatcatctatggtaatgctagtctccgcaatgttggtagcaattactattttccgaacaccaggaggggttcttttaaacacctgtgtctggttaactgtaggcatcagtgaatgtaaaggtataattaaaaatttatctgatttaaacattacttgtgacatcaagagatcatgtaaagtgctgatattgtcccagcctggcagaaagaccagtatcgcaccatcctcttcttccaaaacaatgtatcggatgagggcaacaatcaaattcagatcaactttatcatcctccatcatttctataacatctacagtacttgcagaataccttcttcgcagttcccttacataatctggccaacgttctttatatattgcttctttttcgaattcgaccacacggactagggatctactaatttta

SEQ ID NO: 65369 - DNA, 3973 bp, Homo sapiens
tttttttttttttccttttcttcagagtttattttgaattttcatttttggataaccaaacagctctttaagaagaatgcccagaagagtccttctggcacttttggatagtacataagattttcttttttttttttaaattttttttaatagtcacattcagctcgcttgctcaaaccagactcccacattgggtgagcaagatgagcccataggattccagagttaatacgtaaccgtatatacaaacagccaaaaaaccataatggtgccacagggatggagcagggaagggcatctctaacgtgtcctctagtctatcttcgctaaacagaacccacgttacacatggataactaggagaggcacactgtgttgaaaacgagggatgctggaccccaaatgggcacttgggcaggcatgccagtttaaagcaaaagagacatcctttaataactgtataaaatccaggcagttccattaaaggggttaagaaaaccaacaacaacaaaaagcgagggactgtctgttgtcactgtcaaaaaggcacttggagttaatgggaccaggattggaggactcttagctgatacagatttcagtacgatttcattaaaaggcttggatgttaagagaggacactcagcggttcctgaagggagacgctgagatggaccgctgagaagcggaacagatgaacacaaaggaatcaaatctttacaaccaaattgcatttaagcgacaacaaaaaaaggcaaaccccaaaacgcaacctaaccaaagcaaaatctaagcaaaatcagacaacgaagcagcgatgcatagctttcctttgagagaacgcataccttgagacgctacgtgccaacctaagttctcaacgacagcttcacagtaggattattgtgataaaaatgactcaagcgatgcaaaaagtttcatctgttcccagaatccgagggagaactgaggtgatcgttagagcatagcgacatcacgtgcggtttcttaatgtccctggtggcggatacgccgagtcctcggaaggacatctggacaccactttcagccacctccttgcaggggcgacatccgccaaagtcatcctttattccgagtaataactttaattcctttctaacatttacacggcaaacaggaatgcagtaaacgtccacgtccgtcccacggctgggctgccgttccgtttcctccacgaacgggtacgcgcttccatgagaaaggatatttggcaattttatattccacagtcaggtgggtctgcgatagctcatttaatgttaaacgccatcaggggcctatctctaccgattctgccaggggcttttcttgtcttctccttggtcatcatcatcatcgtcttcctcttcctcgtgggcagatcttctctggtgggggctggctgctggctccgagggggcatccgcagtccgtctggtcgtctcctcctgcaggctgggcagctggccaccacttctccgactcgacccctccaacaagcatcgcagggcactgtcctcgggggtacagaccgtggtcccacattcgctaccactctgttccacgtcatccaggtacacgagctgcgtgtaggccgtgctgtctggggctcgaggctctttctgctggtgctcttggacgggcgggtagttctgctgcagagacaaagcatctccccttcccttccgggctgattttggttcattcatatctacgccagagtccaaactggcatcattacttccgttccttccagctctttggagatcaatgtatgaatgtctaacgtgagcgttggacctgccatccaaggagacgaaccacgcccgggggtgcggaagcggcttcccacccccaagctccatcagggccttttcagtcaggagctgcacctcactgttcatctgagccaaagccgcgtcgttcagggaagctgggatggagagagactccgacatggatgcgttttgagggctccactcccgggtgcccgcatcctgcaggtgctgctgagagatggcctgggaagacaggggctggggctggatctgtgaggacgggtgtgggaagatcccggcatggggattggacagctcagcctgtagtctttctatctcaagctgctgatcagccgggacgacgaggggctggctgacataggagtggtccccggggagtttcatataatgagccgggatgaccaaggcaggcagtactttcctgtaaacgctgtcattgacctggtcgacagaactgcagcagattaactggccgggccgtgggaaggacgtaggtctctcgaggtgatctactgatcgcgacatcatacattcagtgggtctgcggtccagcagctgttctttctcaggtgatgaaggcgcggggtacagatgttcctgaatggtgagtttgcttcccgtggaggctggaccttctctgtcctgcttttcaaataaaggctgtgagagcacggtgttgtaactacccctgtagtcatcattgcccgaggactcgtagccttctctttccatagattttcttgcctttaagggaaaaacctccactgacttatggtagtctttccccagcgtcccacttggagtgaggttatcaaaggagatctggcttttatcctcttccttgcaagagaggagctcctcccgggagctaaattcctgggaggtgctgtaggagagcttgagcatgggggtgtgcaggtccccttcgccgcccggagacatcatttccaaatggactccactcatcagttccttcgtgccgggggcctcggggcggccgtggctggtgacggacagcgggccagggaattctgacgctcggcgtgaaaacagcaagttaatgtgtgacatggacgtggactggtctcttttggaactctccagtcctgcagggagctgcagttttctgtggtgctgacgaggtttcaagcacttcctcctgcaataatataaaaggagacccagcaaaaccaaaagtatgaaagccattcctcctaaaatggccaaaagaaacaccgtgtgatacgtggtaatgtcctgtgttacaacgggacctgggatgggaggggacatggcggccacccagtaccccaactggggggcaatgtatgtccacgtcagctggctgccttcctggtgcacaagacccagaccgctcttcagccacgttcccagcttctggtcaaaccgccacgccgcgacataggcattgtgcctcaggctgctctgcgtggccaggggcacagtgacatagatgggaccatccaccagcaccggcgttccattactgctcagcaagtggacgctgacggctgtgactggggtcaggtcatgcctggtgctgtttcctgttccatttccgtctaatcctcgcaaataaggaaaactgtccacctccgaaggggagctggcggccgtgagaaacgcggtcaggtcactgtagctggtgttctcaggcaacctcagagcccttctctggaaatgaacgcgaggctgtggccgggcaccttggaatcctgatactatttggacgacatcttcatataccattagagtggcagagcgttctggaagcaggccaaggctcagagaggaaaatacaggtaaccggattggcttccatggggcagagtttggcacgtaggcatgcttcgaggcggtgacaatcaactgactgcccagcttatactggaacttgataaaggcgacgccatcagtccccgaggtgccagaggctatggaggcctggttggtgaagatctcgatgagcgcatctgctacgggctggtgggtgctggcgtcgctgatgtgcacctttaacgtcacctcttgggctccggcgccgggctcccgcagcgtcttggtcaccgccttccagacgtggcagcccagcaggcacagcagcagcgtcgcggacctgctcgtctcccccc

SEQ ID NO: 65370 - DNA, 1459 bp, Homo sapiens
ttttttttttttttctaaagtaatacctttattctggagaaaacaaacacctccaaaaaaattctaaaagattttgagaggggaaaatatagacacacaactgcattcattctgatcttccacacaaagatcaggtgaagaaatctatgcagctatacatgctaggacctgttgtacaccatccctgcaaccccatagaaagaaaaaaaactcttttttcaaaatagaagcagtattcttctacgaaaacaaaacaatcacatgtgactactggaaatgttagtgttacacagagtcctttaaaaataaatcacagccaaagttccataaagtacagaagcttgaaacagaaaataaaaatcgactcgaagagtgatgatgggagcctgaagctccatcctcacaaggacggcagcctctggacatcactgcaaaggtcacaggaggacagcttcacttcagagttgtaacttctcaccgcctgtctccttggctcatagtaatccactatggacactgaagcatcttgggtatttgaaactttaaagtttctcacagcaggaatattaacacaaaactgggtttcatttacagaatctaaatagaggttgagttttccatgatcatattccactttcttcactgtctcgctcagagaaattgcttctgaaggcaccataaagccacttaataggttaacttccataagagccatgccactcctacccgggcccgaaaagcttgtacacacattcaaatccacatgattgagatcatctttattttcttttacagcaacatctaaatcaaaggcttcttgattttggatagatcttcgtcttctagaagacccagaagccttcacattatatacaacattgagctgacaaatagcaaatccaaaaccatttgcggaaatattacactgccattggctgtaccatcagcaagctctgctgtctgaaggagtaagcggttgtgtgtgtcaatcagaaactttacaggacttggtgagctaggccccgtcacggtcacttggatatttgtcctttctgtattcattagggctgcaaattcagacagagcctttaaagccacagtggtatcctgagtagatgcaaaaccacccaagctatttctttgcctgcttagccacctcataattgggattccctcagaagtctgaaattgtaagaagtgtgagagcagtgcataggctgcaacttcaatatccagggagcgtggctgccaggagtcagaaagtttggactctgatgacacccagaattgcatgccaccttcttgttctgctctccaagtcagcatattcaaagcttccttcgctttaggactccccactgatgacaatgcataagttataagggctagagtataattgtctgaaattcctctactgaattcagactccaaaaaatggatagactcttgcacctcgtgc

SEQ ID NO: 65371 - DNA, 1838 bp, Homo sapiens
cggagggggactgagatgctgggatcaaagaagggggaggtggtccccatatatccttcctttctgaaacccaggggggaataaaggaagaggggatgagagatgtgtgctgttttaacagctcaccctgctaaggggccctaaagtgccaagtcaagctgccagcctccagagattagaattctatggtatttgaagataagtgtgccgcagggggtaggagccagaaccatagggcagcagtagaggaggagaagggatttagaagacagtaatatatgattaaaagttaaaagctgatccagagcacatcagagttacaggttggaaagggggatctgccgatgagcaggaagtctgctgatggctggaaccgagtatgagaataaccctcactttaagagctgctgctgcttcttttttgtctacctttctggtaaagacaacatcaattttataaggggagcaacagagggagaacaggggatggggaggtggagggtgtatgtatgtgtgtgctgcgatccacaatggaaagagcaagcccttcagttatttcactagattttaaatgctttagattttttttttgtcctttttaacttttaaatacaaagtctgagctgtcccatgccccaagtcttcctgtccactaaggtccggcagagtctgaatcttcaatcagaacctctgtggtagcaccgagtatatctgagttcataaccagcccttcagtgcctccactgctgccgcttcccacaaagatcttcccatcagccatcaggctcacccgttccgtcccactgcagtatgactttgacatcccttcagcttctaacagtaggcactctccagaggttgagtttcccaagggctcaggaagaagaggaagaccctgaccatctgaaggctgcgtcagggactctgggttagtgcccaagatatctgtgctggtgatgagggcgcctgcattgggcagccagagcttctgcaatcagcacctcagggtggctttttgccttgtgtgccactacgctgtccttcttctcaaattttttgccacagatattgcaagaaaactggtagaaggagtctgcatcatgtttcttcatgtgccaattaagagatgccttttgtcgacaagtaaatccacagatctcacatctaaggagaggagaaaaggaaatggctgatccaacagagaaataaagagtgctcttattcaggatcagggttagagtttagagcatatatatacatacacacacacacacacacacacacacacaataatcagtaacatacttcttttgaaggattgggaaatgttactagatggaaaactaatctgatcttcttctgtttgcctgaaaaacagagggaaactaagaaaaaggctactaactaatgcccccaatcaatatccactcatttatttgatgaaagtaaacagcagtggcaactaatatgtttgtaaagcggcaaaccttcaagtagggcatatatccttctcacccagatgttcaccagtaaataatactcactgtaatggcttctcgccagtgtgaatcatccggtgcactgccagattgtgggaactcttgaaggcccgagcacaatattcacagatataatccctttgatctatgaagaaaatactgtggttagtgttctatttagataccctgtaaatattttcccttacagtaagtaagcagatgatggggcaggcaatttagagtaaaagcaatgctgttttcaatgtataaacactttgggtaaacaaaatttaaaaaagaaaagtattgctttaaaaaaaatccaacattcctcgtgcc

SEQ ID NO: 65372 - DNA, 3055 bp, Homo sapiens
gcttttatatttgagcttgtttttcaagtgataggagagttgatgcagttctaacgtaagtgtaattaaagtaggctttttgaaaaaatagtctgtggaattcttattactgtttttcccccctactttcagcttcatttacctcttaattctcctttgcctggaagtgaattgaccaaggaaccttttcgttgggatcagagactctttgcattagtgttgcggttgcctggcaccatgtcagtagaatcagaacagttgacaggtgtgcctttagatgactctgcaatcacaccaatgtgtgaagtgacaggcggccgttcatattctgtgtgttctccaagaatgcttaatcagtgtctggagtccttggtgcagaaagtacaaagtggggtggtaataaactttgaaaaagcaggaccagatccttcccctgtagaagatgggcagccagatatatcaaggccttttggatctcagccttggcatagctgtcacaaactcatatatgtcagaccaaatcctaaaactggggttcctataggtcattggcctgttccagagtctttttggccagatcaaaattcgccaacactaccacctcgtacatctcatcctgtagtgaagttttcctgtacagactgtgaaccaatggttattgataaacttccttttgacaaatatgagttggaaccttcaccactgactcaatttatcctggaaaggaaatctcctcaaacatgttggcaggtgtacgtgagcaatagtgcaaaatacagtgaacttggtcatccttttggttacttgaaagccagtacagcactgaactgtgtcaacttatttgtgatgccttacaattatccagtccttcttcccctcttagatgacttgtttaaagtgcataaagcaaaaccaacattgaagtggagacagtcatttgaaagttatttgaagacaatgcctccctactatcttgggcccttgaagaaagctgttaggatgatgggagcacctaacctaatagcagacagtatggaatatggacttagttacagtgtcatttcatacctcaaaaaactgagtcaacaggccaaaatagaatctgatcgagtcattggatctgtaggcaaaaaagtagtacaggagactggaataaaagtccggagccgatcacatggtttatcaatggcatataggaaagattttcaacaactcctccagggaatttcagaggatgtccctcacagactgctagaccttaatatgaaggaatacactgggttccaagttgctttgctgaataaggatttgaagccacagacatttagaaatgcttatgacataccaagacgaaatcttttggatcacttaacaagaatgagatctaatcttttgaagagcactcgcagatttctgaaaggacaggacgaagatcaagtgcacagtgttcctatagcacaaatggggaactaccaggaatacctcaagcaagtaccttctccactaagagaacttgatcctgatcagccacgaaggttgcatacatttggcaacccctttaagctggataagaagggtatgatgatagatgaagcagatgaatttgtggctggacctcaaaataaacataaacgacccggagaaccaaatatgcaagggatccctaaaagacgtcggtgtatgtctccactactaagaggcagacagcagaatcctgttgtaaacaatcatattgggggaaaaggaccacctgcacctacaactcaagcacagccagatcttattaaacctcttcctcttcataaaatttcagaaaccactaatgattcgataatacatgatgtggttgaaaatcatgttgcagaccaactttcatcagacattacaccaaatgctatggatacggaattttcagcatcttctccagccagtttactggaacggccaaccaatcatatggaggctcttggtcatgaccatttaggaaccaatgacctcactgttggtggatttttagaaaatcatgaggagccaagagataaagaacaatgtgctgaagagaacataccagcatcttcactcaacaaaggaaagaaattgatgcattgcagaagccatgaagaggtcaatactgaactaaaagcacaaataatgaaagagatccgaaagccaggaagaaaatatgaaagaatcttcactttactgaagcatgtgcaaggcagtttacaaacaagactaatatttttacaaaatgtcattaaagaagcatcaaggtttaaaaaacgaatgctaatagaacaactggagaacttcttggatgaaattcatcgaagagccaatcagatcaaccatattaatagcaattaaaagaaaatagaatgtggccacttatttcactatcttcttcaaatacaaagtaaatacaagactgttgtgatcttgcattcattttctgacatgcattgttggctatttgaaatactaaaagcaaatctacagatcctttttccatcattttacagtgaccttttcttcattttggtttatttttgtaatgtgaaaagtatcactctaaaaaacatttttaatttaacaaactaaaaatattcctccaaatctcttgcttgtcattgactcttgcgtgtcaatttccctcaggttctattttcttaaaccaacctttaaaattgtcacctctgttaaggttgaactttgccaaaaaaaaaagaagttactttgtaatttttggggaaaaaagcacatacattaaaactaggtaatgttttgtatatacagttattttggatatattattgtaagttgtacaaatgtattttgaagaatatttaagaaaagcacttttgttattccatcaataaatgctctattttactcttgtgtggtttaggaaataatcacatttaaagtaatcatttaaaaacatcctaagataatggaattttaaaggccttgctttttagcattggaaaaatacaccacttgaagttcatgtttgttaagcctaactgtaattacatgttacataatctgcatt

SEQ ID NO: 65373 - DNA, 2513 bp, Homo sapiens
ggtaagccaactgaaatctactcaagacaccttaaaccaaatggaaaagtttggaaaagtacaagatgcaagtgagaaatagcaaagcttctttttgacaagttaaagatggatgtttgtcagaaagtggatttacttggagctagtcgctgcaatatgctatctcattcgctcactacctaccagagaacactgcttggattctggaagaaaacagctcgaatgatgtcccaaattcatgaagcctgtattggctttcatccgtatgattttgtagctctcaagcaactacaagacacgccaagcaagattagtgaagacaataaagatgaacaaataggcggttttcttactgaacagctcaataagctagttttgtctgatgaggaagcaagctttgagagtgaacaagcaaacaaagatcacaatgaaaaacattctcaaatgagagaatttggagcacctcagttttctaactctgaaaatgttgcaaaagatctacctgtagattcattggaaggagaagattttgagaaggaattctcatttctgaacaacctcctaagttctggttcttcaagtactagtgaatttacccaagaatgccagactgcctttgggagccccagtgccagtctcacatcccaggagccttccatggggtctgagcccctcgctcattcttctcgattccttccttcacaactctttgaccttggctttcatgtggctggagcgttcaacaactgggtctcccaagaggaatcagaactttgtctttcacacactgataaccagccagtgccttcacagagtccaaagaaattaacaagatcccccaacaatggcaaccaagacatgtcagcctggttcaatctggttgcagacttggatccactttcaaacccagatgctattggacactcagatgatgaacttcttaatgcttgactgaagttataatgtcacttcagtggccttgagacatcaattttgcaacgtatttccttcgtggaaaggatttagattgtaacccgcacacaaaagcacggtgtttgtgaatataacacctgtcagccaactttagacagatggtaaagaccacatttgaataagtacacatctttcatatcttggatttgcagctgttggtactatgtggaaaatattagaaacttctatgtggaaaatattagaaactacagagtttgcgatatttagatactgaaatttatgtcaaaataacggctaggaataattctgtcaatatggagttgagcttatttctttggaaacccttttaagttgccttgctggctgtgagaattttatatgtggataacaaagatagatagatagcatgtaaattgggttgtggtttggggtcagtttttaaatgaaatagtagcgaggaggattttctgttttggaaaacaccattagaaccagaccagctttgttttgggttagagagagtaagatttgagaactcagtttgctttaatgaaatcacagagaaacttggtacttgtttttcttcatttggaggctaaaatgtaatgttttttcattcatacaaaataatggacactccctaattccattattaaatcttgaaggggaagtagcaggataattaatttgctaagcccatcctctgcagaaacagaaaaatctatcttcccatctcctaaaactcagaatgcacagtaatacttaaggcttgtacaagtgtcttcagacccactttttcatacacttgctatatagtagtatgcagtatttatattattcctgaaaataaaatgaggggagaatattccctaagcaactggcaatagtattcctgaaatacctagaaatttctatctgaatgagggagacacttatgaacaccttatccttacatatatttgcatacttatctcatattttgtgacataattatttaacccagaatactttctggcagacatacagaaagctctgtgtgatcaataagggagtgtctcatttttctacttccctctttctgtgggtgacatgatctgaggttctatttgattactaagcaaaatctgttacccctacagggtttagaacctaagtattagagaggaaggctatttaatggaagttagtgtaagctgataaaaacgtagctaccgtacacacacatcaatcactcaatttcctgtccttttaaattgcccaccctttaattttgaagcaatttcccaagtgtgtgtttgttttatatttgtcatccagtccattgcatttccataagaagacattttgactggctgggtgcggtggctcacgcttgtaatcccagcactttgggaggctgaggcaggcggatcacgaggtcaggagatggagaccatcctggctaacatggtgaaaccccgtctctactaaaaatacaaaaaattagccaggcgtggtggcacgtgcctgtagtcccagctactccggaggctgaggcaagagaatggcgtgagcccggg

SEQ ID NO: 65374 - DNA, 2867 bp, Homo sapiens
cttcctcttctccacgcaggcttcaacaggagatttatggagaatagcagcataattgcttgctataatgaactgattcaaatagaacatggggaagttcgctcccagttcaaattacgggcctgtaattcagtgtttacagcattagatcactgtcatgaagccatagaaataacaagcgatgaccacgtgattcagtatgtcaacccagccttcgaaaggatgatgggctaccacaaaggtgagctcctgggaaaagaactcgctgatctgcccaaaagcgataagaaccgggcagaccttctcgacaccatcaatacatgcatcaagaagggaaaggagtggcagggggtttactatgccagacggaaatccggggacagcatccaacagcacgtgaagatcaccccagtgattggccaaggagggaaaattaggcattttgtctcgctcaagaaactgtgttgtaccactgacaataataagcagattcacaagattcatcgtgattcaggagataattctcagacagagcctcattcattcagatataagaacaggaggaaagagtccattgacgtgaaatcgatatcatctcgaggcagtgatgcaccaagcctgcagaatcgtcgctatccgtccatggcgaggatccactccatgaccatcgaggctcccatcacaaaggttataaatataatcaatgcagcccaagaaaacagcccagtcacagtagcggaagccttggacagagttctagagattttacggaccacagaactgtactcccctcagctgggtaccaaagatgaagatccccacaccagtgatcttgttggaggcctgatgactgacggcttgagaagactgtcaggaaacgagtatgtgtttactaagaatgtgcaccagagtcacagtcaccttgcaatgccaataaccatcaatgatgttcccccttgtatctctcaattacttgataatgaggagagttgggacttcaacatctttgaattggaagccattacgcataaaaggccattggtttatctgggcttaaaggtcttctctcggtttggagtatgtgagtttttaaactgttctgaaaccactcttcgggcctggttccaagtgatcgaagccaactaccactcttccaatgcctaccacaactccacccatgctgccgacgtcctgcacgccaccgctttctttcttggaaaggaaagagtaaagggaagcctcgatcagttggatgaggtggcagccctcattgctgccacagtccatgacgtggatcacccgggaaggaccaactctttcctcctgcaatgcaggcagtgagcttgctgtgctctacaatgacacctgctgttcctggagagtcaccacaccgccctggccttccagcctcacggtcaaggacaccaaaatgcaacattttcaagaatattgacaagggaaccattatcgaacgctgcgccaggctattattgacatggttttggcaacagagatgacaaaacactttgaacatgtgaataagtttgtgaacagcatcaacaagccaatggcagctgagattgaaggcagcgactgtgaatgcaaccctgctgggaagaacttccctgaaaaccaaatcctgatcaaacgcatgatgattaagtgtgctgacgtggccaacccatgccgccccttggacctgtgcattgaatgggctgggaggatctctgaggagtattttgcacagactgatgaagagaagagacagggactacctgtggtgatgccagtgtttgaccggaatacctgtagcatccccaagtctcagatctctttcattgactacttcataacagacatgtttgatgcttgggatgcctttgcacatctaccagccctgatgcaacatttggctgacaactacaaacactggaagacactagatgacctaaagtgcaaaagtttgaggcttccatctgacaggctaaagccaagccacagagggggcctcttgaccgacaaaggacactgtgaatcacagtagcgtaaacaagaggccttcctttctaatgacaatgacaggtattggtgaaggagctaatgtttaatatttgaccttgaatccattccaagtcccccaaatttccattccttagaaagttatgttcccatgaagaaaaatatatgttccttttgaatacttaaatgacagaacaaatacttgggcaaactccctttgctctgcctgtcatccctgtgtacccttgtcaatcccatgggggctggttcactgtaactagcaggccacagggaaggcaaagccttgggtgcctgtgagctcatctcccgggatgggtgactaagtaggcttaggctaggtgatcagctcatcctttaccataaaagtcatcattgctgtttagcttgactgttttcctcaagaacatcgatctgaaggattcataaggagcttatctgaacagatttatctaagaaaaaaaaaaaaccgacttaaaataggggaagcaactaggaccaaattacagataaactagttagcttcacagcctctatggctacatggttcttctggccgatggtatgacacctaagttagaacacagccttggctggggggtgccctctctagactggtatcagcagcctgtgtaacccctttcctgtaaaaggggttcatcttaacaaagtcatccatgatgagggaaaaagtggcatttcatttttggggaatccatgagcttcctttatttctggctcacagaggcagccacgaggcactacaccaagtattatataaaagccattaaatttgaatgcccttggacaagcttttcttaaaaaaaaaa

SEQ ID NO: 65375 - DNA, 1091 bp, Homo sapiens
tttcgtagagcagcacccagcagcgccccggggtccccgcgggaccgcggccactggacggatacctcggagtggcggaccacaagcccctgaaaatgcactgcagggactgtgccctggtgaccagctcagggcatctgctgcacagtcggcaaggctcccagattgaccagacagagtgtgtcatccgcatgaatgacgcccccacacgcggctatgggcgtgacgtgggcaatcgcaccagcctgagggtcatcgcgcattccagcatccagaggatcctccgcaaccgccatgacctgctcaacgtgagccagggcaccgtgttcatcttctggggccccagcagctacatgcggcgggacggcaagggccaggtctacaacaacctgcatctcctgagccaggtgctgccccggctgaaggccttcatgattactcgccacaagatgctgcagtttgatgagctcttcaagcaggagactgggcaaagacaggaagatatccaacacttggctcagcactggctggtttacaatgacaattgcactggagctctgtgacaggatcaatgtttatggcatggggcccccagacttctgcagggatcccaatcacccttcagtaccttatcattattatgaaccttttggacctgatgaatgtacaatgtacctctcccatgagcgaggacgcaagggcagtcatcaccgctttatcacagagaaacgagtctttaagaactgggcacggacattcaatattcacttttttcaaccagactggaaaccagaatcacttgctataaatcatcctgagaataaacctgtgttctaaggaatgagcatgccagactgtaatcccaggtattcactgcatcagacaccgagacactgaacttcctgagccaccagacaggaaagggtagcagaaaacagcttcactcctcaggaagtaccatggacagacgcctaccaggggtgacaaagcagtgcagttggattgtaaggaaaaattccggaattaatgcatcctaatgaatgttgtccccttcaatggtgttaccttaagagctgaacattcaattcagg

SEQ ID NO: 65376 - DNA, 1129 bp, Homo sapiens
tcaagttcaggagacaggaagcgaacggcgcgagaggaacaggatgcacggcctcaacgacgctctggacaacttaagaaaagtggtcccctgttattctaaaacccagaaactgtccaaaatagagactttacgactggccaaaaactacatctgggcactttctgaaattctgagaatcggcaagagaccagatctgctcacattcgtccaaaacttatgcaaaggtctttcccagccaactacaaacttggtggcaggctgcttgcagctcaacgccaggagtttcctgatgggtcagggtggggaggctgcacaccacacaaggtcaccctactctaccttctacccaccctaccacagccctgagctcaccactcccccagggcatgggactcttgataattccaagtccatgaaaccctacaattattgcagtgcgtatgaatccttctatgaaagtacttcccctgagtgtgccagccctcagtttgaaggtcccttaagtcctcccccaattaactataatgggatattttccctgaagcaagaagaaaccttggactatggtaaaaattacaattacggcatgcattactgtgcagtgccacccaggggtccccttgggcagggtgccatgttcaggttgcccaccgacagccacttcccttacgacttacatctgcgcagccaatctctcacaatgcaagatgaattaaatgcagtttttcataattaatgaggaaaatgaaaataaacagtggtcattcacctcccctgtctaattaagacaaagcagatgcttgtgggctgagtaattggcacaactctatctaaggtgtttactagtttctgaagtgtgtttcaactattgtgagaattttctatgtaataataaatctcttttcgtatgagaacttcttttcctttccttttgtctgtgaagcactgtgattctgtttctactggaaagatttttttctttttaattttcttttaaacttatttaatttgtttgaacaaggtgtctaagaatatactgttgaataaagacatgcacacagcataattcaatgtctattttggttgtacagtaattataaaatgcatgttattaaaaccagatgag

SEQ ID NO: 65377 - DNA, 884 bp, Homo sapiens
ataaccaaagggcgtgcggtcgctggcagcgctggcccttgtcctggcgctggccccggggcttgcccacagcccgggccaggcgagacaccgcgccctgccgagcgggggcccccagtgcggcttttcaccgaggaggagctggcccgctatggcggggaggaggaagatcagcccatctacttggcagtgaagggagtggtgtttgatgtcacctccggaaaggagttttatggacgaggagccccctacaatgccttgacggggaaggactccactagaggggtagccaagatgtccttggatcctgcagacctcacccatgacactacgggtctcacggccaaggaactggaggccctggatgaggtcttcaccaaagtgtacaaagccaaataccccatcgtcggctacactgcccggagaattctcaatgaggatggcagccctaacctggacttcaagcctgaagaccagccccattttgacatcaaggatgagttctgatgttccccctgcaggagcaggttcttgggagcgtgaggcaggaagacactaggtgctgaatctcctgcaaaactggctgcctggaggccctgagccacccagatctgaataaaacagatgcttaccctggaagagcaaatgcctcctgttgtccttggtcaggggttctgtctacctggggacccctgtctgcacaccagggatcaataagagccaaagtgggacacctcctagatgtcagtatcagctggctgggcagtggaattttgagcgacgctttactttatacttttctgtgcttgacagattttcagccatgaccatgttcactttataatcaaaacaaaaataaaggtcccatttttacaaaaaaaaaa

SEQ ID NO: 65378 - DNA, 6527 bp, Homo sapiens
atgccccgggcgactgcacttggggccctggtgtcactgctgctgctgctgccgctgcctcgcggcgccgggggactcggggagcgcccggacgccaccgcagactactcagagctggacggcgaggagggcacggagcagcagctggagcattaccacgacccttgcaaagccgctgtcttttggggagacattgccttagatgaagatgacttgaagctgtttcacattgacaaagccagagactggaccaagcagacagtgggggcaacaggacacagcacaggtgggcttgaagagcaggcatctgagagcagcccagacaccacagccatggacactggcaccaaggaagctggaaaggatggccgggagaataccacactcctgcacagccctgggaccttgcatgccgcagccaagaccttctctccccgggtccgaagagccacaacctcaaggacagagaggatatggcctggaggagtcatcccctacgtcattggagggaacttcactgggagccagagggccatttttaagcaggccatgagacactgggagaagcacacctgtgtgaccttcatagaaaggacggatgaggaaagctttattgtattcagttacagaacctgtggctgttgctcctatgttgggcgccgaggaggaggcccacaggccatatccattgggaagaactgtgacaagtttggcattgtggctcacgagctgggccatgtggttgggttttggcatgaacacacccggccagacagagaccaacatgtcaccatcatcagggaaaacatccagccaggtcaggagtataatttcttaaaaatggaagctggggaagtgagctctctgggagagacatacgactttgacagcatcatgcactacgcccggaacaccttctcaagaggagttttcttagacaccatccttccccgtcaagatgacaatggcgtcaggccaaccattggccagcgcgtgcggctcagtcagggagacatagctcaagcccggaagctgtacaaatgcccagcgtgtggggagaccctgcaggacacaacgggaaacttttctgcacctggtttcccaaatgggtacccatcttactcccactgcgtctggaggatctcggtcaccccaggggaaaagatcgtattaaacttcacatccatggatttgtttaaaagccgactgtgctggtatgattacgtggaggtccgggatggttactggagaaaagccccccttttgggcaggttttgtggcgataagatcccggagcccctcggtctccacggacagccggctctgggtggagttccgcagcagcagcaacatcttgggcaagggcttctttgcagcgtacgaagctacctgcgggggagacatgaacaaagatgccggtcagattcaatctcccaactatccggatgactacagaccttccaaggaatgtgtctggaggattacggtttcagaggggtttcacgtgggacttaccttccaagcttttgagattgaaaggcacgacagctgtgcatatgactacctggaagtccgggatggccccacggaagagagtgccctgatcggccacttttgtggctatgagaagccggaggatgtgaaatcgagctccaacagactgtggatgaagtttgtgtccgatggctctatcaataaagcgggctttgcagccaattttttcaaggaggtggatgagtgttcctggccagatcacggcgggtgcgagcatcgctgtgtgaacacgctgggcagctacaagtgtgcctgtgaccctggctacgagctggccgccgataagaagatgtgtgaagtggcctgtggcggtttcattaccaagctgaatggaaccatcaccagccctgggtggccgaaggagtatcccacaaacaaaaactgtgtctggcaggtggtggcccccgctcagtaccggatctcccttcagtttgaagtgtttgaactggaaggcaatgacgtctgtaagtacgactttgtagaggtgcgcagcggcctgtcccccgacgccaagctgcacggcaggttctgcggctctgagacgccggaggtcatcacctcgcagagcaacaacatgcgcgtggagttcaagtccgacaacaccgtctccaagcgcggcttcagggcccacttcttctcagataaggacgagtgtgccaaggacaacggcgggtgtcagcatgagtgcgtcaacaccttcgggagctacctgtgcaggtgcagaaacggctactggctccacgagaatgggcatgactgcaaagaggctggctgtgcacacaagatcagcagtgtggaggggaccctggcgagccccaactggcctgacaaataccccagccggagggagtgtacctggaacatctcttcgactgcaggccacagagtgaaactcacctttaatgagtttgagatcgagcagcaccaggaatgtgcctatgaccacctggaaatgtatgacgggccggacagcctggctcccattctgggccgtttctgcggcagcaagaaaccagaccccacggtggcttccggcagcagtatgtttctcaggttttattcggatgcctcagtgcagaggaaaggcttccaggcagtgcacagcacagagtgcgggggcaggctgaaggctgaagtgcagaccaaagagctctattcccacgcccagtttggggacaacaactacccgagcgaggcccgctgtgactgggtgatcgtggcagaggacggctacggcgtggagctgacattccggacctttgaggttgaggaggaggccgactgcggctacgactacatggaagcctacgacggctacgacagctcagcgcccaggctcggccgcttctgtggctctgggccattagaagaaatctactctgcaggtgattccctgatgattcgattccgcacagatgacaccatcaacaaaaaaggctttcatgcccgatacaccagcaccaagttccaggatgccctgcacatgaagaaatagtgctgatgttcttgaaagacagaaactgagaattttttttgttttgttttgtttttaacaacaatagcaccttgaaaatctgccctaaaacagtgtacagtatttttctcaaacaaaaactcagaatccagccttagaggtatatatttgaatgaaagtcttgtaagtttggccaacaaggtggagagaaaaatgttcttttgcttctgtctgcaatgttatcattcatgaactgttaaagtgttaaagattaggattgaagtcactgaccattccggctatgcttcttcataccattctccttgtcccttgctcctatgtggcaaaaggtcagccttggggttggccgttcctctaatctggacttgcttgcaaaggtgccaggctgtcttctgtccatgttgggcataagggatgaaaacttggccgagactaatgtgtggcccacagctttggctggaatcattttctttctctctgccagggacatgtcaaccaagaaacctgaaaatatggatggatgtcaggactaaaaaaaggcatcacagtgagcagtgagcacagagggagtttcgagtataagaatcattgtcatgaagttaggagaccacaaagccatttctcagagtcattcactctccttgtccctttggtttccccccctccctaattgcagtgggggctaaggcatccattatgaatacagcagaacatttgctggcgagagtcctgtctgctgagaagacaatattgtggctcgtcctgatattttttcattcattgactttgagaagactccacctgtgcttggaattccatgggcttcaaagaacatttcttcttttagctttggaggcacttgccgtggcacacctggactccttgacatccaattcaaactgcatttgcaaaatgtgcaaagacctcttatgagggaccaattcaggtcccttatggggtgaacactgttgaagactggttaattataagttatgtaagaatcatcgccttgtggaacaagtcaatcagtgactagcttcctgtagccaatcaggttaaagagtgcgttggtaactttgctctgattaactagtattcaatcaccaacttgcaaacagaattcataacacttggcacttgttctagagaagtgtagaggatgatgtttacataattttagcacctcaaggtataatttaaacagtgaggtagttttgaatggcatttcattaaggcatctatgggcattatgagctaaaagctgtggtatgttagctttaaaagagtatttatgttggaataatttttaaataatgtttacataactgtaagtcctgtttggttgttgttggacgcagggcggcacatgagtgtttttggttagagccaagatagctcccatgcaccggaattcctttgggatgaatcagcatcattttaaacaaagtatatgtaaaaggtgaaaggttatattttttacagatcagaatgtggcaccagaggactgtgtctcattaaagtgattgctgggagcaaaaactagaatgatacaaagaaaggtcagagaaatgcatgggaatattttttccttaaaacagaaaaaaattaaagtattattaataatatatgtctgtatatatgtatgtatgtaaaagatcagctgtcaaagccttaatcaatgcagtgtggaaaatgccaacccctggtcctcgctttactgtgggccctgcaggactggctctccatttcctgcctctcctttcaccaagctctgttttggcctttctcggccctggactgaggctcagcctacacgctcatattgtgcatatggcagaccctgcccagcgtgcgctttgatacagcaaatggagcagctgacctcatggctccaatcccacctgcctgttagggtagattccatttatctgatttttgtattttctgaggttttatttggtctcatcttgtctatgagagttgaaactggaactgggaaacctaagatgggtgttatggttctttctccaaggaaataaaaattctgcagttttaacctttagaagtctaagcaagattaacaaatttcatagaaaagtgggagggagtcagaaacagagttggtgctgctcagcaggacggtgaaacaatgatacttctttttatctctttagtatgaacattttcaaaaacacacagcttcaacaattgtcaccatatggccaatttgcaacaatgggactcttatgaaaaacctttatttaggccttctgtgtgacgtatccacagaaaagagaagctctgattcagctggggctagctgggccgctcctctggaagcccacacttgtggggacttaggcatgacacaggttcttgcaaagaaactagaggctggcttcactagagagagtccattcagcagaaagtcccaggcctctgccttggtgcttccaattatcagtgacctgcctgcaagcatccccagaagcaaacagcagaggtagaagatatcactgcagcctgctttgtgctttaattgggtaccaagctttggggatgacagtgagttgcaagaatagttttagttcagagaattgtcttaggacaacaggctaatgaaggatttggggtctgggtttttagcctggctccgttctggtgtaacccggtctagcaaaagctaagcctggattgcagggcaggaaaaaatctggaattaactttagccagtggaatttcttcaaacagagaaagagaggctgttcattgatccactattccctctattttcctctaaggtaaatatttagaggtatttacctgtaaggtgaagtttcctttttatttctactttacaatttctctctaaagcaagcttgtccaacccttggcccaggacggctttgaatatggcccgacacaaattcgtaaactttttaaaaaacattgtaagattctttctgtgatttttttttttctcgtcagctatcgttagtgtattttatgtgtggcccaagataattcttcttccaatgtggcccagggaagccaaaagatgggacacccctgctgtaaagtttcatatcactcatgaattgctcagctgatttaaataatttgtaaaagcctgctaactagcaaattcacattgagattttctattgattgggtccctttgatagctttcagattggtattgttagcgttccatttgtgaacaaatgttcccttggctttagcagatgtttttaaagtttcttttgtagaccgaacttctgaagagtaataccaaatgcctaaaattttatttttaaaaaggaaaattgtttaaagtattatatgtaaacatatgggtattttttattttgtgtaattttacatttcatgaaatgatgtcagtttcaaagagaaagtggagaggacctaacatatgtctctacctagaaaggatggtttcattaaagaatgtggattt

SEQ ID NO: 65379 - DNA, 4380 bp, Homo sapiens
ttttttttttttacttgaaaaaattcacatttatttactgtcaaaccgtgttaaactttacactggatattagtgatgggctcattattaacaggtttacacaaagggatgaaaaaaaagcagaattttgctgaaacaatttacatttcattagaactttatcataaaataaattaattactaaatataggcagaaggaatatggaagagtaatatttatgttttattttatttttttaaaaaagaataggcaccttttgttcactagaaagtttgtgagaagtgcccagtgccctctttgccctctgttcaagaataaacaggggtgacacacaatcttttctagatttcatcacttttgtgcaaggcatgacataactggcttcaaagagtttgtttctccccataaaacacgttcttttggcaataagaaatttaaatgtaagtaataaagactaactttgtcaaagcagaacactgtatacagtggaaaagaagtgaaaatgagtagaacttaccatgacaaagtgtaagaaaaaacatttcataacatgtgcaaccaagagcttttcacaatattttcttcactctttaaaattattttaatgacaattatatttcagttggacacaaatgtatttattttaccctagcaatagaacaaaatataatttctttagccatttttcatgagaatagttcattgtacagttgaggaaacatatgaaataaggcctgtggcttgattgctagtggttaagcatgttttcaatctttgccttaatgtaaaagatttgcagtgaactgcaaactgatgcaggaatatctctcctgcttttccaagtcttgtcaggaataggtaagggtacaggtaaatttgtcccacagggattttaaagcctacgtcttggtatataatacaatggcagggccctacaaaaatggtgcagccatatttacaaatttagttcacagactgctgcagtaaaatggctggaaagttttgttttgccttgtttccacaatttcctcctaaacagcagcagaatccttaaaataccctggctggcatctcttttctttgtaacaaataattcactttagtatactctgtgtatatacaaagtttttgtatgttttataaaaattcacagaactgcaaggttcagtcatcttttttacaccagagaaccacaggtcaagagtcatctcttcaagcagagtttgagggagctgcgtcaggcccaatggtgtctttatttattaaatactcgcatgtggccccttggaattccttagctgtatgattaaagacttgtaaccagctgcatttgtccttctctaacatctccttctggaatacacccttctttgttaatggggattatataaccatcactattgcccctgctgatctggtagcacatctgaagctgatggccagctccaagatttggcatgcttttatagtaaatgtcctcattctcactcctcctggagggagagaggtcttcttcccatgtcagggctgctctccggatagggagagtctcctaagattgggcatgcttgtataaagagagtctctgttgggggactgtaggtgatcttcagcctctgctgtcagttgggagacatagctgtcagttccctcggacttcactttcttctggggttggtacagaagggagtgagtccgctgaggaataagtggtgcctcgagttcctttgtgatggagctcccagcccctgggttgtcgctgtgcattaaagatgaagcatctgccacaatagcatcatcttcactgctgctacctccaatcacaggtttgactggtagcgtgagctcgaggttgtgagtcttgctgctgccccgtaagttgttgtgcactaattctgaaatgatcattttctcaaaagcagtatcattcagacttagtccacagtccacaacttgcacgctgtcattatagtcacccttgtgcagcgagtagctgttgttaaaattaccatttagcggtagagtatccatggcacttgtatccctggcattgttcagtgaatgtcctggtgagttaaatacaggagctgaaggggcattacatacaactgtttcagcgagcaatgtgttataggggttgttagtgccgtggggtcgaagaagagggtttgttagtaggtaattgccagtcattccttgattaagtgttgaagtgctattgatgtcacctgagataaaagaagattctgattgttttctcacagtatcattccacattcttcttatacgactctgtgtgccagaggaatagcgagcactggttctggtggttgatgccttcactgaactgtggggactctcagttgggaggcctccacagcagtatgagtgtctgaagcacttgccatattcttttcgtactttcttttggagagcacagtgaaagatgaaaatgaacactccctggaaagcattaaatatagtgaagagatatgccatcacaatagtctcctcattaataaaaagcaacccaaaggaccaggtgaggccaagaagacacagaagagcgaaagcgccaagcacccaagacttaatgttttccaacctgctagaatctggtttcaaagtgtttgaatgcttcaccattttgcacaatgtgatcaccaagaagataatatttagcagaataatgaaggtaacaggtccaatgaagctccatataaagtagttatcaacatgaagccagcaagctttttctgttccatagctcttatagtcaatagcagctgaaactccaaccactgtggcaggaaacaagtaaccagcaacatagtaatattttttccttgaatattcactttcaaaaacttcaactaacattaggtagagctgcacaccttctaggcacatccaagcaaaagctgccaaaaagaaaaagtgtagaagtcctgcaaatattgggcatgcaatcgcatattttgtcttatcaatgcctattaggaaaataaattcagcaatgaaaaggttgatacaaaggttcttgtgaatagtatttcggtcactctgtaggccacggaaaaagcagaaggtgaagatgcagatagccaggcaaacaagggaaatgacaattcccacccaggtgatgactgtaagaagtaattcatgaacgccatctttatatgcaatttccctgtgggccatgagaattgcaaaattggttaggtggctgcatgcacacgttgttcgagttttattagtgtcaaccagcttgcagccctgggtagaccaatatcccatcatagttctctctgagtagttccagaaggagcagtttgcattgaaataattgtcaggatcaatgtgtggcagggtaaaaagcacaggatcagtcaggtatactcggctggactctttattgattgaaactgaaatgacgtgagagttcactgcaatggtgctattacgaccaataaaatcagcacccagtttaatggttgcattttctgtactaaggaactgtcccaggctccggtaaatgatgaacaccaactttgcaagcccattcctgctgttctgtttgacggtatttgcggacagttggattgagctgcctgctcctttgatgcccagaggaaatttaaagtcttggatctgtccttctgtactgagtacggcaacttccaggacaatattttctgtgggcattgagacccttgttggttctaaaagattgtcagctaggacaaaagctccttcttccaatgtatcgagtaacattgttgcagtatgtgcttgttcagaagaattcatatgtttccatgattccaaagcttcaggtctcagaaggttgtccactgtgtcaacaattgccttaaggtaagccctgcatgtcttctctcgtttttggagcttgttataactccgtccagctgaatctttttcactaggtttcagttcctgcagctgtgcatcaaggatgtccaccaactgctccatcaatctcactgaagaacttacatccccagcaaacactggccctttggtatgtttagccagttcattggcaagactagcagcattttctccgcttctgatcttctgagccagctgattcacccagtgtgaggtacagttgctaagatcggggcccttagggttccatgttccagtggaaatcatgcagagatatgaggcagttcctcttgttcccttagggcatggtcgttcaaccatcattcccctttgtgtctgaggccactttatccccttggagtctaatgcttcacagaatctctctggcaggggaaaaatatttgttataggtggaattttggttgtagaaactgctggaggtggttttgtccctttgcttccttcct

SEQ ID NO: 65380 - DNA, 1224 bp, Homo sapiens
tttttttcagatttaaaccgtctttatttctacagcaacatcttgaaaatagagagcagccgcctcacccgcaacagggggagcccctcctgccaccaggggaccgtcgccgcccctcgcgagaagagggacgagggtgccgaagggccggcgagtgcttagtgttcttggctctggggtctggggaggccaggccactgagtctatggtggagactccagccggcacctcctgctggcccgaacctagggaagagggccctgctggaaggaataaataagggatggagctggagtgggcaggcccagcctccagggctcaggctgagatgacaagggagaaggttaccctgagattgaacagaaaagacaggggctgtgggagagacaggcgggacaagcagcaggcccatgcgcagggctggggtgaggggggtgtgccaggtgggcgctctggtgactggctgccccttcagcattagcccaccagggagcttcgtcgggagaggtccatggagctggagctgagagtgcggctgtcagagagacctgtgcctccaggctgggtcggctcttccacgctcttgttgaggaagttgagggaactggcccgcttcatcctggggttagggggctcctggggggtgcccccctgcagcttctttaccagcatctcactgctgcgcctcagggcatcccggagtttcccaaaggacccgctgcgcctcaaggagccactgccatccccattccactcagctgtaggtcccacgtcctcgaggtcagactcagaccgaggcccggcacccccagccatgtctcggctgctgcggcggtctccccgcctgccactgccatctttcagcagttctaccaccttggtctggcttgcggggtccaaaccctgagggaggggcaggggcatcaggcagtgaatggaccacacccagggccacacaggtgtctgcccaccccctcctgcatggagccccacctgcttgcggttacggctggcacagtcctctagtgtgtgcgcggcttccagcttgccctggcgccggtatagggcccccaagctgcgcagggtggtgttgactgtggggctgtggatgggacagtctcaaactccatgttcccccagacccagggcccatcctggcacccagcccacagtgggccctgaggaagcatggacctccggggtagccagaatccattccttccc

SEQ ID NO: 65381 - DNA, 2647 bp, Homo sapiens
atgaatgctgtgggaagtcctgaggggcaggagctgcacaagctggggagtggagcctgggacaaccccgcctacagtggtcccccttccccacacgggacgctgagagtctgcaccatctccagcacggggcctctccagccccaacccaagaagcctgaagatgaaccccaggagacggcatacaggacccaggtgtccagctgctgcctccatatctgtcaaggcatcagaggactttggggaacaaccctgactgagaacacagctgagaaccgggaactttatatcaagaccaccctgagggagctgttggtatatattgtgttcctggtggacatctgtctactgacctatggaatgacaagctccagtgcttattactacaccaaagtgatgtctgagctcttcttacatactccatcagacactggagtctcctttcaggccatcagcagcatggcggacttctgggattttgcccagggcccactactggacagtttgtattggaccaaatggtacaacaaccagagcctgggccatggctcccactccttcatctactatgagaacatgctgctgggggttccgaggctgcggcagctaaaggtccgcaatgactcctgtgtggtgcatgaagacttccgggaggacattctgagctgctatgatgtctactctccagacaaagaagaacaactcccctttgggcccttcaatggcacagcgtggacataccactcgcaggatgagttggggggcttctcccactggggcaggctcacaagctacagcggaggtggctactacctggaccttccaggatcccgacagggtagtgcagaggctctccgggcccttcaggaggggctgtggctggacaggggcactcgagtggtgttcatcgacttctcagtctacaatgccaatatcaatcttttctgtgtcctgaggctggtggtggagtttccagctaacaggaggtgccatcccatcctggcaaatccgcacagtcaagctgatccgctatgtcagcaactgggacttctttatcgttggctgtgaggtcatcttctgcgtcttcatcttctactatgtggtggaagagatcctggagctccacattcaccggcttcgctacctcagcagcatctggaacatactggacctggtggtcatcttgctctccattgtggctgtgggcttccacatattccgaaccctcgaggtgaatcggctcatggggaagctcctgcagcagccaaacacgtatgcagactttgagttcctcgccttctggcagacacagtacaacaacatgaatgctgtcaacctcttcttcgcctggatcaagatattcaagtacatcagcttcaacaaaaccatgacccagctctcctccacgctggcccgctgtgccaaggacatcctgggcttcgccgtcatgttcttcattgttttcttcgcctatgcccaactcggctacctgcttttcgggacccaagtggaaaactttagcactttcatcaagtgcattttcactcagttccggataatcctcggggactttgactacaatgctatcgacaatgccaaccgcatcctggggccctgccctactttgtcaccctatgtcttcttcgtcttcttcgtgctcctggaacatgttcctgggccatcatcaatgacaacaatattcagaggtcaaggaggagctggctggacaagaaggatgagctgcaactttctgacctcctgaaacagggctacaacaagaccctactaagactgcgtctgaggaaggagagggtttcggatgtgcagaaggtcctgcagggtggggagcaggagatccagtttgaggatttcacccaacaccttaagggaactgggacacgcagagcatgaaatcactgagctcacggccaccttcaccaagtttgacagagatgggaatcgtattctggatgagaaggaacaggaaaaaatgcgacaggacctggaggaagagagggtggccctcaacactgagattgagaaactaggccgatctattgtgagcagcccacaaggcaaatcgggtccagaggctgccagagcaggaggctgggtttcaggagaagaattctacatgctcacaaggagagttctgcagctggagactgtcctggaaggagtagtgtcccagattgatgctgtaggctcaaagctgaaaatgctggagaggaaggggtggctggctccctccccaggcgtgaaggaacaagctatttggaagcacccgcagccagccccagctgtgaccccagacccctgggggagtccagggtgggcaggagagtgaggttccctataaaagagaagaggaagccttagaggagaggagactctcccgtggtgagattccaacgttgcagaggagttaagtgtgaggcactcccggagcaaagtctatgaaggatcttctgcaagaggctgcctcctggtccactgaacctggaaactgagtgggctttaaccaggagataaaaatggagcctgaagggaatcaggcaaggaaatgaactcaggattcagagatctttgaattaatatgtggtgggttctgacattattcttccataagaccatgtgggtttccatg

SEQ ID NO: 65382 - DNA, 2354 bp, Homo sapiens
attttgtatttgcatatgacaccaaagctgcaaaacaggaactaagcatggtaataatgctggtcccaaggtgggccaggtatgaacacttccttctaggcctgctgccaggaggagagctggcttattgatgggagcattgtatgctgctgaaacctccttacttgggggttctccccagagacagagaagaaaacctaaggcaggcattagtcttggaaaccagtaccagctagtatctcatgccaatgaaaagcatccaggacaagcatgtttgcaaaaaacaagcatgtcctgtctctttcacatctctggcacatccatgatcaccctgagtcagacccaaataaggggcagcagagacagccagatgaagcagcaatttgagggtagtaactggtgatgacaaagcccttctcaattttactttattaacttagccaaggcttagttcctgttttgcagcctgatggaaatttaatagatcatttgaagtatgtaatcacctgacatgctaagtgtctgtgtgtgccggagacacagaatggcaacctgaccccaccctgtccttgtctaggaaacacgctggagaagaaaggtggcaaggagtttgtggaagctgtcctggaactccggaaaaagaacgggcccttgggaagtagctggaggtgaggtgggaaagccaccgtgcttatctggttgtgacacatgcagtattaggaaagccattttgtgagagggcttagaattcagaggtgtgtggcagcacagccgcatcttcaagatggaggccaaggacagcctgtagctttacatcttagagtttcaccacatgcaggttgtctgggaaaatcacctttgcatttttttttattacttaaaatagctcctatatgtttgatgtctagatcacaaattttaagaaattataggagctgagtttggtacatctaagagctgagagtgagtgatactgagccatctgcaaaactgctggtgagagatacaaattaaaaatcttcagccatctgtgtgtgtaagaggaaacatataaatacacatttctcatttgccaattacaccttccctggtataaggggaagaaaacgacttggcatctgatgtggggagaattattgctaagacctggaggcagggtacttcttactgcttcaggcctgaatttaggtggtcatttggggtgtgcaggacagagcacctcctaaggacctgagagtccagtcagtggggaggcccagctcccccaccaactgtgtgaggacagatcacccacttcctcacttggggctctggttttctcttcttactacccgattccaatgcctattgtgtcttttaaatcctctgttttaaaaatgaatcttaagctctctcggagggtccaccaggccgtgcacctctattcccagtgacaaatgacaccccttccaggctagtctcaggatccagtaggattccctttgctgatctgtgcctttgacctctgctctgccacttctgttttacctgcaaggggcatgacatacagggtagtaattatgaagttctcccaggcagttccaccaaagtcccacattgtacaagggaaggcatacacagttttaactacctagccaggggcagctggcctttccccaggccctttaaaacacctgtttgaccagcctgtgggtcctttcccatcggggttccagcttgagtcctgctggtagcccttggcacaaggcctggtaggcagcctggtgctgccatgtaccaaactctgctggggaaacctcagccacagcagatgcaaacccattaggtatagcatggttcaagatatttttgcttgtttcaataacacttttgttcttgattttaagggctattttagaaactgctttaaaatatttttgaaagtataaagaggtgaataaaacatactcctgttccactgtgcaaagatagtcactgttaatgtttctttccagtcgttttctatgcatagtttagccatgacttctcatggggacaaacccactggtttaattcaacccccaatgtcaggtttttataggtcagcccagagttctcaagcccagtcacaaagcagagccaggactcaaattcacaccctgtgactgagctgtttccactgtaccatggagacactacccacaaatcgctccttctccagtatctatgacacgaccataacaaaccataccccttggacagatattccttaaaaaaaaaaaaagtttcagaaatagccaaccaaatacaaaaagtttggatgttttactttagcagtggtgtggagactctggtgtgctcttgtatagaagcgt

SEQ ID NO: 65383 - DNA, 1030 bp, Homo sapiens
aatctgctgaaaacgcacaagtttattgttgggacaagatgaagattcccttcatagtgttccagttgcacaaatgggtaactatcaggaatatctgaagacattggcttctccactgcgagagattgatccagaccaacccaaaagactgcatacttttggcaatccgtttaaacaagataagaagggaatgatgattgatgaagcagatgagtttgtagcagggccacaaaacaaagtgaaacgtccaggggaacccaacagtcctatgtcatctaagagaaggcggagtatgtccctgctgttgaggaaaccacaaacaccacctactgtaactaaccatgtgggcggaaagggaccaccctcagcctcgtggttcccatcttatccaaacctcataaaacccacccttgtacatacagatgctactatcattcacgatggccatgaggagaagatggaaaatggtcagatcacacctgatggcttcctgtcaaaatctgctccatcagagcttataaatatgacaggagatcttatgccacccaaccaagtggattctctgtctgacgacttcacaagtctcagcaaagatgggctgattcaaaaacctggtagtaacgcatttgtaggaggagccaaaaactgcagtctctccgtagatgaccaaaaagacccagtagcatctactttgggagctatgccaaatacattacaaatcactcctgctatggcacaaggaatcaatgctgatataaaacatcaattaatgaaggaagttcgaaagtttggtcgaagtaagtagggaaagaacatctatcaataatgcaccaggagggtcctctcattctgtgattcactatagattcaagctatcccttgaggtacactgggggcaatattgggctttcacataatttaaggcagttcctcttgttttaactaaaaaggtacagcctatattttcctgttttttccccttatttcttggaatgtttccttttgctgccgcaacaagttatcaaaagat

SEQ ID NO: 65384 - DNA, 7788 bp, Homo sapiens
gctttcctttctaaagtagaagaggatgattatccctctgaagaactactagaggatgaaaacgctataaatgcaaaacggtctaaagaaaaaaaccctgggaatcagggcaggcagtttgatgttaatctgcaagtccctgacagagcagttttagggaccattcatccagatccagaaattgaagaaagcaagcaagaaactagtatgattttggatagtgaaaaaacaagtgagactgctgccaaaggggtcaacacaggaggcagggaaccaaatacaatggtggaaaaagaacgccctctggcagataagaaagcacagagaccatttgaacgaagtgacttttctgacagcataaaaattcagactccagaattaggtgaagtgtttcagaataaagattctgattatctgaagaacgacaaccctgaggaacatctgaagacctcagggcttgcaggggagcctgagggagaactctcaaaagaggaccatgagaacacagagaagtacatgggcacagaaagccaggggtctgctgctgcagaacctgaagatgactcgttccactggactccacatacaagtgtagagccagggcatagtgacaagagggaggacttacttatcataagcagcttctttaaagaacaacagtctttgcagcggttccagaagtactttaatgtccatgagctggaagccttgctacaagaaatgtcatcaaaactgaagtcagcgcagcaggagagcctgccctataatatggaaaaagtcctagataaggtcttccgtgcttctgagtcacaaattctgagcatagcagaaaaaatgcttgatactcgtgtggctgaaaatagagatctgggaatgaacgaaaataacatatttgaagaggctgcagtgcttgatgacattcaagacctcatctattttgtcaggtacaagcactccacagcagaggagacagccacactggtgatggcaccacctctagaggaaggcttgggtggagcaatggaagagatgcaaccactgcatgaagataatttctcacgagagaagacagcagaacttaatgtgcaggttcctgaagaacccacccacttggaccaacgtgtgattggggacactcatgcctcagaagtgtcacagaagccaaatactgagaaagacctggacccagggccagttacaacagaagacactcctatggatgctattgatgcaaacaagcaaccagagacagccgccgaagagccggcaagtgtcacacctttggaaaacgcaatccttctaatatattcattcatgttttatttaactaagtcgctagttgctacattgcctgatgatgttcagcctgggcctgatttttatggactgccatggaaacctgtatttatcactgccttcttgggaattgcttcgtttgccattttcttatggagaactgtccttgttgtgaaggatagagtatatcaagtcacggaacagcaaatttctgagaagttgaagactatcatgaaagaaaatacagaacttgtacaaaaattgtcaaattatgaacagaagatcaaggaatcaaagaaacatgttcaggaaaccaggaaacaaaatatgattctctctgatgaagcaattaaatataaggataaaatcaagacacttgaaaaaaatcaggaaattctggatgacacagctaaaaatcttcgtgttatgctagaatctgagagagaacagaatgtcaagaatcaggacttgatatcagaaaacaagaaatctatagagaagttaaaggatgttatttcaatgaatgcctcagaattttcagaggttcagattgcacttaatgaagctaagcttagtgaagagaaggtgaagtctgaatgccatcgggttcaagaagaaaatgctaggcttaagaagaaaaaagagcagttgcagcaggaaatcgaagactggagtaaattacatgctgagctcagtgagcaaatcaaatcatttgagaagtctcagaaagatttggaagtagctcttactcacaaggatgataatattaatgctttgactaactgcattacacagttgaatctgttagagtgtgaatctgaatctgagggtcaaaataaaggtggaaatgattcagatgaattagcaaatggagaagtgggaggtgaccggaatgagaagatgaaaaatcaaattaagcagatgatggatgtctctcggacacagactgcaatatcggtagttgaagaggatctaaagcttttacagcttaagctcaagagcctccgtgtccactaaatgtaaacctggaagaccaggtaaagaaattggaagatgaccgcaactcactacaagctgccaaagctggactggaagatgaatgcaaaaccttgaggcagaaagtggagattctgaatgagctctatcagcagaaggagatggctttgcaaaagaaactgagtcaagaagagtatgaacggcaagaaagagagcacaggctgtcagctgcagatgaaaaggcagtttcggctgcagaggaagtaaaaacttacaagcggagaattgaagaaatggaggatgaattacagaagacagagcggtcatttaaaaaccagatcgctacccatgagaagaaagctcatgaaaactggctcaaagctcgtgctgcagaaagagctatagctgaagagaaaagggaagctgccaatttaagacacaaattattagatttaacacaaaagatggcaatgctgcaagaagaacctgtgattgtaaaaccaatgccaggaaaaccaaatacacaaaaccctccacggagaggtcctctgagccagaatgggtcttttggcccatcccctgtgagtggtggagaatgctcccctccattgacagtggagccacccgtgagacctctctctgctactctcaatcgaagagatatgcctagaagtgaatttggatcattggacgggcctctacctcatcctcgatggtcagctgaggcatctgggaaaccctctccttctgatccaggatctggtacagctaccatgatgaacagcagctcaagaggctcttcccctaccagggtactcgatgaaggcaaggttaatatggctccaaaagggccccctcctttcccaggagtccctctcatgagcacccccatgggaggccctgtaccaccacccattcgatatggaccaccacctcagctctgcggaccttttgggcctcggccacttcctccaccctttggccctggtatgcgtccaccactaggcttaagagaatttgcaccaggcgttccaccaggaagacgggacctgcctctccaccctcggggatttttacctggacacgcaccatttagacctttaggttcacttggcccaagagagtactttattcctggtacccgattaccacccccaacccatggtccccaggaatacccaccaccacctgctgtaagagacttactgccgtcaggctctagagatgagcctccacctgcctctcagagcactagccaggactgttcacaggctttaaaacagagcccataaaactatgacctctgaggtttcattggaaagaaagtgtactgtgcattatccattacagtaaaggatttcattggcttcaaaatccaaaagtttattttaaaaggtttgttgttagaactaagctgccttggcagtgtgcatttttgagccaaacaattcaaaaatgtcatttcttccctaaataaaaatcaccttttaagctagagcgtccttacaactttgaaatgtgcaataaagaatacctgtgttttagctaatgtagcatatgtaattgcaaaatgatttagaatgtcatgaaaaatatgaacatttcctgtggaaatgctttaagaacatgtatttccattatcctatttttagtgtacaccagctgaatacggagcaatggtgtttataagcgtttttttaaactatctggtcacaaagactgttacgctaaaaatgtttactaaaagatcactaaactatctcccctcttgctgaagttctttgtagtaatagctcataaaaatttgtttattaatatttcccaagtgtctgttgactcattggactgttatgaggcttgtgccatttggggaacatgtaaactcaggctcccagaactgaagatggtggctggtggcacacttccggctgctcctccgtcacctgtgaactctacaagtgacgtctttttatttcaaagaagttttatttccccacttgtaatagcattccacatgcctttcctttacgatcctcattgtcctatttgagaatggttttcctgagagtgagtttaccattagtagccaagagttgtttgaccctgatgttcccattgtttttacccattccctgtagaaaaagggtgccacaacagaaaaatgaaaatgatgtgtcatggccgtaaaagtatagaaatctttaaaaattttaaaatgtacagtcccttatctatctttcccattccttgccactgatttttgaggaatataataaaaagattggaagagtataatgccatgagaaagaatgatttaggactgtgagggttataacatgccctaggtcagcaaccaagggttgaaatcagttctgttttagggggaaatggggggggcgacagatattattccaaaattaatattaattaatatttaaacgttggtgtttttatttaaaaatcagtaactaaccatctggaattgcaccatacttaaagtcttatccattactacactgtctttaaaacaatgtttctttaaatactctacaacgtttctaagaacgaacttcagacattttaattacagtaataatagcactccttttaaggagtttcagatccacactaaaactaaaatcataaaaggctgatacttttgtttgctgctaggctatattcttccattctttgaagtcctatgatgtaatatttttgaaacctagtgtatgtcttgtcactgttgtgatatttaatcgattaagaataccttgtaaaaaggagcaaaagcttcaatgtgaaacaattttctctctttatactaaacaactgaagatagatagtttagaaagataaggacctttgaaagaagacaactctgtcaaagttcataaggaatataaaaattcttcaggaaaagagaattcaatctatatgtcctcccgtttaatatcaagaatagaagaaattaagaggaaaactccacagaagagcataggccacttttagccatgtaaaaataagattaagtcacaaatacaacttttgaatttacctgtcaatatctctttaggacacaaaacaatgctgaagttaatataatttctaattttaaatgtcatttaagtgtagattatgccatctaggaaggtaagtaggaaaggtaaattaaatctatttttaaaattcaaaatattagagtatttttcccctctaaagccttttttggtgattattctgtatctgacataattgagaaactggtaagctgtaaagattccagtgtagcttctctgagaagttgtgagccagtccataactgcttcctcacatccatctgatttgcacccatttcctgcagcaaaccccccaaagcagggtgccccaatatgccagatgggccataggggagtatcatcccctcagcccaaatcaccttttcccatcctcctaaagtttccatcctattttgggaagtcatctccaactaattgtgtctggatttagttgctaaaattgtcttatttatttatgaagcagcaatattcagcctgaaagcatttctgccatagttgttgtagttatatcgccaatggctgatttttttcattggaaagtaaatttaagtaattcgtgggatgtggtatattctgtgtcaacttcaagataatcactcattttctcgttatattcaggtctgaattaaagttaagttaatcacccagtgttcaatttaagcttctttaatgttgatgaaaggtatttgtagttcatataaactatacttatgtgaaggatagcagatgcttcatataaattatcattttgatatacatatcttatggtttatgagaaaagagaaaaaataatacatcggttttgctacactttaatgggttttttttttaagggattttttttcaggtcttgtcagcaacatcaaacaaaaggtactgagtactccacagggtacagagtgctgccaagcaccttagaaaaattacatgacacggagaaaatgcgcctcttgctccttgaagagcttacagtctagggatttgacaactcacagtcttaggaactgggcaaagtaaggcaaattcttcatcccctagagctattgtggactgaatcattttagaatttggaattaatccaatcaagatgagagacaagactaaatttggctgagaattcattcaggctcgcatagtttttattaacatccgtctagtaaacagaatggacctaacagacaactgaaagtaaagactagatctcttgaagtgcaagggctacaacaacttaattgtggttacttattttaaaaagcaaacatactgaatggtatgactagggtgattacactagtttaaaaataggccaggtactgacactgcattcccctcatgcattgctcatttaaaatagtgaatattaaaatatgtgggctttacatctaacccacagaaagcccaccgcaaatgttctgtgtatcaaatatccacctcatgtgtactatgaaagttttatttatgccccattaagtcaaaagtaaattatagtaagctaatgacctgcatattttcatatggatgaatgtcagtatatctaaataggaaataaatggcgatcctatctacctatataaaaaaaatagaatatctttccagattttgcatactcctcactgtaagaagaggtatgcaggttttaaggtttcacaatcagttgtcagaaaaacagcagttatgcctgcagtatctcgttagcatctgactcaattatttttagattacattgtttagaagacattgtaaacccatctaaaactttgtaattattttgagatggttccaatgttaaccctagaatcatcatcagaaagagtaacaatgtgatgtagaagaacagctaatcgacatgactaaaaatatgctcattttcagaaaaacaatctggtcatctggaaacaatcacagctacaacctagggaacactcccatgtgggatactgatctggccaaggcacactttctaagcaggaaaactatcagatcagggtgaatttaggccacttcagaggtgctgcctataaacatccagacagaccttcttaggcagcagaactggtcccattcctctcaaagcagtttgacactaccctacccacatcaacccaaagcttgacgttaagtcaaaagagcatattggagcaaaagtgaacagatgtgtaaactctagcacattcttattgctgtattaagtctgaagatgagcacatcctacccacaacagtattgttccaggaagcagggtaggagtagtggtaaattagaaaatagactattaattgcacaattaatagaaaagtaaaaacatgtttcaaaatctacaataaacctgtatcccaaggagtcctatacgtcagtgtgatgtgctggactctgaattctgtggtacagctttgcaatttgctccgtccggcctagtggt

SEQ ID NO: 65385 - DNA, 3959 bp, Homo sapiens
aggagcagtccgaggggaacgtgggttgaacgttgcaactagggtggagatcaagctggaacaggagttccgatcgacccggtaccaagaaggggagtgcccgcggcagggttcattgaaaaaatccttagtgatattgacatgtctcaagtgacataaattagccaatgactcggaatgatggattctccgaagattggaaatggtttgccagtgattggaccagggactgatatagggatatcttcactccacatggtggggtatttgggaaaaaattttgattcagctaaagttccatcagatgagtattgccctgcttgtaaagagaagggaaagttaaaagccttaaagacttaccgaattagttttcaagaatctatctttttgtgtgaggatctgcagtgcatctatcctttgggctctaaatcacttaataacctaatttctcctgatttggaagaatgtcacactccacataagcctcagaaaaggaagagcttagaaagcagctataaggattcacttcttttagcaaattccaaaaagactagaaattatattgctattgacggtggaaaagttttgaacagcaaacataatggagaagtatatgacgaaacctcgtcaaacttacctgatagtagtggtcaacagaatccaattaggacagctgattccttggagcggaatgagattttggaagctgatactgttgacatggctactacaaaagatcctgctacagttgatgtctctggaactggcagaccttcccctcaaaatgaaggatgtacatctaaactggaaatgccactggagagcaaatgtacatcatttccccaggctttatgtgtccagtggaaaaatgcttatgctctctgttggttagactgtatcctgtcagctttggtgcactcggaagagttaaagaacaccgtgactggactgtgctcgaaggaggaatctatattctggcggttgcttacaaaatataatcaagcaaatacacttctatataccagtcaattgagtggtgttaaagatggagattgtaaaaaacttacctcagaaatatttgcagagatagagacctgtctgaatgaagttagagatgaaatttttattagccttcagccccagcttagatgcacattaggtgatatggaaagccctgtgtttgcatttcccctgctcttaaaactagaaacccacattgaaaagctcttcctatattctttttcttgggactttgaatgttcgcagtgtggacaccaatatcaaaacaggcatatgaagagtctggtcacctttacaaatgtcatccctgagtggcacccacttaatgctgcccattttggcccatgtaacaattgcaacagtaaatcacaaataagaaaaatggtattagaaaaagtatctcccatattcatgttgcactttgtagaaggcttaccacagaatgacttgcagcactatgcatttcattttgaaggctgtctttatcagataacttctgtaattcagtatcgagcaaataatcattttataacatggattttagatgctgatggaagttggctggaatgtgatgacttaaaaggcccatgttctgaaaggcacaagaaatttgaagttcctgcttcagagatacatattgttatttgggaaagaaaaatatcccaagtgacagataaagaagctgcctgccttccacttaaaaagactaatgaccaacacgctctcagtaatgagaaaccagtatctttaacatcgtgttctgtgggtgatgctgcctcagctgaaacagcctcagtaactcaccctaaagatatatcagttgcccctcgtactctttcacaggacacagctgtaactcatggagatcatttactttcaggtccaaaaggtttggttgacaatattttacctctgacacttgaagaaactatccagaaaacagcctcagtttcacagttaaattctgaagctttcctgtttagaaaataaacctgtagcagaaaatacaggaattctcaaaaccaatactttgctatcacaagaatcactaatggcttcttcagtatcagctccatgtaatgaaaagcttattcaagaccaatttgtggacataagttttccatcccaagttgtaaatacaaacatgcagtcagtacagctgaatacagaagatactgtaaatactaaatctgtgaataatactgatgctactggtcttatacagggagtgaagtcagtagaaattgagaaggacgctcagttaaaacaattccttacaccaaaaactgaacaattaaaaccagaacgtgtcacatctcaggtatctaatttgaagaaaaaagaaactacagcagattctcaaaccacaacatctaagtcattacagaatcagtctctgaaagaaaatcagaagaagccatttgtgggaagttgggttaaaggcttaataagcaggggtgcttcttttatgccactctgtgtttcagctcataatagaaacactataactgatttacaaccttcagttaaaggggtaaataattttggtggctttaaaactaaaggtataaaccagaaggccagccacgtatccaagaaagctcgtaagagtgcaagtaagcctcctcccatcagtaagccaccagcaggccctccatcgtctaatggcacagctgcccacccacatgctcatgctgcttcagaagttttggaaaagtctggaagcacctcatgtggagctcaactcaaccacagttcttatgggaatggtatttcttcagcaaaccatgaagacttggtggaaggtcagattcataaacttcgtctaaaacttcgtaaaaagctaaaggcagaaaagaagaaattagctgctcttatgtcttccccgcaaagcagaacagttcgaagtgaaaatctagaacaggtgccccaggatgggtctccaaatgattgtgaatcaatagaggacttgttaaatgagctaccatatccaattgatattgccaatgagtctgcatgcaccactgttcctggtgtttccctgtacagtagtcaaactcatgaagaaattttagcggaattattgtctcctacacctgtttcaacagagctgtcagaaaatggggaaggtgactttaggtatttgggaatgggagatagtcatatcccaccaccagtaccaagtgaattcaatgatgtttcccagaacacacatctgagacaggaccataattattgtagccccaccaagaaaaatccatgtgaagttcagccagactctctgacaaataatgcctgcgttagaacattaaacttggagagtccgatgaagactgatattttcgatgagtttttttcctcctcagcattaaatgctttagcaaatgacacattagacctacctcatttcgatgaatatctgtttgagaattattgaattaatgcttgttaacttttttcatataatatttattattattagaagaacttacaatgtgttcaggtagtgtttatacactggacttgtgtaattacttgtgtaataaccatgaacaaaatgcaaggtttaacctttggttctgcccatgaagcatgtaatctttcttacacattaaaatcactgaatgtgttctcctttttggtttcattttgttcttgtgagagtatgaggatttcaaaatgttaaagatgaaaagtggcgtctagtttctgacagtttgtacagttggatgcattacatttttagatttgaagttttggttatgttagtgttatgagtgatctttgtggggttttcttcccctggaaacctgttgctcgtggcgctttgcccacggtgcccgagttcttgtcctgtgtccagatatgcagacaaatgaagggtgaagaagaagaagaggagctttatttagtgttagaacagctcagaaggagacccc

SEQ ID NO: 65386 - DNA, 1404 bp, Homo sapiens
ggaattccctgtacagagatgggcaattttgacaatgctaatgtcactggagaaatagaatttgccattcattattgcttcaaaacccattctttagaaatatgcatcaaggcctgtaagaaccttgcctatggagaagaaaagaagaaaaagtgcaatccgtatgtgaagacctacctgttgcccgacagatcctcccagggaaagcgcaagactggagtccaaaggaacaccgtggacccgacctttcaggagaccttgaagtatcaggtggcccctgcccagctggtgacccggcagctgcaggtctcggtgtggcatctgggcacgctggcccggagagtgtttcttggagaagtgatcattcctctggccacgtgggactttgaagacagcacaacacagtccttccgctggcatccgctccgggccaaggcggataaatacgaagacagcgttcctcagagtaatggagagctcacagtccgggctaagctggttctcccttcacggaccagaaaactccaagaggctcaagaagggacagatcagccatcacttcatggtcaactttgtttggtagtgctaggagccaagaatttacctgtgcggccagatggcaccttgaactcatttgttaagggctgtctcactctgccagaccaacaaaaactgagactgaagtcgccagtcctgaggaagcaggcttgcccccagtggaaacactcatttgtcttcagtggcgtaaccccagctcagctgaggcagtcgagcttggagttaactgtctgggatcaggccctctttggaatgaacgaccgcttgcttggaggaacccagacttggttcaaagggagacacagctgttggcggggatgcatgctcacaatcgaagctccagtggcagaaagtcctttccagccccaatctatggacagacatgactcttgtcctgcactgacatgaaggcctcaaggttccaggttgcagcaggcgtgaggcactgtgcgtctgcagaggggctacgaaccaggtgcagggtcccagctggagacccctttgaccttgagcagtctccatctgcggccctgtcccatggcttaaccgcctattggtatctgtgtatatttacgttaaacacaattatgttacctaagcctctggtgggttatctcctctttgagatgtagaaaatggccagattttaataaacgttgttacccatgtcctccagtgcttatcaaatgaggtaaaaggccggctggtgggcatggtgactcccccctgtgatcccagcaactttgggaggctgcagtggatggcttgagctcagaagtgtgagatcagcccaggcaacatagataccctgtctacaaaaaaaccaaaaaattatccaggggtggg

SEQ ID NO: 65387 - DNA, 1021 bp, Homo sapiens
ttttttttttttcaaacgcatgatgagctttgttttgtgagtaaaacataatacgcaaaagaagtatgcttgtaggggggtcttgggtcgtcatttcttttctgtttctggtttgtttttggagagagtctggctttgtcgcccaggctggagtgcagtggcgcgatcacggatggctgcagctcctggggcttcgcttcctgattcggttgtcctattttcagttcactcctcaggcgcggaggaaatggtggaaggcccagctctgggtgatcctgggcgctgcccccgttacccgttaccaggaagaatggtgagcctggcaggtcacagcacgagcgtgcacaggcccagcagggccatcagcagcagcgggagctggggcacgggcgtggtgccagaggcatacagacaggtggtgtaagcgtcaatgtccacctggcgcatggcacacacgtgctgcatgctgcaggcctcgtcgcagaccccagcagagtagctgactgagttatagacgtagtagcgctgcagtgtgctctggtcgccagcgatgcggtccagcactgtgtgcatggagtgggcgctggcgtccggcaccccataggcctcggtcagctggtactcgagctcccagcgcggcgtcccctgagcattcgcctggctcaggttcatgaagtaggtcaccatgtccttcaggctcagtgtggctcggtcatattcgaacacccggatggctggattgttggccccattgaccactccaggtaatgtggttttccatggggtgactccaggtgtgatgaacatggcgcttatggggacacctgcatcatcatagagcatccgaaagctgtcggtgtggtggtgcccgaagaactgccctgctatgacgcgatgatgcttccggaccaccttcaggtatttttcattgaagccctcccggaaccatgccttgttttgcgtcttctcaaagaaccccgggggcacgtggccgacaatgtacaccatgtcccctcgtgcc

SEQ ID NO: 65388 - DNA, 466 bp, Homo sapiens
tttgagcctttgtagatcactagtccatgcggtggaattcggaggggcggccctgcggttgctctgtacaagtccgggttggtgacggccccagcagtccccacagggcccctggggggcgcaggaagtgggcaggcgcctctagatgaaatattccctcttgtcgtcccctcctgactgcccgccttctgcattgatgatggccgtgtccgcgtctggagcatcgtcggagccttttgcctcatgtgtcagtggccgaggaagatgagcatgatgagcagcaggaagacaatgaaagccacgatcccaccgatgatggcgtgtcccgcccacttaaggatattcctggaagaagatgcagtagctccttctaccaccaggcgtcagcactggaaacagacgcagtccaacaggactccctctgcctggctgttgagcacaaagcagaggggagatcagcaagata

SEQ ID NO: 65389 - DNA, 3344 bp, Homo sapiens
ttttttttttttcaaagtacataaaacttttaatgaattaactttacaaaagacaaatggcatcaaaacatcagacgagtttgatacaaaactggtcctaggctgtgaggactaattctggtgacggatggcgacgtgctgctggcatgagacacacggagcagagggacgagagccgtgggtcccaacgggggcccttggacaccactggcaatgagacaatgggtgagcacagagtccacgtgggggacagaatcaacttattcacgaatactgtgtgtttgaatatcagatgagcagatgcggttggcgaggctaccatattttccagaaaagaacatgccccagaagataatatacaccccctagttttattgccttaagaatgtgtgtgtgtttcacctttctcctctgttagttctcccagtgcttttcttctatcacgcgcgctccttttcccttttgcttaggagcaagcacagtgcaagtggcagaacgatctgggcacacatcagacaccaaacggtatgccactgggtcacgagaacgagtctgcagaggctccataggacagacagcacgcacatcaaaaacaagggacagaagttgcagtcagaaagtgtgtgataccttcctgaaaatacagtcttcttgccaaaatgaaggtgactcttcaggatgccacgttgctctgggaaagggaccttgacatttctgtgtttacaaagtacgtcttcaggtccccctttcctttcacgttgattattcctcgacaggtgcacgtgtatccgagggtctgcaggacgaggctcgtctcctcggtaacctgtattttgtccaggactccggtgctgtccatcctactggccacattgacagtgttgccccagatatcatattgtggcttctgagctccaatcacaccagctatcacaggtccatggttaatacccactcgcaatttgaagtcgttgaaggagtgcttgttgatggcatccagcttccctacccagggcaaaagcaaactaccaccatggtgccaatgtgcatgtactgtcgctcgggctcctgggagtgctcctggctgggcacagcgctcagacctgttgctgccatgtatgtgctgccaatggtcttaatcttttcaactccactgaattttggcttggaaagaagatcatcaaaagtcagcgatgatctcgttcacggagccgaaggcattccaagccctccttgttcacgtcggattctgtataaaattctttgaaatccggaatggaggcaaacatgacgcagacgcagtcataggactggtggtatagctcctcattcttcaggctcctggccaggaagtgctcagcccacgtgcgcgggaagcacgttctccagcagcacgcggttcaggttctccatggtctctatctcctcccgctcttttttgaatttgttcttccataagaagtctaacctacagtaatattcattctgtctacccagaacaagcagtgtgatgaagaatatagagagagacacagagcccatggtcttcaggtctttccaaatgcctggtctctcaaataagacctggctgtagtcgcccaggacgtgggcgtgggtgtggagtaggatggtgttgtagcccaccaaggccaccatcatgatcaacatcttcagctcatagtttacccgcaggaacaccggaacaggatatcagtcccagaatgcagctgtagataaagtacgggaggaaaaataaaatttgcgcacgcagaatcgccacctgattatttgaggctgaaaagcttgtgtttgttgtgttggcagttggagggattgtttcctctgagtcactcaggaaaaacatgttgaacacggccatcattaatatgatggctgtggtgatgatcgtgagagagatccgtggccaggggcggttggcaatgatgcccgaggacttcaaaagccacatgagcaggggagaggcttttttgctgcattgcagaagctgtccagcaaagcagacgaagaggatgaaggccagcaagagaaacgcagccccaaaggagatgcccaggacagacgtttttggcagcacgagaatctgcacaatgaagatgcagaagaatatgagacaggcacaagtcacataatacttgaacgctggcagtgccgtggcccggtactctttttctagtactttgttatagaaaagcagtgagattctctgaatgtcttcagacttgagccattgcttctgtgcattaatcccatcaattgcttgaatcatcctttcattcaattcttcttcaaatctcttcttttgtgacttggttcttaaggtgcgattttgaaaattatgctgacccatgggtacatccgtggtgctgatcttgccgttctctgtggtcatgctgtccctgtgatgtaggtgtgcaaagggcttggctgccccccaggactccaagtaccgggtcatgcggaccgaggccctcattttggctccatcaagggtgtggcgaggtctgaagagatgctgggggctccgtcgttctcccttggggttgatcacaaagtaggttttcaccaggtgctgttttaaatatgggtccctaatgtcaccatctccctcctccactttataagcgccattcaagtgctccagggtgacagaagaaatgtgaacacgtccagggacccctccagcttccatgtggttggccaaggtcacatcatgtgaccacacatcatattgccacttctgcagaccaatcacgccacacaggacattcccagaatgcacgcccacgcgcatgttgatatcaactccagtagcatccctcactttctttatggcttcacacatgtccagccccattttcacacagttcttggcatggttagggagagatatagggagtccagatacacagtagtagcagtctcctaaaattttaattctcatgcattcattctcctttgcaatttgatcaaactttccaaagagctcattcagcatgtggactagttctcccggggagcagtcacttgccagccgggtaaagccaacgatgtcagcgtataagatgctcacgtttgtatgccgcttcacatacaggttgtggaagttatttgtgttctccatctggcccgccttggggccctgcagcctctggatgatctccgctttcatctccatggcgatgtgggccggcagcagggagagcagaagccgctcctgttgacgtttttcaaattccaacttgatccgcgacttgatgcaatttacaggtgtcctgatatgtttgctgaagagcgagttccatgaggtgcttatggtaggctcc

SEQ ID NO: 65390 - DNA, 2891 bp, Homo sapiens
atggcggagcgagaaagcggcggcctgggagggggggccgcgtccccgcccgccgcctccccgttcctggggctgcacatcgcttcgcctcccaatttcaggctcacccatgacatcagcctggaggagtttgaggatgaagacctctcggagatcactgatgagtgtggcatcagcttacagtgcaaagacaccctgtccttacggcccccgcgcgccgggctgctctctgcgggcggcggcggcgcggggagccggttgcaggccgagatgctgcagatggacctgatcgacgcgacgggggacactcccggggccgaggacgacgaggaggacgacgacgaggagcgcgcggcccggcggccgggagcggggccgcccaaggccgagtccggccaggagccggcgtcccgcggccagggccagagccaaggccagagccagggcccgggcagcggggacacgtaccggcccaagcggcccaccacgctcaacctctttccgcaggtgccgcggtctcaggacacactgaataataattctctgggcaaaaagcacagttggcaggatcgggtgtctcgatcatcctcacccctgaagacaggggagcagacaccaccgcatgaacacatctgcctgagcgatgagctgcccccccagagcggccccgcccccaccacagatcgaggcacctccaccgacagcccttgccgccgcagcacagccacccagatggcacctccgggtggtccccgtggtgccccgcactgggggtcggggccactcgcatcgagaccgaatccactaccagtccgatgtgcgaatagaggccactgaggagatctacctgaccccagtgcagaggcccccataatattgcagagcccacctccgccttcataccgcccccagagagccggatgtcagtcagatttattgcagaccctgccgcctacccctccacggcagggcggccgcacccctccatcagtgaagaggaagagggcttcgactgcctgtcgtccccagagcgggctgagcccccaggcggagggtggcgggggagcttgggggagccgccgccacctccacgggcctctctgagctcggacaccagcgccctgtcctatgactctgtcaagtacacgctggtggtagatgagcatgcacagctggagctggtgagcctgcggccgtgcttcggagactacagtgacgagagtgactctgccaccgtctatgacaactgtgcctccgtctcctcgccctatgagtcggccatcggagaggaatatgaggaggccccgcggccccagccccctgcctgcctctccgaggactccacgcctgatgaacccgacgtccatttctccaagaaattcctgaacgtcttcatgagtggccgctcccgctcctccagtgctgagtccttcgggctgttctcctgcatcatcaacggggaggagcaggagcagacccaccgggccatattcaggtttgtgcctcgacacgaagacgaacttgagctggaagtggatgaccctctgctagtggagctccaggctgaagactactggtacgaggcctacaacatgcgcactggtgcccggggtgtctttcctgcctattacgccatcgaggtcaccaaggagcccgagcacatggcagccctggccaaaaacagtgactgggtggaccagttccgggtgaagttcctgggctcagtccaggttccctatcacaagggcaatgacgtcctctgtgctgctatgcaaaagattgccaccacccgccggctcaccgtgcactttaacccgccctccagctgtgtcctggagatcagcgtgcggggtgtgaagataggcgtcaaggccgatgactcccaggaggccaaggggaataaatgtagccactttttccagttaaaaaacatctctttctgcggatatcatccaaagaacaacaagtactttgggttcatcaccaagcaccccgccgaccaccggtttgcctgccacgtctttgtgtctgaagactccaccaaagccctggcagagtccgtggggagagcattccagcagttctacaagcagtttgtggagtacacctgccccacagaagatatctacctggagtagctgtgcagccccgccctctgcgtcccccagccctcaggccagtgccaggacagctggctgctgacaggatgtggcactgcttgaggaggggcacctgccaccgccagaggacaaggaagtgggggccgctggcccagggtaggggagggtggggcaatggggagaggcaaatgcagtttattgtaatatatgggattagattcatctatggagggcagagtgggctgcctggggattgggagggacagggcttggggagcaggtctctggcagagaaggatgtccgttccaggagcacacggccctgccccatcctgggccttacctcccctgccagggctcgggcgctgtggctcctgccttgatgaagcccgtgtcctgccttgatgaagcctgtgccacctgcaagtgcccgccctgcccctgccccaacccccaccgaagagccctgagctcaggctgagcccagccacctcccaaggactttccagtgaggaaatggcaacacgtggaggtgaagtccctgttctcagctccgtcatctgcggggcttctgggtggctcctgccactgacctcaccggcatgctggcctgtggcaggcctaggacctcaggcggggaggaggagctgccgcaaggccctgtcccagcagaagagggaggcttcctgactgacacaggccagccccatcttggtcctgtcaccctggccccaactattaaagtgccatttcctgtctggaaaaaaaaaa

SEQ ID NO: 65391 - DNA, 1062 bp, Homo sapiens
gggttaggagaaagagacaggtgtatggcaccgacagcaggttcagcatcttggacaaaaggttcttaaccaatttccctttcagcacagctgtgaagctttccacgggctgtagtggcattctcatttcccctcagcatgttctaactgctgcccactgtgttcatgatggaaaggactatgtcaaagggagtaaaaagctaagggtagggttgttgaagatgaggaataaaagtggaggcaagaaacgtcgaggttctaagaggagcaggagagaagctagtggtggtgaccaaagagagggtaccagagagcatctgcaggagagagcgaagggtgggagaagaagaaaaaaatctggccggggtcagaggattgcccgaagggaggccttcctttcagtggacccgggtcaagaatacccacattccgaagggctgggcacgaggaggcatgggggacgctaccttggactatgactatgctcttctggagctgaagcgtgctcacaaaaagaaatacatggaacttggaatcagcccaacgatcaagaaaatgcctggtggaatgatccacttctcaggatttgataacgatagggctgatcagttggtctatcggttttgcagtgtgtccgacgaatccaatgatctcctttaccaatactgcgatgctgagtcgggctccaccggttcgggggtctatctgcgtctgaaagatccagacaaaaagaattggaagcgcaaaatcattgcggtctactcagggcaccagtgggtggatgtccacggggttcagaaggactacaacgttgctgttcgcatcactcccctaaaatacgcccagatttgcctctggattcacgggaacgatgccaattgtgcttacggctaacagagacctgaaacagggcggtgtatcatctaaatcacagagaaaaccagctcttcttaccgtagtgagatcacttcataggttatgcctggacttgaactctgtcaatagcatttcaacatttttcaaaatcaggagattttcgtccatttaaaaaatgtataggtg

SEQ ID NO: 65392 - DNA, 1873 bp, Homo sapiens
ttttttttttttcaccagttttagcatgcaactttattaacaacatgtaaataaaatctcaaaagaatacacatatcaatataaagcacagaagtatagcttactcaggatgaatagattcattatcaggtcacgttgcaaaaatacctaaaatatctcaatttatatactatatagcacaataaaaatcagcacatgttcaggatctcaagattaattggtatccataaaatggcctccctcaatcaacatgggaaacctaaggattggatttattaattaccaatatgcattggggttccatattgcaactccccaaaactgtttgaggctttatgagaacagaggggtattcagagttttagtaataaaccggaggacttaatctctcacttcgggatcactgtgctctgctaagtcttggagtttctgaccaaactgttttgcttcctggaatattgaaataagctcagatttagtgaacttttccttggtaaatagctttgcctttgttttgaactgaaaatttatattctcaaatatttcaataatattaagaatattggcctttgactcattcttgttaaagggtgcaaccaatgatgacagtactttggcactgatcaattctcttgtattggcgtgatttttagacaaacacgaaaacacttttaaaacataaaacttggttttgacacttcccttgtttaacaaggtgaggaaatctggaatataactggtaatcacatagtgatcttcaaattttatactcaagtgccctagtaatttcagtccagccagctgcacaggggagttcaaggggcaagagattatgcctttacaaacttgatgtatatatgactcccctgattttggttcttcggaagactcagagctgtcatccaccatacttaaagctccagggtgttctttaacattgggattattgaccaagttttcaatcataacagtaatacctacatcatgaattatatcttgagtaaatggataagcaggactgatgcccattatcattgtagctatttcatgaatgaaaggatccttagttaacttaaggagggcaacaagtttatcaaactctttaggctctaaactaaagccacgtgatttgcagtggcaggccttcggattaggcccatacttttccctttgcctaatctgttttttgatctcagctaaggtctggtaataaggcccatgataaggtgggatcttggtcaaaggtcgaatccccagaggagtttcaatcaaggtctcaaccagggtccagtttccttctggaggcaaggattgctcccctccttcaactggaactaggacaatatacctggcccttgaccatgctattaccttttgttttatagtaagtgtgggtttgtgtgtgggcttgggcttttcctggatcttaggtaggggcttataaacttgaagagaggtctcttcttcaggccagaaccaggaccctacactaggctcttctccagtccagaaccaggagcatatattttcttcatcctcatcactggatttcatcccaatgctggtctcttcccttctgtcaggtctggacccagtattggccttatcatgtgacttggcataggacctaatatttgcctcaatgacagcaacaaccttgacttcagacttggttacagtactgaccctagacataggcatggcctttgacttggtttgtggcactatactgcgttctgccaggggttttgtcttagtctcaaccatgactctagtcttagttgtatcttccaccttgatcacttcccttgtcacagccatagcctccctgtaggtcactgtatgtgtcctggtcattgctccatcaccagct

SEQ ID NO: 65393 - DNA, 1313 bp, Homo sapiens
ttttttttttttgtttgcagcacaatttattatctggccatagtatttgggtacattatcaggtaccgatttaacaccatgtaacctctcttgacacagagcaacccaaaaagaaaactttaaaatgtgcaacagcaataaatatcaagctttgtcatctaaaatgtataaatataaaatatcagtcatttctggaaacatcttaagaaaatccggcaaccacatgtccatgagtaggtgtctgatgttgacggtgcttacattcagaacatatcacctcagatccaacacaattatttttatgtcttttaccaacacatgtttgcatatactgaacagcctgggctccttggtgtgtggatgaaagcccttttttttacaagcagaaacctcaagcatgccagcattggtgagcctgaagatgccagtgtctttatgctttggtgagcaaacaatggcaatggcctctggcaacatgagttgataggaacagtgagtgtgaagatcaacgctggataaaaatgcagtttgagtgggatgtgtatggatccatcctagagtgaggagatcatgttgatcctgaacattgaataattcctctacattctccatgtcacaatagtctggtcccgcagactgctttggcacaattacatgggtaatagtaaattcattatgtgtcagttttccacagagtattccacaggtttctattcctctcactgtattagattctgccagttgcagaaatttgtggcaaagatcttctggcaaaactacacatcgcagtccttcaaccactaaattctgaacagcacttagagtagcagctggcgttaaggccctgtttacaggaggagagtggctagcataattggttgcatcacttttattaggttgatctgcaaatacattcagcaaggaattgttctggtgtgtggaaaagcaggacaaagcgctcccatcaatctgctctgacagccctgaggtttgctgacttcgcatttgacctcgggctaactcttgcttcttgagttgatcttcgaaaaacagaaactgctccgattctagctgctgctggcgcatctgagcaatccgcttcctttctgcctctatcaatctctgatgctccaattttttgagaatttcagctttatatttgtttttgctttgcaaatattcttggtattctacgttatatttctttaaaaggtcgtttttcaattcatctgtccttgggaatgcaatctccttcagtttcttcataatatcctgcttttcaggtactgcacattgctggtaatcctcgtgcc

SEQ ID NO: 65394 - DNA, 2515 bp, Homo sapiens
ttttgaccgcgctggaggaactctgcacgagatgaaatcctgctttcttttcctcagaactactatattcagtggctaaatggctccctgattcatggtttgtggaatcttgcttcccttttttccaacctttgtttatttgtattgatgccctttgcctttttctttctggaatcagaaggctttgctggcctgaaaaagggaatccgagcccgcattttagagactttgggcatgcttcttcttcttgcgttactcattcttgggatagtgtgggtagcttcagcactcattgacaacgatgccgcaagcatggaatctttatatgatctctgggagttctatctaccctatttatattcctgtatatcattgatgggatgtttgttacttctcttgtgtacaccagttggccttttctcgtatgttcacagtgatgggtcagttgctagtgaagccaacaattcttgaagacctggatgaacaaatttatatcattaccttagaggaagaagcactccagagaccgactaaatgggctgtcttcatccggtggaatacaacataatggagttggaacaagaacttgaaaatgtaaagactcttaagacaaaattagagaggcgaaaaaaggcttcagcatgggaaagaaatttggtgtatcccgctgttatggttctccttcttattgagacatccatctcggtcctcttggtggcttgtaatattctttgcctattggttgatgaaacagcaatgccaaaaggaacaagggggcctggaataggaaatgcctctctttctacgtttggttttgtgggagctgcgcttgaaatcattttgattttctatcttatggtgtcctctgttgtcggcttctatagccttcgattttttggaaactttactcccaagaaagatgacacaactatgacaaagatcattggaaattgtgtgtccatcttggttttgagctctgctctgcctgtgatgtcgagaacactgggaatcactagatttgatctacttggcgactttggaaggtttaattggctgggaaatttctatattgtattatcctacaatttgctttttgctattgtgacaacattgtgtctggtccgaaaattcacctctgcagttcgagaagaacttttcaaggccctagggcttcataaacttcacttaccaaatacttcaagggattcagaaacagccaagccttctgtaaatgggcatcagaaagcactgtgagacgcacagacggcgtcttctgccaccaagagacccgagaactccagattcacgacattcctgtcccatgtagaagcatttccattcaaccgtggcccctcttcagaacctagacctatcagtgccatttttttttcataatctacgaagaacttggctatggctgatcttttttaaatttaactttctgatggaccctgtagtttccagttaagtgcagattccttacagacatatagaacagcgcattcttctgtagacatttgctcatgttggtaaatacaatcacccatatgaaaaaattgttttcacctgatatgaaaatgttagaaaaggcaaactccgggacttctaaagatttacttaaatcccattatgtactttattcagaatgtagaagctgacttgaaaggcatccttggtactaagtgaagcttattcagaaaatgcatttttcaaatgcaatgggcaactgcttgtagatatcatttttgcagtgtatgttggagctgtaatggttgcaattatgtttcttatttccttaaaagcaaaaagcgtagtttctgatttatgttatagaatgatactgattagactttgagccaaggggaaaatactaaattcttttaaacctggagccttagagagccacaggaatatcttctgttgtacagtctaataagctgtggtaggaagtatcatgtaatcacagtttaatgacagtttatgtatatatataattcagtattccctctgataacatagttgccagtgtttaatacacttgtaacttggatttttaccttataggctatatgtatactcagttttttaaagcatttttttcagagatcacttaattccccatgcttctgcaatgcatataaaaactataaatgccgagtggtagaaactcctctttcttcatagtcctcaggctttggttacatttgcatatgccatttgaagcctccagcttttaccagtttaacatccaaagttcacagcatcagcattcatggtgtaagaacagttttgcagtataacacgatctgataatcattcagttattaaattgtaaataattattgggatggtttcttggctttaagtccactgaataaaaactatgaaattgcactctgtgtcaaccatccactagggtaggataccgaaatctgtggcatgcaaaaatagggagatggggcccatttggcacacaatttcgtagttatgcagtctgccattttaatttgttcac

SEQ ID NO: 65395 - DNA, 1087 bp, Homo sapiens
  misc_feature (1)...(1087): n = a,t,c or g
ttttttttttttcactacaaagtcctttattaacaagtcaataaaaacagaagagagagagatgtcaaaatactttccttggaggccccaggagggagaggcactgtcaggactcacctggccagggaaggcaaccccaccagaggcagaacggaggtcaggggggcagctggcccaggaagcctttggggaatggctcaggcctcaggcagggactgtgcaaacgccgaggctgcgcagggagtgatgggttgggggcttaagccccgagcaccgtgttcccctgcatgggcagacacgcagtcaggctagcacctgcccactccacctgtgagtgtacacaggtgtccgcgtaaaagccggtgcctgcacgcagcttacatacagagagcggaacgagggtccccagcagaacagggggctcgttccagagcttaaggaaatagcttagagaagtctttggaagcctgggtcgaggggagagcagggaggctgctctgttgcccatgggcctcaggaagccaggccttcctgccgccgctggaggacctcgatgacgctgccgataccgtcctcgggcaccagggcgtggtcgaagttgaaggtgctgatgtagtaggcagagatgtcagcggcagccaggggacctgcaatctgtgccacgatgccacattcatcaaagcccaggggctgtccaccgatgcgcaccatcctccacagctcccccgaggagctggtcagcaggaggtcactggggaactttttctgtgtttcagcatccatgacaatggaagatataaccctcgatgagggagaaggcaaagaacgtgatggagctgggttcaggactgctagaggctgcctccttgggggtgctgtgcgagtagaagaggacatctatgagggtggtggcgatggctggaagcgtctcagggtccagtgtgaggacacagaagcggttctgtgggctctggatgggatgcaccgtggggctgggcccatgctgagtgcggggaaagccattgctggaatcatccctcgtcacaggcacnagctctccgcccactcgcggtaaatgtcgaactcc

SEQ ID NO: 65396 - DNA, 3823 bp, Homo sapiens
  misc_feature (1)...(3823): n = a,t,c or g
atttttttgtatttttggtagagactgggttttatcgtgttggccaggatggtcttgagctcctgaactcgtgatccgcctgtctcggcctcccaaagtgctgggattacaggcgtgagccaccgtgcctggccgcaaatgtcttatttctaattgctatcagatctggtaccaaaggagaatttggagagctggctaaattatttgaagaaagaattgccaacagtggtgttcagagcctcaacaaaaccaaaggataaagggaagataaccaaggtatcctttattagtgcgtgtgaaggcaaagaagaatgctgctccattcagaagtgaagtctgctttgggaaagagggcctttggaaacttcttggaggttttcaggaaacttgcagcaaagccattcgggttggagtaattggtttcccaaatgtggggaaaagcagcattatcaatagcttaaaacaagaacagatgtgtaatgttggtgtatccatggggcttacaaggagcatgcaagttgtccccttggacaaacagatcacaatcatagatagtccgagcttcatcgtatctccacttaattcctcctctgcgcttgctctgcgaagtccagcaagtattgaagtagtaaaaccgatggaggctgccagtgccatcctttcccaggctgatgctcgacaggtagtactgaaatatactgtcccaggctacaggaattctctggaattttttactatgcttgctcagagaagaggtatgcaccaaaaaggtggaatcccaaatgttgaaggtgctgccaaactgctgtggtctgagtggacaggtgcctcattagcttactattgccatccccctacatcttggactcctcctccatattttaatgagagtattgtggtagacatgaaaagcggcttcaatctggaagaactggaaaagaacaatgcacagagcataagagccatcaagggccctcatttggccaatagcatccttttccagtcttccggtctgacaaatggaataatagaagaaaaggacatacatgaagaattgccaaaacggaaagaaaggaagcaggaggagagggaggatgacaaagacagtgaccaggaaactgttgatgaagaagttgatgaaaacagctcaggcatgtttgctgcagaagagacaggggaggcactgtctgaggagactacagcaggtgaacagtctacaaggtcttttatcttggataaaatcattgaagaggatgatgcttatgacttcagtacagattatgtgtaacagaacaatggctttttatgatttttttttttaacattttaagcagactgctaaactgttctctgtataagttatggtatgcatgagctgtgtaaattttgtgaatatgtattatattaaaaccaggcaacttggaatccctaaattctgtaaaaagacaattcatctcattgtgagtggaagtagttatctggaataaaaaaagaagatacctattgaaaaatgtaagttttatttacagatcaggccacaggttacaaaattaaaaccaacagcagttttgaattatctgtaccagctagctgaactagccatatcagttcttctttccagtcattcagcattgtagtaagaaaacacttggtaaggcagatggagacatatttatagtctatagtctgtctgggaagctgactgccagacagggcagtttgtcatctttacctagctgacacatctttttccatggcttgctaccgataggcattgaagcctagcaactgttacttcccacgcatgctatcttccaggacttcctgagaaatgcttgcttacagttcaaattctgtttcactttatgtttgagatctcggtatatcttcggattaggttgaatttgcctgttgggtctggaatataccatttttcccaaacatcagtatatgaagcagtccttccccatggcttcaaatgtccattccaatggagtaacttggcagcctttacaaactgaggtgaatatcgttttccagcactggaaccaaggtggcggacattccacataggatcgatggtagagtgctgttgataaaatacgataagcagaggaggtgttgtgatgctaccagccagggttctgctatacagtccctctcttggtgggacagaaaacaaatgtttgttagtgaaaagtactgactaactcctgttagtcaagactctaggaattgaaatacaacagtttttcacagctaggccagttacatacttactctacattgagtttcatccatttttccagttggttagttatattctgtcgtttccattccgtcaggtttgcaacaaaaactccaggattaaatgagcaagtgctggctttcatggaaagcttacgaattctttcctttttatagtcaagatagccaatgtaattgtactggtttcctgctccacggatgacaactttagtagaggctgaatcacaatcttctgaaaatgcagctgcatgtcctggcttcagtgctgtattgtaaagggcaagaatatcaccttgcacaattacatcatcatccatgtatatggccttctttgcgctgggaaccagaattggcaagtagaaccttgcaaaggttaaaggtttcatggattccccctggtcaggatcctcctttacttttccttccaaaagtttagggtcaaaattgacaattttgtatctgatgcttttcagggaatcactgttgagccaggaccggagatggtctgctgtattgttgagagtaacaatgtagaaaatcacattggagcgagtgttgtgctgaatgctgtttatagctgcaatggcccccccaagcctgtcttcagatgcagcgatgaccacaggaatctcctcttgtctcccatctactgcatgtcggagagcatttgggacaaagtctataggttgaggccctacaattcctgaatctgtaacctcattccttaacaaactgctcaagctgaggaagttatggtgcaaaaccagtaagaagagagcaacagccaggaccaagatgatgatgtttactttacggaatgacatctttttcttctgtcatataaatattagtttttaacccctttcatctggctggctccccacttggcattcaaaggtcaaggtagcctcctcccaaactcccacgttgagctgcacctcccctgagctcccacatctgggcctccctctccccagggctaatccagctgtcatgtatttctggcgtgatgtggctgtctcccttgacacgctctgggctcttccaaggcaacagcctggtcttggtaacaaccgtgtcctcggtctgctgtactttgaagtgatcggaaagtgatgtgacgctccggggatcccaccaggctcagagacacccctggttagggctccgacaagtcgttcccctcaaaggctcgccgcggccgcccttactgcaggcgatggaggagatgcggatgcagcccgcgccccgacccgccctgccagctcagcgcccgcgccgcaggccccggagcccagcccgttgtctggccgcccgcgttccctgcacgctgggccgagcacacttgccctctagctccgtggcagccgcgcagccccactacgcccagccagcccgcagcggtaaccgctagagcgtcgcgccaagcaggcgcgcggggcagccctgccgccggggtcctcgcagggaaaaaggccgtcgccatggagacgcggggggccggcggcgnttggcgccanagaatactgtcaaggacagttttcgggacggggga

SEQ ID NO: 65397 - DNA, 654 bp, Homo sapiens
ttttttttttttggcttgagactgaacgtttttccatcattttacaaatcagggatactcgtcccaattggcagggcccaccccaagactgccggcccctagagccctggccagggcccaggtctgggagctgccactgggaggcctgttgtgagtggtggtactggagctcagggtgcccccagttcctcttccggcccaggtggtcttcaccaggcctacagcagggggttgagggcaagcacccccttcctgaggatgaggtttccgtagagggccgtctcccccgttgccacaacagcaaaagccttcttagcccgttcataaaactcaaacctctctatctttgccagggctctcacacagccggccctgcgtaggatggactcgtactccgtccacactggggtctgcaggcccctctccttgtcgctgggcaccagctccatgactgcagccggactctccacataggtgtccaggggcagcagcttcagcacggcctccaggagctgcgggatgccacaggccgtctgcaccgatctccatgggcccacaactggcagatggaggaggcccgggaagttcaagtccgaaaggaacgatctcgtccccgtgccccatccgcgcccagcgcgaaagcaatttgggggg

SEQ ID NO: 65398 - DNA, 3092 bp, Homo sapiens
cctgtctctcttcgggtctcgggcccttgggcgcagcggggcgcgcgccatggcgaaggcgaagaaggtcggggcgcgaaggaaggcctccggggcgccggcgggagcgcgagggggcccggcgaaggccaactccaatccgttcgaggtgaaagttaacaggcagaagttccagatcctgggccggaagacgcgccacgacgtgggactgcccggggtgtctcgcgcacgggccctcaggaagcgtacacagactttactaaaagagtacaaagaaagggataaatccaatgtattcagagataaacgcttcggagaatacaacagcaacatgagccccgaggagaagatgatgaagaggtttgctctggaacagcagcgacatcatgagaaaaaaagcatctacaatctaaatgaagatgaagaattgactcattatggccagtctttggcagacatcgagaagcataatgacattgtggacagtgacagcgatgctgaggatcgaggaacgttgtctggtgagctgactgctgcccactttggaggaggcggtgggctccttcacaagaagactcaacaggaaggcgaggagcgggagaaaccgaagtcccggaaagagctgattgaagagctcattgccaagtcaaaacaagagaagagggagagacaagctcaacgagaagatgccctcgagctcacggagaagctagaccaagactggaaagaaattcagactctcctgtcccacaaaactcccaagtcagagaacagagacaaaaaggaaaaacccaagcccgatgcatatgacatgatggttcgcgagcttggctttgaaatgaaggcgcagccctctaacaggatgaagacggaggcagaattggcaaaggaagagcaggagcacctcaggaagctggaggctgagagacttcgaagaatgcttggaaaggatgaggatgaaaatgttaagaaaccaaaacatatgtcagcagatgatctgaatgatggcttcgtgctagataaagatgacaggcgtttgctttcctacaaagatggaaagatgaatgtcgaggaagatgtccaggaagagcaaagcaaggaagccagtgaccctgagagcaacgaggaagaaggtgacagttcaggcggggaggacacagaggagagcgacagcccagatagccacttggacctggaatccaacgtggagagtgaggaagaaaacgagaagccagcaaaagagcagaggcagactcctgggaaagggttgataagcggcaaggaaagagctggaaaagctaccagagacgagctgccctacacgttcgcagcccctgaatcctatgaggaactgagatctctgttgttaggaagatccgatggaagagcagcttttgggtggtggagagaatccagaagtgcaaccacccgagtctcgcagaaggaaacaaagcaaaattagaaaaactgtttggctttcttttggaatacgttggcgatttggctacagatgacccaccagacctcacagtcattgataagttggttgtgcacttatatcatctttgccagatgtttcctgaatctgcaagtgacgctatcaaatttgtttctccgagatgcgatgcatgagatggaagaaatgattgagaccaaaggccgggcggcattgccagggttggacgtgctcatttatttgaaaatcactgggctgctatttccaacttccgacttctggcacccagtggtgacccctgcccttgtgtgcctcagtcagctgctcaccaagtgccccatcctgtccctccaggacgtggtgaagggcctgttcgtgtgctgcctgttcctgggagtatgtggctttgtcccagaggtttatacctgagcttattaattttcttcttgggattctttacatagcaactccaaacaaagcaagccaaggttccactctggtgcaccctttcagagcgcttgggaagaactcggaactgctcgtggtgtctgctagagaggatgtgggccacgtgggcaggcagagcagccttcttcccttccgctgggcgagtaggattgaggggccccaattttcgacagagggccattcacatccgactgtcctgcctggctgtgggcctggccctgctgaagcgctgcgtgctcatgtacgggtccctgccatccttccacgccatcatggggcctctccaagccctcctcacggatcacctggcggactgcagccacccgcaggagctccaggagctgtgtcagagcacactgacccgaaatggaaaagccagaagcagctctgccggccgctgacctgtgagaagagcaagcctgtcccactgaagcttttcacaccccggctggtcaaagtcctcgagtttggaagaaaacaaggcagtagtaaggaggaacaggaaaggaagaggctgatccacaaacacaagcgtgaatttaaaggggccgttcgagaaatccgcaaggacaatcagttcctggcgaggatgcaactctcagaaatcatggaacgggatgcggaaagaaagcggaaagtaaagcagctttttaacagcctggctacacaggaaggcgaatggaaggctctgaagaggaaaaagttcaaaaaataaattacattttataaataaggcaaggaactggacattacctcacatctgcaattccaaccctctggtctcgaattcccgacctcaggtaatccacctgccttggccccccaattataggtgtgagccacagcacccagccaaaaaagtaattttttttagagtaataatgctataatgttggtgtgattccaacctccagctccccccacccgctgcctgcggttttgtttctgttaaaacgtcacctgatgaaatagaatgaatcctgaaatgcacctctgggatcgggaatggtctgtgtgttatcagctgcgactggttcactgcgtctggacaagcctcatggggactggggattctggccagtgtaatttctgtcaaccacggacgtttgccttcatgtgtagaatttactgttgttatgcaaattatattttcaattataaatgaaaa

SEQ ID NO: 65399 - DNA, 2028 bp, Homo sapiens
  misc_feature (1)...(2028): n = a,t,c or g
ggcacgagatttccttaggagcaatttgtgcagtgttgctggttattatggggctatttgcaactaggtgtaaccgcgagaagaaagacactagatcctataactgcagggtggccgaatcaacttaccagcaccacccaaaaaggccatcccggcagattcacaaaggggacatcacattggtgcctaccataaatggcactctgcccatcagatctcatcacagatcgtctccatcttcatctcctaccttagaaagagggcagatgggcagccggcagagtcacaacagtcaccagtcactcaacagtttggtgacaatctcatcaaaccacgtgccagagaatttctcattagaactcacccacgccactcctgctgttgagcaggtctctcagcttctttcaatgcttcaccaggggcaatatcagccaagaccaagttttcgaggaaacaaatattccaggagctacagatatgcccttcaagacatggacaaatttagcttgaaagacagtggccgtggtgacagtgaggcaggagacagtgattatgatttggggcgagattctccaatagataggctgctgggtgaaggattcagcgacctgtttctcacagatggaagaattccagcagctatgagactctgcacggaggagtgcagggtcctgggacactctgaccagtgctggatgccaccactgccctcaccgtcttctgattataggagtaacatgttcattccaggggaagaattcccaacgcaaccccagcagcagcatccacatcagagtcttgaggatgacgctcagcctgcagattccggtgaaaagaagaagagtttttccacctttggaaaggactccccaaacgatgaggacactgggggataccagcacatcatctctgctctcggaaatgagcagtgtgttccagcgtctcttaccgccttccctggacacctattctgaatgcagtgaggtggatcggtccaactccctggagcgcaggaagggacccttgccagccaaaactgtgggttacccacagggggtagcggcatgggcagccagtacgcattttcaaaatcccaccaccaactgtgggccgccacttggaactcactccagtgtgcagccttcttcaaaatggctgccagccatggaggagatccctgaaaattatgaggaagatgattttgacaatgtgctcaaccacctcaatgatgggaaacacgaactcatggatgccagtgaactggtggcagagattaacaaactgcttcaagatgtccgccagagctaggagattttagcgaagcatttttgtttccatgtatatggaaatagggaacaacaacaacaacaaaaaaccctgaaagaactggcattgccaaatagttgcatttatcataaatgtgtctgtgtatattgaatattaaatactgtattttcgtatgtacacaatgcaagtgtgattattttaatctgtattttaaaaatacatttgtaccttatatttatgtgtaatttaacaaacaaattttatttttttactcccatgacagacatgtttttcctagtcgtgtagaaactagccactgttcaaatctgatacactattcaaccacaaagtgtaaaggcactgcttagattagttttgttggggaagaattattatgttgtatggacaaccccactgaagcatttatacaattcttaattccattaagtgatcccactttttttcaataactttttagaaattaaggaatcattaaaattgttaaggctattttattgttattttctctactttctactagccccaatagttggaactcttataggggaaaatcggaaagataaagtggaaaggtttatttcaggactgaggaaatatcttgaaggttatttattaggatggactatctccaaatggaacttttttattaggacantgatggaaaacaggaaccaaaagtccaatgtttncctgactcccagggcccctactatttccagg

SEQ ID NO: 65400 - DNA, 1151 bp, Homo sapiens
ttttttttttttgaagatcgcacactttattttgaaaaccaggccagggacagctccagtttggggggaggggaagagattataacttttaaatctactacgaaaatacaaaaagaggaatgtgacagggttccttcctgtgttatgtcaccgtctgtaatcagatcccacagtccagcccagaatcataattcacataacagcgaaactcatttgccaagttccgggtgtgtcttgggaacaaacgtgcacatcttcactccaaggagttctgctgcctgttcttccatgatggcacctgtgccacagcagaatcttgccccgcgtcaggtacttgacggtttccgatgtttttctgagacattcctccgaaagatagggaggatctgctattacgatgtcaaaactatgtgcagcaattctttcgggtaagtccaatggattattgtaatcatagaaaataaactcctctccatacatggcaaatcttttgtcatattcaaagatgtatatcgaaaagttttctctgcacagctctctgagtttctggtaaacactaggggcactcacacatgcgattctgccaccttctcctacagctgcaattgcctcctgtgccagctgcagagcagtttcctgactataccaaaactggctcagttgccaattctcttctattattccaatgttatatttatcatcctcgcctggctcaatttgttgcttttgctcagcataaaattcctggagagctgctaaggcatgggcagaaagctggggtgtctcatcatcttccaaatcactcatttcacaagttgtttataacccaggtgtggtggcaggcacctatagcgccagctactcaggaggctgagacaggagaatcgcttgaacccaggagatggaggttgcagtcagctgagatctcgccattgcactccagcctgaatgacaggagtgagacagccgcgcgtgcgcacccacgcgtccgcggacgcgtgggctggcctccgttgcaactgttttgacctagtgaaggcctagactttctcagacagatttcttttaactcttctgccctgactccagtcttcactgggatgctgccttgcacttgaggaatgtgaaccttccctaagcggacgcgtggg

SEQ ID NO: 65401 - DNA, 2249 bp, Homo sapiens
cccagcgccccggaagtgatctgtggcggctgctgcagagccgccaggaggagggtggatctccccagagcaaagcgtcggagtcctcctcctccttctcctcctcctcctcctcctcctccagccgcccaggctcccccgccacccgtcagactcctccttcgaccgctcccggcgcggggccttccaggcgacaaggaccgagtaccctccggccggagccacgcagccgcggcttccggagccctcggggcggcggactggctcgcggtgcaggtaaagctccagatggctctggaacttatgaggaaagagttggaggacgccttgactcaggaggccaacgtggggaaaaagactgtcatttggaaggagaaagtggaaatgcagaggcagcgcttcagattggagtttgagaagcatcgtggctttctggcccaggaggagcaacggcagctgaggcggctggaggcggaggagcgagcgacgctgcagagactgcgggagagcaagagccggctggtccagcagagcaaggccctgaaggagctggcggatgagctgcaggagaggtgccagcgcccggccctgggtctgctggagggtgtgagaggagtcctgagcagaagtaaggctgtcacaaggctggaagcagagaacatccccatggaactgaagacagcatgctgcatccctgggaggagggagctcttaaggaagttccaagtggatgtaaagctggatcccgccacggcgcacccgagtctgctcttgaccgccgacctgcgcagtgtgcaggatggagaaccatggagggatgtccccaacaaccctgagcgatttgacacatggccctgcatcctgggtttgcagagcttctcatcagggaggcattactgggaggttctggtgggagaaggagcagagtggggtttaggggtctgtcaagacacactgccaagaaagggggaaaccacgccatctcctgagaatggggtctgggccctgtggctgctgaaagggaatgagtacatggtccttgcctccccatcagtgcctcttctccaactggaaagtcctcgctgcattgggattttcttggactatgaagccggtgaaatttcattctacaatgtcacagatggatcttatatctacacattcaaccaactcttctctggtcttcttcggccttactttttcatctgtgatgcaactcctcttatcttgccacccacgacaatagcagggtcaggaaattggggcatccaggggatcatttagatcctgcttctgatgtaagagatgatcatctctaaaattctgttcccaagatgcagtcctagcgtagcgaacgttcctggagtggggtgaaggatatcaatatactaagttttaaccagataccccatttaggtcagcacttgattcgttgttgctgtgaaatatgtccatgggacaaaagagggaatatgaaatatttgcatatgggaagattatagagcataataattttgtaaatggagcaatctcaacctctatttctagatcacattttcttgatgtcttccttcaaattaatgaccttggattacataaggatttctatgcattcattataatttgttattcctttcaatatccttgtatttcaaatcttccatataagaattagacatggcaattcttaaattgattcagaatggtctgatactattccagtatcacctccttaattctgtttctcctcgttttcctgattttccttctcattctctccttccccgctctgtctctctctccctgtcactctctctctctcgttccttattttttgtttcttacctcttactgtttaacctgttgcttccttctggattaatacatttagagccattcctttatatggtcacatttcctatgactttactcaattacttttaaaatcctttctattctgagactaatttttaagaattacaaagctcattcttctgaatctaatatcactaactcctagactttttccgttttctttggatacactttaagtaggaatttatcagaattttcattcaactcgttctttaatgcagatatttactagttataagaccttaaggctgggtgcagtggctcacgcctgtaatcccagcactttgggaggctgaggcgggtggatcacaagctcaggagttcaagaccagcctggccaacatggtgaaaccctgtctctactaaaaaaaaaa

SEQ ID NO: 65402 - DNA, 2128 bp, Homo sapiens
ttttttttttttatgtatatacgtgtttattatatgcttattacaaaagaaaaagtcttttgccttattttagggcttccatgtaaaacctagttaaaatacaaaaagtaaattagagaaaaattctgcttaggtagtgaaaattgatagcaacttataagctgtatccttaaaaacctagtcacagatatagaattacgtaaagataaaatgataagcctacttattggcaagaaacaggttaggccacttaagcagcatgtttctaccactatacaaatacatcggcaggtccaaacattaaaccaccattcgattgacaaccttttatttttcaacttaggtaacagtccaaaatcagtgtagattggcgaaaaactaggcaaaaatagcaaaaagtgcagtttaatttagcaaaggctcaagacagtatgtggaaggaaggtgagatttccctcctactgcggcaaggcaagcggcagttactgcccgacagtaacgatggtgtgcgcacccccgatgagaatgctgctgcaacacagactgggacgccgcctcccccattagacctgccagctcattcgtgaaaatctaccaggaacacatcaatgaaaaaaatatgtcaaatatgagttctctgttataagcaataaaatcacaaaatcaactcagatttgaaatttagggtaagctaggacaatttcctactttttaatatatagatattttagatttgacaatcgtttccacatacactcagacaggcttacagaagaatttcaaatatcaaatagagaagctgttaattcacgcacgttatgacttcagttaattcttccagtgtttagacttcagagctgctaataacactaaactcaataccgtgtttgttgagtctgtcaatcaactttgttttggaaaaagctgctccaggtgtgaagaccccgcccgccttaggcagatgagaagcatcacttagaagagtcatggctgcctgaaccatagctatgggggtagccacatagccagcctctggtcctttcacctgagtacaaattttgatatttggtttgttcttatctgtaccagtgccttggctgtatccttgaccaaagaatgtcagcgtgaatgaggcagcatcaatctgtttttgtgttgggccttgttttgaaaaatagccaaaggagaagaaccatgggaattttatgagaagttgccttccaattccaaacctcacaaagaacaaaaagaaaagtcctgcaaacatcagcttaataacagaggtgatgcctcccacagttacatacgcagcatactgaactggtgattcctctaaattttcatacaagtaacgttgagtcctccttacaacagacacatcagatcccataaaaggaatggaataacctttgagttcccgacaataagaaattggccaccttctcttcaattttggaccaatgagcgggacaggtttcagatttgatacatttcttagttttctcaaattactctgatctccaaaaccataaattgctgacttccaggtaccatcatgaatgctcaacccctcaggtcctgaatgtatagtcaggaaactttccacagcagtcaaagtaccattcattttatttctggtatatattactcccagatctgctggaatggagtcaaagccgctgcttccaatgatataaacccctttgtctgcagctttctcatgatacttcagttgcattagttccagaaactgaggttctccactgatgtcgatacaactggctccattttcaatacatgcttttattacaggttctccataaaaccgatatggtcctacgcaattgaggacaactgttgcctgtttagccatttcatcaagcgaggctggattagcaatatcacagatgatgattccaacttcagatgacagtgttggtcttcccagcttcagggccgccttctccagcacccgctgcagcttctcccgggagcggcccgccacggcccagggcaggcgggagctccgctccgggtccacctgctcccgggccacctcctcggtcacgaactggccggtgaagccagacgcgccgaacaccaccaggtggaaaggcctctgctcggt

SEQ ID NO: 65403 - DNA, 1521 bp, Homo sapiens
ctcataaaagtgacttcccttctctcagcttcattttccttatacgtagaaacaagaacaagcaatacatacctcaagaagacattgaaaggactcaattacttaataagacaacttaacatagcgctagcaaataataacattccttagttctctttccttctactacccttacagtgtgtagaagaccatagctgcaaaatgcaggcttgataacttgagcaactgatacatttctctgattttgtttaattatatacataaaggtaagaggccttttcacaggtattaattaagtttaaaaataaccgccatccaacacaaaatagtatttcttgttatatttcataaacagtctaacaaaacactaacaaagttattttgcttattattctgatgctggaataatttggtcaaatattcataaatagttatcaactttaccaaggcacaaaaatcaagaatacatgctttctataaactcatttactactttaaagtttttaactgtttagcagttataggaaatttttttaatcgaaaagaaacctatttacatttcaaatacaaaagaaaattaaaattattcttgattgatctctaaaacccaaccacttagatgctcattattattattttctttcaccaatccagtatactctattcaacatgtgcatcctgtgtacttactaagcatttatttgcacaaggattttctgtgtcaggttaactttgctgtgtagattctgtgtagctacctgaattcgtccaagaaaaagtctcacattttttggaaaaccaatgctgctacactgtttccagatctgcctccaaagctgaacttgggtgttggtagctcttcgagaagttcaaatccttcactgaattcatttagcaactcttccttggtccaattacatgacgttattagaaaaaaagccttttactttcaacaccctggagagagatttcacatattgcttcctcttctcaattgcattgtcaggattaaggcttatggcatcaaaagtccctttgtcaatacaaatatgaaatccagacagctgtgtggagagattcaaaaagtcttctacctttaacttaatgttagataaaccttctttttctataatacttccagaaagctgaattgcagaaggagagtaatcaattccagtaatattagagaaaccaaattttgcaagttcaaccaggaaaacaccatttccagttccaatatcaagcactgaagcatccagtggaatcttgtgtttctgcatccaccttattagtcgattcatactctcttctccaaaccagatttcacctgtatctccatattctcggaaagtttgcagttctctctcatagacagcatcccaatgctcgcgggtccccagcgccgacgggacgaaaccgtcctccccgggactgcccttgtccgaccgcgccgccaccgcagcgccaccgccgccgtcagcgcccgagctcatttcgctccacgtcctggacggccgttgg

SEQ ID NO: 65404 - DNA, 1929 bp, Homo sapiens
ttttttttttttacagatcacaggaattttaaattgcagatcagtcatgctacttggggtgatcagaaagacttgaacacttaccaagtgaataattttattaaggtcctgaaggtgagtgtccggaggtgctgggtaaaacacatcacaggtaagaaatgggaaacctacctcagcatttctgaaaggcacaatctatggaagggaaacctagcgtaataaaaccctcactggatgtacatggaaaggagtatggtgagctatttcctttttaaaggatgagaccttcataaattggcccctcggattctggtgattcccgccgcaagcgcaaatgctccagtgtgttatgaaaatgtttgttaatctgctctgtttcttcactggattcaagattcgggaggtcttctcgaatcttttggataagctggtttaaaacctgaattgttaccgcatcattttccttttcataaaaatagatatatctgttcagaatttctataaaaagctgcacttgtagagaggggtccatgcactgatttgctatttttagagctttttttaggcactccattaccctcttgcctccgtgaagctcctccccatttttgtccgtgtttctgccagaccagaagagatgtgcacaggtgctcacagctcggccctgatcaggtttctttagaagtttggatgcagcaagggcacactgagtcctcagaggttcatgattctcttcactgaagcacttcatcctttcaaaagtgccaatgatcaaggtgatggcagctagctgtgctttggaatcgctgatttcatcttcatacagagaaaatgcctgggacatgaattcatatgcgactgtctcatgattttcaaaaccaatttccccagcagctagtgctccttgaagaaaaagtcttaagggcaattctgccagctctgctttgatcaaagcactgatagtctggtgggcaaatgaaaaaatcttctggcatttcttttcccatttgtcatccactttagaattctctttatatcgaaaagccagctggtaagctgcaaataccaaaggtggcagtgtgaagcgaatccgctgatttccaccagctccaaaatgttttcgtgctgtgttcaaaatcaagtactgctggtcagggtcctcagagcgcagcagatgaatgaagcggcccacaaggctctgctcatcagcaaaatcttctggatcagggtcttctacaggttgatctggctgatcttgaatcaacgtggataccaaattcattatggaatccacctggtcttgagagacaatttctgtgttataatccagaacattactaagcacataacaactcatgctctttctggactcgtagtcaaagtactcaaagagtgggtgaaaatgttttaatttcaagactgttaaaatattgttgtaagtgtcaactggtattttcaaaagtctggtgagttcctttgaaactgcactactggtagcaatatgttcaaggttgagcttattgaatatctccactgttgtttctagaactttatcaacatagtccacacgatcagggtaacatttcatggcaagattaatcagagagacttgtaaagatacaacatcctctgaaggcatgtcttgtctagactgtatcactgtagccacctgctgtgaaaatatatcaaaaagtttaatatccgctgggattccaggtccatcttcacggtgagcaaataaagctaatctatcaattaaagcaatgattatgttcttcacatttacattctggtgtaactcagcacaggcccgaagaaaaggattcaaagtctggaggtgaaattcatcagggaaaacctgaataatacactccatgagatattcttgagccaaagcatccctacagtttacaacttgctccaatatgc

SEQ ID NO: 65405 - DNA, 858 bp, Homo sapiens
ttttttttttttggacttagcaaggtttatttggaagggcagagtccaaccaaccccaggtcctgagggtagactcaggtcctgagggaaaggggtggacttcagtgggctttcttgctgtgttgggtgctcttggggaaaggctgcgggcccagccagagctgcagcaggatgacggcatggcatatgtgcagggcagcagagctgcaggatgtggaagggtatgtgttccaggagagctcgatgagccccagcaccaacaacctgagcaggtgtgtgagccagcgtgcaggcatggcccacaggaggtagggcagtgtgtggaaataccagacgtagaactggtagtggagggagcggctgaagcagatgccaatgaagttggaggtgaagagggtagaaacgatctggttgggtgtaaggggctggggtggaaccttccttttggagggatccctcagcagcgacaagatactttcccctgtcctgtgccacctgcagagggcaaacagcaggagcagggtgaggtgggcagtcaacagggccaggtggaaggctcgatgcaggaagagcgcctctgggaggaagcgccagttcactgtccagtggaacagaaactggcggccaaggtcaaaggagcgggacaggtagccgctggggttctccagcaggaagggcagccccagcaccacctgaaggccagcacagattcccagcttggggagggccccacggaagccaaactgtgtgaggagaagaaacagtaacccaggggcgaagagcagcacattcatcttcacagagactgccaggctgaaaaagcagcaagccccagccccagcgctgggccagcaggag

SEQ ID NO: 65406 - DNA, 873 bp, Homo sapiens
ttcgaaaccctatcgaagaccctaggcagtgaggtggaattcccatggcaccgggcttggacctcatcagtgtggagtggcgactgcagcacaagggcaggggtcagttggtgtacagctggaccgcagggcaggggcaggctgtgcggaagggcgctaccctggagcctgcacaactgggcatggccagggatgcctccctcaccctgcccggcctcactatacaggacgaggggacctacatttgccagatcaccacctctctgtaccgagctcagcagatcatccagctcaacatccaagcttcccctaaagtacgactgagcttggcaaacgaagctctgctgcccaccctcatctgcgacattgctggctattaccctctggatgtggtggtgacgtggacccgagaggagctgggtggatccccagcccaagtctctggtgcctccttctccagcctcaggcaaagcgtggcaggcacctacagcatctcctcctctctcaccgcagaacctggctctgcaggtgccacttacacctgccaggtcacacacatctctctggaggagccccttggggccagcacccaggttgtcccaccagagcggagaacagccttgggagtcatctttgccagcagtctcttccttcttgcactgatgttcctggggcttcagagacggcaagagtagaaagaaagagtagtcacgtgctcccagaaggactctaagtcaagtcacagagctaaaaatacatgaaggtggcaccagctcatggggcactgggcctggctctgcagaggcctctgccttccttcactgtgcaccctgggctcatgcaccaaggcagagaacaggaagaagtgagggg

SEQ ID NO: 65407 - DNA, 2613 bp, Homo sapiens
agaattgatcacttctctgcttcacagtggagctgatatacagcaggttggatacggtggcctcactgccctccatattgctacaatagctggccacctagaggctgctgatgtgctgttgcaacatggagctaatgtcaatattcaagatgcagtttttttcactccattgcattttgcagcgtactatggacatgaacaggtaactcgccttcttttgaaatttggtgctgatgtaaatgtaagtggtgaagttggagatagacccctccacctagcatctgcaaaaggattcttgaatattgcaaaactcttgatggaagaaggcagcaaagcagatgtgaatgctcaagataatgaagaccatgtcccactccatttctgttctcgatttggacaccatgatatagttaagtatctgctgcaaagtgatttggaagttcaacctcatgttgttaatatctatggagatacccccttacacctggcatgctacaatggcaaatttgaagttgccaaggaaatcatccaaatatcaggaacagaaagtctgactaaggaaaacatcttcagtgaaacagcttttcatagtgcttgtacctatggcaagagcattgacctagtcaaatttcttcttgatcagaatgtcataaacatcaaccaccaaggaagggatgggcacactggattacactctgcttgctaccacggtcacattcgcctggttcagttcttactggataatggagctgatatgaatctagtggcttgtgatcccagcaggtctagtggtgaaaaagatgagcagacatgtttgatgtgggcttatgaaaaagggcatgatgccattgtcacactcctgaagcattataagagaccacaagatgaattgccctgtaatgaatattctcagcctggaggagatggctcctatgtgtctgttccatcacccttggggaagattaaaagcatgacaaaagagaaggcagatattctcctcctaagagctggattgccttcacatttccatcttcagctctcagaaattgagttccatgagattattggctcaggttcttttgggaaagtatataaaggacgatgcagaaataaaatagtggctataaaacgttatcgagccaatacctactgctccaagtcagatgtggatatgttttgccgagaggtgtccattctctgccaagctcaatcatccctgcgtaatccagtttgtgggtgcttgcttgaatgatccccagccagtttgcatttgtcactcaatacatatcagggggttctctgttctccctccttcatgagcagaagaggattcttgatttgcagtctaaattaattattgcagtagatgttgccaaaggcatggagtaccttcacaacctgacacagccaattatacatcgtgacttgaacagtcacaatattcttctctatgaggatgggcatgctgtggtggcagattttggagaatcaagatttctacagtctctggatgaagacaacatgacaaaacaacctgggaacctccgttggatggctcctgaggtgttcacgcagtgcactcggtacaccatcaaagcagatgtcttcagctatgctctgtgtctgtgggaaattctcactggcgaaattccattcgctcatctcaagccagcggctgcggcagcagacatggcttaccaccacatcagacctcccattggctattccattcccaagcccatatcatctctgctgatacgagggtggaacgcatgtcctgaaggaagacccgaattttctgaagttgtcatgaagttagaagagtgtctctgcaacattgagctgatgtctcctgcatcaagtaacagcagtgggtctctctcaccttcttcttcttctgattgcctggtgaaccggggaggacctggccggagtcatgtggcagcattaagaagtcgtttcgaattggaatatgctctaaatgcaaggtcctatgctgctttgtcccaaagtgctggacaatattcctctcaaggtctgtctttggaggagatgaaaagaagtcttcaatacacacccattgacaaatatggctatgtatccgatcccatgagctcaatgcattttcattcttgccgaaatagtagcagctttgaggacagcagctgacagcattcggcgtatacctaaggagagttttttccccgaactgacagcaacgattccaaccacggcaagctggcttccaactataacattttactctcaaaggtctccttaaattgggcttgtttttacttgtcctatttaattccccactattagcaggctttggatttgtgcctaaggaataatatgcaaaagaaccaagacagaatgtatatgaagaattgtttttaattttgtaaattaaaaaaaaatttagatcgttacttggaaatggagcctaagtctgtggtggacagataataattatgttttcctgggctgaattatgtagacttgtgtttgacagctatgggtttatttcttagaacattgttcattttcttttctcattatgttacttctagtgttcacctctgtgattaaagattctttggtgaaatagaa

SEQ ID NO: 65408 - DNA, 5264 bp, Homo sapiens
ttttttttttttggcgttagttctctctttatatagactctggttctagaaactcgcctgcagccgctggctggaccagcacacgctgacggggccggactatttacaggcccattgcgggctgtaccttggccacctcccggcacggtgctcagctgtgacgccaaaataagttagggccggccgggcggggcggggcggggacgggggctgtacacacaagtgctgggggctcggggcctcaatactgtcgagggccggggctgtaaacatggccggggcggccctgcccacccctagtggtcggtaacgaccggaagcagagcagccgggcagggctgggaggctcaggcgtccgacaggcagctctggatccggtccacccactgctgggccgagggcacgtcctgggcacagaagttgtaaacgcgacgcgttgtcttcacgtcaaagaaggccttctcgtccacggtcttaggggcacccatagtgggcgtgccaggtgccacagcctccacctccgccaagtagatgacacccttgcactctgtgtccacacggtggtcgtagtagcgcagctggtgcttggtcttgtccagcacgaaccagcgggccttccaaggcttcatgaaggcccccttcttgtacagagtgccctcgtaggacctgttctcactctctgctgtctggaactggctgtacagggtgctggtgctgcggcgggcagcctgacgggagccggatgtggttgagccactactctggtcgctgtccaggctgaggctcagggtggagcccacgggcccctcctgcaggtacacacccagcgagcgacggtggtggggtgcggtggacacaaggagggagctaggggtgccacggccgtctggccggccctcgaggcgctgtgcagccttcacccggtcccaggtgtccttccagcgctcagcgggttggcccaactctgtctccagcctctgcagctcctccagcaggcgtgagatggcgtcaggctgggcccgcgggcagctgtcgtaacagggccacaccacgcggcgcctgctctggggagcgcctccatcagaccgttcttcctctgggggttcagggggcccctgggccagttcccagtcatagggagggccctcggccagcgtctcctcagtgtagaagtcccacaccttcaggttggacacgttgctgtagggccgcaggacctctgcgtcctcgggcgcatacatgtaattgtggaacacaggcgtcctcttgctcagccggtccacatactcccacacagacctgcacggcacctggcccctgcgttcccccttctcctcatacagcagccccagctcaatgcgctcatagtcagagtcgagcaggaaggtccggaaacggcgggacacatggtggtagccgaggaacttgaggtagaactggctgaactcaaactccatggggaactgcaggtggacctggtgtacgcagtccaggaactgcaggaagacgggtgtgaagccgctgctctgcccggccagggtgtgagctccacggtggctgaagcgatggccgaaggacagccactccttctccaccagcaggcgaaagccctccagcgtgcggtagaaggggtctgagagcagctgcaccaaggataccacctgggtggtgatgtcccagccatcctccaggcccaccagcacggaggagcctgaatccaggagctccaccaccagcacagacacctgcagcagcttgtggatctggatcagccactctgagtcctccagtgagcgcaggaaggaggctgggctgggctcagcagcggggcagcctgggacacatgctttcagcagtttcttgaagctagccttcacctgccgtgcctcgaatacctcaatgggcaccagctcccactgctgcagggggtctgaccgcacacccttgagctgggctttgtccccaaggatatagagggctgctcgctgcggacgcaggaagcccgggtcgggagggcccccgttggcctggggtggggccagcgcgtctctgccagctagccgggagcccacatcggtgccaaggccactgctgcgtccactggtccggacactgccccacttaccgtgactgcccatgtgggctgaggagaagccgctaagcgtgttgcgtcccgacgcgtcggcgtagcggggcatggagctgaccacagcctgcaggtacttctcctgctccaggctactcgagtccgcctgggactggcctggagaaggtgcgttctgggccttgaagaggccgacgacacctttgccatgcaggcctccagagcgcagcagcaccgccttggaccgcccgctgcgccagcagaccacggggaagcggttctggcgatagcagcgggacacgcgctgcagggcgttgtcctggacactctggggcacgatcagcagccctgggtagctgcggcagatggcatacatgcggttgaccggagaaatgcggaaggctcagacttggcccggctcaggctgctgctcagggtgcccagaccgaggcgctggtagtcgcgacagcaagccctttccaccaggctgctcatggtcatgcggtcggagggcttcagggctgaggacggggtcagcgtgctgggctccagctcctccgacactgagatctcgtcctcctggtcctcagggggcggctggccccggtgctcccagctgggggggttgtacttcttgcgagtgacatgctgccgcccgatggtcttcttggcgttcttgaccaggttccgggacagggttctgagggaaggacccttgtccttggtgactcgcggtggccggccaggtgtgtgggcagagcccaaggtgaacgcaaaagttggccatgattgttccggcgggtaaccgcagcttaatgcagctgccttacggaaagagctcgggctctgtcagaccccacctcctcgtcaaaggccattttcagcagctggaatgtgcaggagcgcagctggagcccgtcctgcaggagctggtcccacaggggtctggaagctgatgcgcttctccttggtcagcgcagccaccgggaaggagcggaccaccacctgctccccaaccagggggtccgtgggcatccccgtgaagatgacccggtacgtggtgaggaagacggcgccctcagctggggagcaattgtggtcccccagcactgccccccgcgccctcctcacgcccatccggcagcaggtagacgcgcaggccgtccagcacacactcctcacccggcagcaggcgcggccgcagcagcttgggcttctggatgggcggcagcctccggctctcccgctgcacggcctccagggtctcgatgtgcatctggacaatgtctggcaccatgacatgcagccccttgaggtggtcgctggtgaccccactctccgtgcagaccttgtccacaaagcggttgatgaagcggaccacagccccagctacgtcgcaggtctctgcatcctcgaagccgctctccgtgtcatagctctcggccacactgccagccatgctgttggtgaccaggctgttgctggcgctctccaggtcgcccagcccggcacgctcccgaagtaggcggctcttgctgctgtccaggggcaggaggaggtagctcatgcggttggcatagtggatggcctggctgaacaccgtgctctcctccttctgcaccagctcctgctgcttctcacgactcagagttggccacaagcgccgctgctcagaagccacgtctagggcagagcgctcgtcctcctgggaaggtgcctccccaacctcctgggcgggggccaggtcctctgtgggctccaggtagagggcccggatgtgagtctgcacatccccatagaacatggcctcccagaactgtggcgtgctccacaccacgtgctcctgcacacagctgtatgcaaactgcgtcacccccgggctcagcttccggcagaaggctgtgaccagaggcagcagagccgccgcaatgccatgctcgtccagagaagtgcagtcctgcaggcagcagttcatcatacggacgacaaagtcaaactgctggtggtccaggaccgcacggttctgctgcacatgcaggtgcagctcctgggcgaggcagcggcgggcagctcgccccttcagggccctcaacacggctgggagcagcttcttggcctcaagcattttcccctcaaacacgtaggagatgcagttgcgcacaacctccagccgccgggcgctgttgacatgcagcccactgcaccgctccagtatggcagtcatggggggccctgagggcacggtggtcctcctctcggccttcacagctgggggtgcaccctgcatcttggctgcagcctggtccacgatccactgcacggtgccctcatccagccgggggaagggtcggggcacccgtcgcaggtggctgctctcaccgggcctctgtaccttgtgcatcgccacggctgggtacgggttctcgttcttgtagagctgctctgccagttcctggacgtgacgcaggacacgctgggggtggttctcatccgcccgcatccttgccacctcgtgggccaccagctcatcgaacaggtccgtagggcggtatgggaccccacgctctgacacaaagccagcaaaggccatgccctccagcaccttcatcaggaaatcgtcctctaccagcccacgctggcccaggaaggctgccttatggaagcggatgacaggctccgggtggatgcgcacgacgtgcaggcaccagcgatagccctgcagcagctgagcgaacagccgcaggaagaccgcgcgcagctccttgtcctgcatcttcagggaggaggtggatgtcgtgggcggagggaaggcgaggtcagccaactccagctccgggtccaggaccatgctcagcacactgtgcgtctgactctgcagtggctctggcaagggtggaatgtgcacacactcaggaatggtgaccgtccctccatccagatcagcaacaatcacatcgagcagctcctgggtctctgcctggaaggccgcgttgaccccaatgatgaagggcgtgggtgtgctgaggacctccagcagctgagccggcaggatgggcacataggtgaagctgtatctgagaggaaacagcagtgccaggaggcccctacaggcatcggcgagccgctggtagctccgggacaggaagacctcgtgccgaat

SEQ ID NO: 65409 - DNA, 2430 bp, Homo sapiens
ccaggccgtggagttaaatgggacctgattaacggcaaagctaacagtaataaatctcttccaacaccagctgtcctgctttcacccactaaggagccaccacctctgcttgccaaaccaaaactggaccctctgaagctccagcaactccagaaccaaatccgactggagcaggaggccggcgctcggcagcctccgccagccccgcgcagcgcgccgccctcgccccccttcccgccgccgcccgccttccccgagctcgcggcctgcacgccgcccgcgtccccggagcccatgagcgcgctggcctcccgctccgcccccgccatgcagtcctccggctccttcaactacgcgcgccccaagcagttcatcgccgcgcagaacctcgggcccgcgtcgggccacggcacgccggcctccagccccagctcgtccagcctcccgtcgcccatgtccccgacgccgaggcagttcggccgcgcccccgtgccgcccttcgcgcagcccttcggcgctgagcccgaggccccgtggggctcctcctcgccgtcgcccccgcccccgccacccccggtcttcagccccacggctgccttcccggtgcccgacgtgttcccactgccgccgccaccaccgccgctcccgagcccgggacaggcgtcccactgctcgtcgcctgccacccgcttcggccacggccagacgcccgcggccttcctcagcgctctgctgccctcgcagccgccgccggcggccgtcaacgccctggggctgcccaagggtgtcacccccgcaggatttccaaagaaggccagtagaactgctagaatagcctccgatgaggaaattcaaggcacaaaggatgctgttattcaagacctggaacgaaaacttcgcttcaaggaggacctcctgaacaatggccagccgaggttaacatacgaagaaagaatggctcgtcgactgctaggtgctgacagtgcaactgtctttaatattcaggagccagaagaggaaacagctaatcaggaatacaaagtctccagctgtgaacagagactcatcagtgaaatagagtacaggctagaaaggtctcctgtggatgaatcaggtgatgaagttcagtatggagatgtgcctgtggaaaatggaatggcaccattctttgagatgaagctgaaacattacaagatctttgagggaatgccagtaactttcacatgtagagttgctggaaatccaaagccaaagatctattggtttaaagatgggaagcagatctctccaaagagtgatcactacaccattcaaagagatctcgatgggacctgctccctccataccacagcctccacccctagatgatgatgggaattatacaattatggctgcaaaccctcagggccgcatcagttgtactggacggctaatggtacaggctgtcaaccaaagaggtcgaagtccccggtctccctcaggccatcctcatgtcagaaggcctcgttctagatcaagggacagtggagacgaaaatgaaccaattcaggagcgattcttcagacctcacttcttgcaggctcctggagatctgactgttcaagaaggaaaactctgcagaatggactgcaaagtcagtgggttaccaaccccagatctaagctggcaactagatggaaagcccgtacgccctgacagtgctcacaagatgctggtgcgtgagaacggggtgcactctctgatcatagagccagtcacgtcacgtgatcgcccggaatctacacatgtatagctaccaaccgagcaaggacagaactcatcaagctgggagcttgtggttgcttgctaaagaagcacacaaaccccctgtgtttattgagaagctccaaaacacaggagttgctgatgggtacccagtgcggctggaatgtcgtgtattgggagtgccaccacctcagatattttggaagaaagaaaatgaatcactcactcacagcactgaccgagtgagcatgcaccaggacaaccacggctacatctgcctgctcattcagggagccacaaaagaagatgctgggtggtatactgtgtcagccaagaatgaagcagggattgtgtcctgtactgccaggctggacgtttacacccagtggcatcagcagtcacagagcaccaagccaaaaaaagtacggccctcagccagtcgctatgcagcactttcggaccagggactagacatcaaagcagcgttccaacctgaggccaacccatctcacctgacactgaatactgccttggtagaaagtgaggacctgtaatccagcattcttgttaaagctgaaacactgaaacagccattgccttgaccaacatattcctttgtcacattatgtaaaaggcagaaacatacctttgactataaaaaaaaaa

SEQ ID NO: 65410 - DNA, 3376 bp, Homo sapiens
ggccgccacccacccccagatggtgggtccggaggatgccggagcctgctcgggaagaaaccccaagttgctcccggtgcctgcgccggaccccgtgggccaggacaggaaggtaatccgggccacgggcggctttggcggaggcgtcggcgctgtggagccgccggaggaggctgacgaggaggaggagacgccgcctcggcagctccttcagcgttacctcgcggcggccggggagcagctggagccggggctctgctactgtccgctccccgctggccaggccggcgccccgccgccctcggcagccccacgatcggacgcctgcctgctgggctcgggctccaaacaccgcggcgcggaggtggctgatggccgcgcgccgcggcacgaaggcatgaccaacggcgactcgggttttctgccgggccgggactgtcgcgatctggaagaggctcgcgggctggcgcgcgccggcggccgggagtcgcgccgccgccgcccctacggccgccttcgcctggaggggcctggcgacgaggacgcggacggcgcgggaagcccgtccgattgggcctctccgcttgaggacccgctgcggagctgctgcctggtggccgcggacgcccaggagcccgagggcgcgggcagcgactcgggggacagccccgccagcagctgcagcagtagcgaggactcagagcagcggggagtcggcgccgggggtcccgaggagggcgcgccccctgccacctcggccgagaggactaatgggggtgcggagccgcgcctgggcttttctgacattcacttcaactctcgcaacacgttccaggtgagccgcggtcagagcgcccgcgatcacctgcccccggcggggccgccggtgcccttgcccgccgcggagcagggtcctgcgggggcttcggcccgggctcgacggagtggcggcttcgcggacttcttcaccagaaacctttttccaaaaaggacaaaaggacctcaaatcagttgtccatagtgctcctggttggaaattatttggtaaagtccctcctagagagaatcttcagaaaacatccaaaatcattcagcaggaatatgaagcacgaacggggaggacctgtaaaccaccacctcagtcttcaagacgcaagaattttgaatttgagccgctttctaccactgccttgattcttgaggatcgaccatcaaatcttcctgccaaatctgtggaagaagctttacgtcaccgacaagaatacgatgagatggtggctgaggctaaaaaacgagaaattaaggaagcacataaaagaaaaagaatcatgaaagaacgatttaagcaggaagaaaatattgcaagtgcaatggtaatttggatcaatgaaatactgcccaattgggaagtaatgcgtagtacaagaagagttcgagaattgtggtggcagggattgccccctagtgtccgtgggaaagtttggagtctagctgtaggaaatgaactaaatatcactcctgaactttatgaaatcttcctctcaagagcaaaagaacggtggaaaagtttcagtgaaacaagttcagagaatgatacagaaggtgtatctgttgctgatcgagaggccagtctggaattaattaagttggacatatcccgtacatttccatctctctacatctttcagaagggtggtccatatcatgatgtcttgcatagtattttaggggcatacacatgctacaggcctgatgttggttatgtccaagggatgtccttcattgcagcagtactcattctcaatttggaagaggcagatgcctttatcgcatttgccaatctcctgaataagccatgccagttggccttttttcgtgtggatcacagcatgatgttgaaatattttgcaacatttgaagtattctttgaagaaaatctttccaaattatttcttcacttcaaatcttacagtcttacaccagatatatacttgatagactggatcttcacactatatagcaaatcactaccacttgatctggcctgtcgagtctgggatgtattttgcagagatggggaagaatttttatttaggactggattaggaatcctccgattatatgaagatattctcctgcagatggactttattcatatagcacagtttctaactaaattgccagaagatatcacatcggaaaagctgttcagttgtattgcagccattcagatgcagaatagcaccaaaaaatggactcaggtctttgcatctgtaatgaaggatattaaagaaggagacaagaacagtagtcctgctttgaaaagctagtcttcaaaattgacagactaactgacatagaaaaagtggtttttggataaaggttttttgtttcctatgtaaaaggcgtggaagaaaatgttggagatacctaaaagaatcaagaggtggaaaactgctgattttacattttatggctgaagtaaatgaaataagtaacttattgacagtattaataaactattattttgtagggtagggtcattttttcaaagggaaaaggttttaagtggtgagtttatattccacaatttggagtaaacaaaatgcaataaatttttaaaatagctttgaagatacttcaaatttttacatcttttcttttgtaacagttaccacaaagatattctggaggctagagtaggattgttaaatactactgttaacctccaaagtactatagtacagacattgtttccagttctgaccttttgaagatattatagaccagtaatgaacagatttggttgtaaattatttaagtcactgaagatgtcatttatcttcattcacaagttggggcaaattcgagttacctaggaactggaaatgttggtgggagattgtttattgtttgtttagatgtttttccatagtatggtgtcccattggttttttaagggaaatttttggtcttcccttaagggaattcctatcactcagagaattttagccattctgggttctagtctaaccaaattattcatcctaataatttgacattaagaaaacctataaataactggtagaaggaaagtgctttgcacttcagtggattgaagacttgactttgagagtaagtccaaaaacatatatgatgtttctcagtgataagagtaaaaagtaatgaatcctgagagttcttaaacagcatgctacttggcaagacttcatattttttagttacaattcttccactgtttaactccagtttgaaatttgaaatctaatatgtagctaaatctgtgacttgtaaaactctatgcataatttttcctaatcagtggaaataagaataaaagaaaaaggtaaagtta

SEQ ID NO: 65411 - DNA, 1824 bp, Homo sapiens
ggagcgcagcctcaagaagcgccagtcgctgcccgcctccccacgtgcccgcctctccgccagcaccgcctctgagctcagccccaaatccaaggccaggccatcctctccctccacatcctggcacaggcctgcctccccctgccccagcccagggccaggccacactctgcctccaaagccaccgtccccccgaggcaccactgcatcccccaaggggcgggttcggaggaaggaggaggcaaaggagagccccagcgccgcagggcccgaggacaagagccagagcaagcgcagggccagtaacgagaaggagtcagcagccccagcctcaccggcaccttcgccggcgccctcgcccaccccagccccgccccagaaggagcagccccccgcggagacccctacagacgctgctgtcttgacctcacccccagcccctgctcccccggtgacccctagcaaaccaatggccggcaccacagaccgagaagaagccactcggctcttggctgagaagcggcgccaggcccgggagcagcgggagcgcgaggagcaggagcggaggctgcaggcagaaagggacaagcgaatgcgagaggagcagctggcacgggaggccgaggcccgggcggagcgggaggcggaggcccggaggcgggaggagcaggaggcacgagagaaggcgcaggccgagcaggaggagcaggagcggctgcagaagcagaaagaggaggccgaagctcggtcgcgggaagaggcggagcggcagcgtctggagcgggaaaagcacttccagcagcaggagcaagagcggcaagagcgcagaaagcgtctggaggagatcatgaagaggactcggaagtcagaagtttctgaaaccaagaagcaggacagcaaggaggccaacgccaacggttccagcccagagcctgtgaaagctgtggaggctcggtccccagggctgcagaaggaggctgtgcagaaagaggagcccatcccacaggagcctcagtggagtctcccaagcaaggagttgccagcgtccctggtgaatggcctgcagcctctcccagcacaccaggagaatggcttctccaccaacggaccctctggggacaagagtctgagccgaacaccagagacactcctgccctttgcagaggcagaagccttcctcaagaaagctgtggtgcagtccccgcaggtcacagaagtcctttaagagggtttgccttggatccgggcacagttgtgagggctcctctgcatcacctaccaggatgtctggaggagaaaaagacagaacaaagatggaagtggcctgggcccctgggggtgggtcctctctgttgtttttaatctgcaccttatagactgatgtctctttggccggagccagatctgcccctcagtgcattcgtgtgctcgcacgcgcagacatcccttctcccccatacacacatatacactcacagcctctctggcctcttcccttggggaggggccacctgtagtatttgccttgatttggtggggtacagtggatgtgaatactgtaaatagcttgtgctcagactcctctgcgtggagagggtgggtgcaggaggcagaccctccccccaaagccccctggggagatcttcctctctctatttaactgtaactgagggggatcccaggtctggggatgggggacaccttgggccacaggatactggttgcttcaggggtacccatgccccctgccctcgcctggaatcagtgttactgcatctgattaaatgtctccagaaataaagaataattctgccaaaaaaaaaa

SEQ ID NO: 65412 - DNA, 1992 bp, Homo sapiens
  misc_feature (1)...(1992): n = a,t,c or g
ttttttttttttgtggtggatgagcactggggactttattacacggaacggcactcgtgacaacggaaggggtgggcagaaatgcaggccggaacattccaccagtccagggacggttggtcattcagaaagtatgtatttccagaacactcagtagtaaggccgtctgggattgttcagggggttgggccggaagcggtaggccagcatcatcctcttgcggaaacgccttatacttctctgtcctccttgaagagctccgccggccggtcaatgccgaagccaagcgccgtccactgtggtggtgcccttgttcactgggttcttgatggccctggccctctgagcccagcccctcgccctccttccagcccatcttcatcagcatgtggtagccgatgttctccacagtcagcttgaactccttgtactctgagtagtcaggctcacggccctccttcaggggccttgaaggtctccataaacttttccagctcgtctggaggcaggaagtctccgatgaagtgcttgccccggcccatctttgtcagctgctcggcccattccctggtcttatccnaacttcccatgcgcccgcaagctggtgctccccagtgcccagactcgttgccacctccctatcactgtgatagcccgccttgtgctgttggactgccttctcccacagcagctgcatgtcctgcatggcccgcttgtgctgcatgatcatgtcgtacatctgctgcatctcctgctgctccttcagctgcttcttctgggcgtctgaaagctctgtgacgcccactagacccacaggcttccccttctcatagccgagccccttgaggtcctgaactgacagaggcgagggagaggcatccacgtccctctgcaccagttcagcaggtgggagctctaccttaatcctcttcaggcccccaccggctcttccgcttcctcttcacggtggctgcggaggctggcttcccgggggcagctggagcagggatgatagtgggcgcaggcgtggacgaggcggggcaggtggtggctgggggtaaggaccctgacagggcctcaggaggggacttgcgcttcaggccgggatcaggtgctgtgaaagctgcctgtggagctggccttggctttccggaactcctccagcttctgtcggtagtacttgtacccttggctattgggctcatacagaaagctgaatgccctggttctcacggttgttctggagggcaatggtttccacctcggaacccccgtccgctatgaacctggccaacttttctgcaaggttcttgacctcttcgtcctctgggggtgaaactttctgagaggctgcctgcgacttctgtgcttcctttcttatctcagccaccttcttcctgtagtagaggaattccctgctattcttatcgtgcaaaaatgcaaatgctgggttatccttgtagtcctccatagctactttttctaactcggggcctccttctgccacaaagcgggccaatttctctatcactttccgagtctcggctccctctgggggtgaaactttgatctccagccactgctcatagtcctcctcctcgtcctcgtcaggggactggaagacactcgggcggtgcgccacgggcagctgcttggcgtgggagtagctcttcacagggcccggcaggctggccagccccaggcctgtccgcctgctgatgagcagggacctcttcccagcgttcagaaactgctgcaagaagctaccatcgttggcaaacttgttggaaatgcaggaagagttgtgtgcatttgtgatttcgccaggatgtgggggctgagggctggccacctgattctgcttggctttctgttccattttggcttcaatttcccgtttcttctgagcgatgagctcttcctggtgaaggatgttcatgttcatttttccagatttagggggagcaaccccaaaccaccggttagcctttc

SEQ ID NO: 65413 - DNA, 1960 bp, Homo sapiens
ttttgactttgcaggatgtgctttattttaagtcagccctgaacccaaactacacaggatcaatttttgacatattctagtccattcaatgattcttctcagaaactgtatcttaatatggaatgaaaactacatttcaatcataaatttttcatgctacattgttatttaatgaagaggttgtattaccaataataataatttaagaaaaggccatttttatttccccaagctcaatatacatatttctttcataattatgaacttaaaaaaacccgtctcagatgtaaaaatgtgaattggaatatgtaaactctttgatatacctgaaaaacaggaaggaaaatgtcacatactgggaaaaccccttccctttaatcatggaaatgggaaaaagcccgtttaaggaaagggaaggccaaaaaaccgttcctgacctcagtttttaaaaaggttccaagtttttttgggccccctggggtggtctttttacttttttgcccccagtttgtttgcccaggagaccccagccctccagaatggtttccctccttgaaagtggtccctggtgggcccaaaccaaaccgggggtccccccctttgttttgctccctttttttttttttcctgagaagtcactggtgtttaatggaaaggtatcctattagtccttggttaagataaggcagtaagagtatcactaatactatgtttttgcttagaatgaggctgatcctttccactggcgtcttcacgggcaattagttccctctcttttgctcctagaaacacaggtaggagctgtctgccccctattgctgttgcattttcctgagtgtgttgaaggctcatctagtctcatcacaagcagcttccccagtggggatgggagcgctgtatattgcattgtagcatctctccaaggaaagtgcacggggccccaacaggggaaaacaccaggcatctttctttctgactcctcttctgtttctcttaggggacggggcccataaatgattccttcacatgatcaatcagaatgcgagacactgttgactaaaacataaagcaagtagccctgatttcagagaaatggagttacaaataacattttcaacagtgccttaacttgcaaggtagcttttactgcagaaggatatcagctccttttgtctacctatcagaagagaaacaaaccatttccgtcgaactagaaatgcttagctcttatgagaatattgtgcttttaaaaaaaattcaaatgttaacattatttgcagtctgtgttctaaggtttcaatttgttttttctctagtccatttgatcattgtctctggtgagcgatataggaatattaatttggcatagagatcttcttctagctccagttctcctgtctctcgaactaaaaaaatatctgtgcacaacttcaaaattcgatcccacatttggaagctccttcaaacatgatggagtgagaaatcccactgaagaattcacggacaaatttcccaatcacaaggacaactgaagcatataatcccataataccatagccagcccaggaaccccagacttgggggactgactttgtcattgaagaccaccagttccagggcctgagagttcggattgtatattctgtttccagtcaggttgagaacccaccactcactgttatatttagttgtattgtctctggacaaaatgatggtaatatccatgaaattattttcagataaaagttgctttataggttttgagttagaatcactaggtgctttcacataatatggataaatcttttctatggtcactggtgtttttgaactttctgtgctgttgcctgctatcattttagcgatattctttcgagtaatatttttaagaggaaaagaaagcttatctgttgctatttccgattttgcacccagacttaagtttctctgaatactccat

SEQ ID NO: 65414 - DNA, 754 bp, Homo sapiens
tttttttcaccaaacaaaacaagatttttaatgtgataatggattgcctatttcacatgttaaattgctctatgcagggagatttcacaatccaggatccatagccatgttgttgtaagtaggatttcaacttacatttagcttcttgataggaggcagacatacacttagctgcatgatatgtaccagcttcaagtaattcttttttagcttctttggcaagcaggttaaaccgacttaacatttgcagccttacaaagccgacttgccattgacataccacttttaaatggggaactttcaagtgatcttcccactcaggccatccacaatctccaaagaaacatctccttggtgcccaattcagactcagaaatttatattccaagttcatttgaaggggatatgcagagggtactaaactaatatgaggtctgttgactaagtaaaacattggaagttttgaagtgagtgcatcatcaacacgttgctttatagcgatttctaagcctctggtatcactgcaattcccatcaccaataagtatactgctgatgtaaactggctgtataaaatgactcagcaatgctccctgtacaccaagcacttcccatctggtcaatttgtcacttgaggacatactgcttattctattaacaccatctttaggacagtaaacagtcagataaattttgccttcaacagccacgtggagacagagttcttcattcggacgcgtgggcggacgcgtggg

SEQ ID NO: 65415 - DNA, 1815 bp, Homo sapiens
acctccaggctgcaaaactggcccttctagcctccatccaggccttcagccttctgcgaagccgcctgggagacagggatttctccaggctgctggacatcaccccagcctccagcctgagctttgtcctggacaccacgggcagcatgggtgaggagatcaacgctgccaaaatccaggctcgccaccttgtggagcagcggagaggcagccccatggagcctgtccactatgtcctggtgccttttcatgacccagggttcggccctgtctttacaaccagtgaccctgacagcttctggcaacagcttaatgagatccatgccttggggggtggagacgagcctgagatgtgcctgtcagccctgcagctggccctgctgcacacacctccactctcagatatctttgtcttcacggatgcctcccccaaggatgcctttctcaccaaccaggtggaatccctgactcaggagcggcgctgccgggtaacattcctggtgactgaagatacatcaagggttcagggtcgagctcggcgtgagatcttgtcccctctgcgttttgagccatacaaagcagtggccctggcctcaggaggagaggtgatcttcaccaaagaccagcacattcgagacgtggcagccattgttggggagagcatggctgccctggtgactcttcccctggaccctcctgttgtggtgcctgggcagccacttgtgttcagcgtggatgggctgctccagaagatcacagtccggatccacggagacatcagcagcttctggatcaagaaccctgcaggggtctcccagggccaggagaagcgggggtcctctagtcacactcgccgctttgggcagttctggatggtgaccatggatgaccctccacagacaggaacctgggagatccaggtcacagctgaggacacccctggggtgagagtgcaagcccagacctccctggacttcctcttccactttgggatccccatggaggatggaccccaccctggcctctaccccctgactcagccagttgcaggtcttcagacccagctgctggtagaagtgacagggttgggttccagagccaatcctggggatcctcagccgcatttctcccacgtcatccttcgaggggtcccagagggtgccgaactaggccaggtgcccttggagcccgtgggacctccggagcgaggtctcctcgcagcctcgctgtcgcccacgctgctgtccacccctagacccttctccctggagctgattggccaggacgcagcggggcggcgcctgcacagggctgcccctcagcctagcactgtagtccctgtccttctggagcttagtggcccctcgggtttcttggccccgggcagcaaagtcccgctcagtctccgcatcgccagcttctcgggccctcaggatcttgaccttaggactttcgtcaaccccagcttctccctcacctccaacctctccagggctcacctggaactgaatgagtcggcctggggccgcctgtggctggaggtcccagattcagcggccccggattccgtggtgatggtgactgtgactgcagggggacgagaagccaacccagtacccccgactcatgctttcctccggctcctggtatcggccccagccccgcaggaccggcacaccacccctaccggctcatctgacccgatcctcaccacggccacccctgccttttcccccttcacattggtgactcaaggcagggctggggcagggctggctgcgggcagcccctggtggggcacagttggaggggtgc

SEQ ID NO: 65416 - DNA, 1811 bp, Homo sapiens
tttttttttttttatatataaaactgctttattaaaaagtcagctattaggaaaacaaagcccttacaagggttctatcaaaaagtacaaattttaaataaatgcatcagaaaaatggcagccagatataccagccacagtcacaacctcaaaggccttgtggggaaggaagggagaattagggaggaggttccgagaactcaaggaagaggctgggcacagagggtctttgggtgcctgcagagctgggtcctggagctaccaggcaagaaccctgcttccgttttcctttccttggaaaaatgtaaagaactggcaggtgtaggaaattttgagactggagcagaaaggcacaaaagtcatttataaggtatgattgctcactctagtcctgaggcacatggggtggataaatgggggatcagagccacagggtccctggctctggtcatgcttgcccctggctggtaccatctctgagtttggccacaggttaaattaaggtagaccaagtggactgcataatcctggcagcccggggtctggagccagtctttagatcagatgtgttgcttcattggcaaactggtgtctgccccccaagagatccccccaatgaggagcagcaggtctcctgcctagccctgtcctctgagtcactgtgggtgcccaccctggacaaggaacttctgagggcagtctctgccatccaggatcctgagaagccccaagccccagagccagagtttctccgaatgacaggcagaagcacagaaagctggcgttgaaaccagtccccaccagctgctggccccacacccatggtcactgctgacacgcctccttggtgacattaggcagtgggtaggcaaagagggagaagtccaggatatacttaggcagcacatcctgcagcagggcccggggggcactgcacaagtggtaatgcaggctttcggggctggctggccggtaccaggcctggcgagctggaaatcggacgtgaggtggtgcccgtacccactccagcacctgatttgcatcagcctccagcctctcataggagcccacaaagtcatagtgcacggcacaaggctggcacaggtggtacacgggcatccaatgctcattcatgcgctcagggtcctcatccaccaggtatctcaggaactcggggaatgtgacatcgtcgcctgcagggctgggccccgctccagccctgtaccgcctcactatctcagccccatagcgttgctggtactctcggatctcgccaaacttgttgcggtaggcagagaggaggcgttccaagggctcccgcacaaacaggaacttaaagtagtgctgcaggcggtagcgaatctcctcaggccgcaggtcggccaggaacaccaggtcactgcggtggtccatcttgaggcggacgtccacgctgtccaggacgcctgccagcaccttcatcacccgcttccagttagagcaggccaccttggggacgtagcagtagaggaagcggtaacggtcacttacgaggatgtggcgcagcagggtgcgccgctgccccaccggcaagtcccaggggtcccggggcatgcctggctgtccgcacaccgcccgcagggtcctgttccggacgtcctgccgcacttgcaagtccgcgtccccagccctgagggacaggcccccaggcttgggggctttcccgcgccaggctgtgccctcgcggccgggcgggtgcaggggcaggggcttcttctcggccaggatgccccgctcgattatgagcagcagcccgctggaggccacgatct

SEQ ID NO: 65417 - DNA, 1522 bp, Homo sapiens
ccacacgcgtccgcccacgcggccgatagatgtacatcgcgagcgggcgacctttctgtccctcgttcggctgtccgcgctcctcgcccagcccctactgcgcgcccgtcctctacgcgggcctgctgctactcggcctggccgccagctccgtgcggagcaacctcacctccttcggtgccgaccaggtgatggatctcggccgcgacgccacccgccgcttcttcaactggttttactggagcatcaacctgggtgctgtgctgtcgctgctggtggtggcgtttattcagcagaacatcagcttcctgctgggctacagcatccctgtgggctgtgtgggcctggcatttttcatcttcctctttgccacccccgtcttcatcaccaagcccccgatgggcagccaagtgtcctctatgcttaagctcgctctccaaaactgctgcccccagctgtggcaacgacactcggccagagaccgtcaatgtgcccgcgtgctggccgacgagaggtctccccagccaggggcttccccgcaagaggacatcgccaacttccaggtgctggtgaagatcttgcccgtcatggtgaccctggtgccctactggatggtctacttccagatgcagtccacctatgtcctgcagggtcttcacctccacatcccaaacattttcccagccaacccggccaacatctctgtggccctgagagcccagggcagcagctacacgatcccggaagcctggctcctcctggccaatgttgtggtggtgctgattctggtccctctgaaggaccgcttgatcgaccctttactgctgcggtgcaagctgcttccctctgctctgcagaagatggcgctggggatgttctttggttttacctccgtcattgtggcaggagtcctgggagatggagcgcttacactacatccaccacaacgagaccgtgtcccagcagattgggggaggtcctgtacaacgcggcaccactgtccatctggtggcagatccctcagtacctgctcattgggatcagtgagatctttgccagcatcccaggcctggagtttgcctactcagaggccccgcgctccatgcagggcgccatcatgggcatcttcttctgcctgtcgggggtgggctcactgttgggctccagcctagtggcactgctgtccttgcccgggggctggctgcactgccccaaggactttgggaacatcaacaattgccggatggacctctacttcttcctgctggctggcattcaggccgtcacggctctcctatttgtctggatcgctggacgctatgagagggcgtcccagggcccagcctcccacagccgtttcagcagggacaggggctgaacaggccctattccagcccccttgcttcactctaccggacagacggcagcagtcccagctctggtttccttctcgggtttattctgttagaatgaaatggttcccataaataaggggcatgagcccttcctcacgaaaaaaaaa

SEQ ID NO: 65418 - DNA, 961 bp, Homo sapiens
ccggcacgagttcatggcgctgtgcatgcgggacttcgtggaccactacaacggctggatctggggtcaccagggcccgcagctgctcacgcgggtcttcaagaagtggtgttccatccgcagcctggccgagagccgcgcctgccgcggcgtcaccaccctgccccctgaggccttctaccccatcccctggcaggactggaagaagtactttgaggacatcaacccggaggagctgccgcggctgctcagtgccacctatgctgtccacgtgtggaacaagaagagccagggcacgcggttcgaggccacatccagggcactgctggcccagctgcatgcccgctactgccccacgacgcacgaggccatgaaaatgtacttgtgaggggcccgccaggtcacctccccaacctgctcctgatggggcactgggccgcccttcccggggaggcaagattgagggcccgggagagggaggcccgagctgccaccgggcttaggcaggctgttgaggagctgtgggagcaggcccagtgggaggctgtggacaccccgaggacagtgtcctgtctcgaggcagggctgacacatggtgccatagccagcggagggcgctcagtgagtgccccgggccttctagacaacaggcaggaaggatgaacctcagggcacccccaggtggtgcggaaagccaggcagttgggacagaggtgcccacgagggcagaggccggtgctaaggggatggggaagaagggacaagattcccagagaggagaggaggctgttggtaggaaagtggcagggctgggggagacccagcctccaaggtccggggcggatgatgctctgttcttttctggttttggttcctctttcctggggggtggaggaggtcattccgccactggctttcgcactatgccatataacgccatcctggtctaggacctcttttg

SEQ ID NO: 65419 - DNA, 1944 bp, Homo sapiens
cccctcctccccctcctctccctaatcaagtaccccctcctcctccaccacctcctgccccacccctccctgcatctggattctttttggcatccatgtcagaagacaatcgccctttaactggacttgcagctgcaattgccggagcaaaacttaggaaagtgtcacggatggaggatacctctttcccaagtggagggaatgctattggtgtgaactccgcctcatctaaaacagatacaggccgtggaaatggaccccttcctttagggggtagtggtttaatggaggaaatgagtgccctgcttgggccaggaggagaagaattgctgaaaagggatcaacattagaaacagaacaaaaagaggacacaggtgaagattcagagcctgtaacttctaaggcctcttcaacaagtacacctgaaccaacaagaaaaccttgggaaagaacaaatacaatgaatggcagcaagtcacctgttatctccagacgggattctccaaggaaaaatcagattgtttttgacaacaggtcctatgattcattacacagaccaaaatccacacccgttatcacagcccagtgccaatggagtccagacggaaggacttgactatgacaggctgaagcaggacattttagatgaaatgagaaaagaattaacaaagctaaaagaagagctcattgatgcaatcaggcaggaactgagcaagtcaaatactgcatagagggaccagactaaggagagataggactttaatctggaggaaaaatatcctacaaacaacaactgttcacaacagcaaacccctacatttatgagctgtaagaagaaaatggagacaaacagaaggagggaaaaaccaacctactctgaaagccttcagacattatgactctggtgataagctctttccctctccgtttgctgcttttttctggcctttacaacagaatggaagagaatcatttaagagttcctgtaacagttatgcagaaaatactaaaacccatcaggcaagatcaccacgcattgaaatattttcatatcaagataaagtcgcacattttccacaatacattgctaaaataaagaggagaaaggcttaggaagtttttttgcagagagtgctggtaaagaattgagcaagtttgctattgtattgtaatgtttctctcaggtttgttcttcctatcatgtttgatattccatgaataattgagatcagccctatgtaagttaagatcataatatgtggaacaaatggaattgtaagtgctttcaaagggtaatatttataagaaagtgtccgaaaaatgtttcttcagcttgagaaattttagaatgataggaagtttctcgagttagccttcatgcaattttgtagattaaaacataaaatttgtccagaacttaaagatttagatgccttcctaaattgttacaatgctttaccaaatctatgacttctacataacacaaaccagtggtcaaatgtaaacactatattgtagatttactgtaggttttcaaccttttttagatttatgcatgtggacatttttataatgtaattacaatcaccacaaggttagcttttttaattgcagacagtaatgcatgtcacactaatatgtagtggccttttcaaggcctagtcccagggaaaacattttgtagagtataggggagtgggaggaaggggaggaataattttttatttaaagttgatttctgcactatctttttctcagttacctgcatgaataaataatgagaaatattttgtgactttaattggtaaatatgttacaaaaccaagtacttaatcttttacatcatgtcttcagctatttgtattttaaccagtaatttcaatggtctgaaacatgattctgagcttcacataatatcttaactgtggaactcaaaagtttgat

SEQ ID NO: 65420 - DNA, 1856 bp, Homo sapiens
gaggaacgcagggtgtcacgcctgtttcagtttccccaagattcacgctgaaaacgcccctctcccaagtgatggcgttgggaagtgggggtctttgggagtcatgaggcctcatggatgggatcagtgcccttacagaaaggactccagagagcaccctggcctcatccatcatctgaggacacacagggagaaggcgccatctagaagccaggaactgggtactcaccagagactgaatctaccataccttggttttctgggacctccagcctccagagctgagacatgagatcatacaaatgctctcagagagggtacagtaagtgcaggtgccctggggtcctccagcatttatcagggagcccggctacacttctgccagccttggtttctaccccccacctcttcccagctgtgaccctgccctctgtgccccaggggtgctggggaggaggcagcactgcagaccaggaacgtgggccagccacgggcagagcgtggccccatctgcgtcccgtgggcccagcgcccatctccagaccccaggccgccctgtgggagaggtgcgtggccaggcaggaggacctctgcgtcctctgtttattgttttgcagcaggaggcccaacatagaacatactcgccagtactcggctgtgcaaaacaggggctagcgctgaagtacaaatgggaaaacgtgattcttttgttttaaataaatacttagaacacgacttggctcctacaagcatctggactctaggtctcagtactggagtgtctcacccatgggccccacgcagggacgccacggttccctcccaccccgtgatcaagacacggaatcggctgccgatggttggatcgcaatgcgccccttttctagagccttccccggccatctacaggcaggatgcggctgggaaaaagacaactggaatttctcgaaggttgatggtccgcacggttgaggattctacgtggttctcttggttcccctggtgtgtgtgtgtgtgtggaggaggccgcggcccttagatcaccttcttgagctcgtcgtacaggaccagcacgaaggcgccccccatgccccgcaggacgttggaccacgcacccttgaagaaggccttgcccccctcatctctgaagatcttcctccaacagtcgacggtgcccgtgtacatgatgtcaagctccttttgcggcccggacttgcatcatcatgcgcgcgcgccgcaccgtgtcggagggggtaggacaccacgcccggccaccggccgtcacggttctggcgcgattcatccggctcaacaggatgtagcgtgttacttggggtcggggaagcatgcctcttggcccgtatcgtacacgccgtaggtaggactgccggatagatgatagtggccgtgaacggagacactggaagccctggtacaggccccgggatgccgtctgtacttggtgaatcttcaccaggaagtctccccaggcctcggaaacttgcgctctgttgccagagttttccacggtccgatgtcgaggcggtttctgggcgaaatccaagcgggtacacgaagcagagggaggtcgcgccggccgcaccgccggaggccaggttgcccgcaaagtacctccagaacgcgtgtctgtccacgccccccaggaagatctgcttgtacttatccttgaaggcgaagttgagggcttgagtggggaagtagcgaatgacgttggcaaggttgcccctccagaaggacagcacgccctgctccttggggatgcggacaatgcagtccacgatgcccttgtactgcttgtcggcggcgatctgcttgctggcgtgctggacctgcag

SEQ ID NO: 65421 - DNA, 3671 bp, Homo sapiens
atggatccgccggcgggagccgctcgccgcctgctctgccccgcgctgctgctgctgctgctgctgctgccgccgccgctcctgccgccgccgccgccgcccgcgaacgccaggctcgccgccgccgccgaccccccaggcgggcccctggggcacggagcggagcgcatcctggcggtgcccgtgcgcactgacgcccagggccgcttggtgtcccacgtggtgtcggcagctacgtccagagcaggggtacgagcccgcagggccgccccggtccggaccccgagcttccccggaggcaacgaggaggagcctggcagtcacctcttctacaatgtcacggtctttggccgagacctgcacctgcggctgcggcccaacgcccgcctcgtggcgcccggggccactatggagtggcagggcgagaagggcaccacccgcgtggagcccctgctcgggagctgtctctacgtcggagacgtggccggcctagccgaagcctcctctgtggcgctcagcaactgcgatgggctggctggtctgatccggatggaggaggaggagttcttcatcgaacccttggagaaggggctggcggcgcaggaggctgagcaaggccgtgtgcatgtggtgtatcgccggccacccacgtcccctcctctcggggggccacaggccctggacacaggggcctccctggacagcctggacagcctcagccgcgccctgggcgtcctagaggagcacgccaacagctcgaggcggagggcacgcaggcatgctgcagacgatgactacaacatcgaggtcctgctgggcgtggatgactctgtggtgcagttccacgggaaggagcacgtacagaagtacctgctgacactcatgaacattgtcaatgaaatctaccatgacgagtccttgggtgcccacatcaacgtggtcctggtgcggatcatcctcctgagctatggaaagtccatgagcctcatcgagatcgggaacccctctcagagcctggagaatgtctgccgctgggcctacctccagcagaagccagacacgggccacgatgaataccacgatcacgccatcttcctcacacggcaggactttgggccttccggcatgcaaggctatgctcctgtcaccggcatgtgccatccggtccgcagctgcaccctgaaccatgaggacggcttctcctcagcgtttgtggtggcccatgagactggccacgtgctgggcatggagcacgacgggcagggcaaccgctgtggcgacgaggtgcggctgggcagcatcatggcgcccctggtgcaggccgccttccaccgcttccactggtcccgctgcagccagcaggagctgagccgctacctgcactcctatgactgcctgctggatgaccccttcgcccacgactggccggcgctgccccagctcccgggactgcactactccatgaacgagcaatgccgctttgacttcggcctgggctacatgatgtgcacggcgttccggacctttgacccctgcaagcagctgtggtgcagccatcctgacaacccctacttttgcaagaccaagaaggggccccccttggacgggactatgtgtgcacctggcaagcattgttttaaaggacactgcatctggctgacacctgacatcctcaaacgggacggcagctggggcgcttggagtccgtttggctcctgctcacgtacctgtggcacgggcgtgaagttcaggacccgccagtgtgacaacccacacccggccaacgggggccgcacctgctcgggccttgcctacgacttccagctctgcagccgccaggactgccccgactccctggctgacttccgcgaggagcagtgccgccagtgggacctgtacttcgagcacggcgacgcccagcaccactggctgccccacgagcaccgggatgccaaggagagatgccacctgtactgcgagtccagggagaccggggaggtggtgtccatgaagcgcatggtgcatgatgggacgcgctgctcctacaaggacgccttcagcctctgtgtgcgcggggactgcaggaaggtgggctgtgacggtgtgatcggctccagcaagcaggaagacaagtgtggcgtgtgcggaggggacaacagccactgcaaagtggtcaagggcacgttcacacggtcacccaagaagcatggttacatcaagatgtttgagatccctgcaggagccagacacctgctcattcaggaggtagacgccaccagccaccatctggccgtcaagaacctggagacaggcaagttcatcttaaatgaagagaatgacgtggatgccagttccaaaaccttcattgccatgggcgtggagtgggagtacagagacgaggacggccgggagacgctgcagaccatgggccccctccacggcaccatcaccgttctggtcatcccggtgggagacacccgggtctcactgacgtacaaatacatgatccatgaggactcactgaatgtcgatgacaacaacgtcctggaagaggactctgtggtctacgagtgggccctgaagaagtggtctccgtgctccaagccctgtggcggagggtcccagttcaccaagtatggctgccgccggaggctggaccacaagatggtacaccgtggcttctgtgccgccctctcgaagcccaaagccatccgcagagcgtgcaacccacaggaatgctcccagccagtgtgggtcacaggcgaatgggagccatgtagccagacctgtgggcggacaggcatgcaggtgcgctccgtgcgctgcattcagccgctacacgacaacaccacccgctccgtgcacgccaagcactgcaatgacgcccggcccgagagccgccgggcctgcagccgcgagctctgccctggtcgttggcgagccgggccctggtcccagtgctcagtaacctgtggcaacggcacccaggagcggccagtgctctgccgcaccgcggacgacagcttcggcatctgccaggaggagcgtcctgagacagcgaggacctgcaggcttggcccctgtccccgaaacatctcagatccctccaagaagagctacgtagttcagtggctgtcccgcccggaccccgactcgcccatccggaagatctcgtcaaagggccactgccagaggcgacaagtcaatattctgtaggatggaagtcttgtcacgctattgctccatccaaggctacaaaagcgttgttgcaaaagtcctgtaacctgtacaacaaccccaccaacgtggagggcaggatagagccaccgcctgggaagcacaacgacattgacgtgttcatgcctaccctcccagtgcccactgtagccatggaggtgcggccatcaccaagcacccccctggaggtccctctcaatgcctccagcaccaatgccacagaggatcacccagaaaccaatgccgtagatgaaccctacaaaatccatggcctggaagatgaagtccagccacccaacctaatccctcgacgaccgagcccctatgaaaagaccagaaaccaaagaatccaagagctcattgatgagatgcggaagaaagagatgctcggaaagttctaataaaatggaaagatagcatccctaaaaaaaaaa

SEQ ID NO: 65422 - DNA, 1306 bp, Homo sapiens
ttttttttttttaaaaatgatctcttctcctttattgccacattcacataaaacgttttgatatatttgggttggtaaaagctaaagaaaattgaagttaaaatatatatggttttagtgttccgaaaagcagttacagattgcttccttggtttaattatcgaagcggtcgaaattctgggtttgaaactcttggaagtcctcagggatggtgtcattgcagcgatacttgaggttggaccagatgatgttttcttgagagaagcagaaaacgccaagtcggcctccacgcattgtggtgtctatggtgacgccagagtcagccaccaactcagagccttcataaaatcgtaccctgatgtagcccacctggggcctgtgctgtaggaaccagcggtaggacaccttgtccttccagcccacattcctggagtccttccacagcagcctgacctggtcactggtgtcccccgtgtgccacagggagttccggagatgctcccctggacctgtcttagacttcacagccttgagctgaatgccaggttctgcaactgctcggaatggggtggcttgccaatatgtctgctccgtctgcttccacatgaccacgtagaagctggagctatcttggtagccaaagataaagcctgcatagtcatcatctgtctgggtattcacatggaaggtcccttcgaagtcaactccattaaaaagctgtgtaccccactgccaggccaggatcactgttcatggtctgtacaatctccatgccctggttcaggaccacccagttgggatcgatctgggcatccccttcaggatccaggaccacggtctggtaagccctgaagtcggtcagggtgacctctgcgttctctgggcagacgtcgatccgatcgatgacctggtcctggtcaaagtcagactcacagatgtctcccactccgtcgctgttgctatcctcctgggctgggttggggaccagccggcagttgtctggtccagggggcaccaggtctgggataccatcattgtcatcatcatcatcacactcgtcaccaattccatccttatcggtgtccagctgggcactgttaatgacggtggggcagttgtctgtgctgtcctggtgcccatctccatcactgtcctgattggtgtcacaggagtccccaaccagatcattatccacatcagactggttagggttgctgacatcaggacaactgtcacaggcatcccccacaccatcaccatccttgtcccgttggtcacgattgggaaattttgggcagtacgaaat

SEQ ID NO: 65423 - DNA, 5940 bp, Homo sapiens
atgagttccgactctgagatggccatttttggggaggctgctcctttcctccgaaagtctgaaagggagcgaattgaagcccagaacaagccttttgatgccaagacatcagtctttgtggtggaccctaaggagtcctttgtgaaagcaacagtgcagagcagggaaggggggaaggtgacagctaagaccgaagctggagctactgtaacagtgaaagatgaccaagtcttccccatgaaccctcccaaatatgacaagatcgaggacatggccatgatgactcatctacacgagcctgctgtgctgtacaacctcaaagagcgctacgcagcctggatgatctacacctactcaggcttgttctgtgtcactgtcaacccctacaagtggttgccagtgtataatgcagaagtggtgacagcctaccgaggcaaaaagcgccaggaagccccaccccacatcttctccatctctgacaatgcctatcagttcatgctgactgatcgggagaatcagtctatcttgatcaccggagaatctggcgcagggaagactgtgaacaccaagcgtgtcatccagtactttgcaacaattgcagttactggggagaagaagaaggaagaagttacttctggcaaaatgcaggggactctggaagatcaaatcatcagtgccaaccccctactggaggcctttggcaacgccaagaccgtgaggaatgacaactcctctcgctttggtaaattcatcaggatccacttcggtaccacagggaaactggcttctgctgatattgaaacatatcttctggagaagtctagagttactttccagctaaaggctgaaagaagctatcatattttttatcagatcatgtctaacaagaagccagatctaattgaaatgctcctgatcaccaccaacccatacgattatgccttcgtcagtcaaggggagatcacagtgcccagcattgatgaccaagaagagttgatggctacagatagtgccattgaaattctgggcttcacttcagatgaaagagtgtccatctataagctcacaggggctgtgatgcattatgggaacatgaaattcaagcaaaagcagcgtgaggagcaagctgagccagatggcacagaagtcgctgacaaggcagcctatctccagagtctgaactctgcagacctactcaaagccctctgctaccctagggtcaagggtggcaatgagtatgtcaccaaaggccagactgtgcagcaggtgtacaatgcggtgggtgctctggccaaagccgtctacgagaagatgttcctgtggatggtcacccgcatcaaccagcagctggacaccaagcagcccaggcagtacttcatcggggtcttggacattgctggctttgagatctttgatttcaacagcctggagcagctgtgcatcaacttcaccaatgagaaactgcaacagtttttcaaccaccacatgttcgtgctggagcaggaggagtacaagaaggaaggcattgagtggacgttcattgactttgggatggacctggctgcctgcatccgagctcatcgagaaagcctatgggcatcttcttccatcctggaagaggagtgcatgttccccaaggcgacagacacctccttcaagaacaagctgtatgaacaacatcttggaaaatccaataacttccagaagcccaagcctgccaaaggcaagcctgaggcccacttctctttgattcactatgctggcaccgtggactacaacattgccggctggcttgacaagaacaaggaccccctgaatgagactgtggtggggctgtaccagaagtctgcaatgaagactctggctctcctctttgttggggcaacgggagcggaagcagaggctggcggtggaaagaaaggtggtaagaagaagggttcttctttccagactgtgtcggctctcttcagggagaatttgaataagctgatgaccaacttgaggagcactcacccccactttgtgcggtgcatcatccccaatgaaactaaaactcctggtgccatggagcatgagcttgtcctgcatcagctgaggtgtaacggtgtgctggaaggcatccgcatctgcaggaaaggcttcccaagcagaatcctttatgcagacttcaaacagagatacaaggtgttaaatgcaagtgctatccctgaaggacaattcatcgatagcaagaaggcttcagagaagctcctggggtccattgacattgaccacacccagtataaatttggtcacaccaaggtctttttcaaagctggtcttctggggctcctagaggagatgcgagatgagaagctggcccagctgattacccgaacccaggccatgtgcagagggttcttggcaagagtggagtaccagaaaatggtggaaagaagagagtccatcttctgcatccagtacaatgtccgtgccttcatgaatgtgaagcactggccctggatgaagctgtatttcaagatcaaacccctcctcaaaagtgcagagacagagaaggagatggccaacatgaaggaagaatttgagaaaaccaaagaagagctggctaagaccgaggcaaaaaggaaagagctggaagaaaaaatggttactctgatgcaagaaaaaaatgacttgcaactccaggttcaagctgaagctgacagcttggctgatgcagaggaaaggtgtgaccagctaatcaaaaccaaaatccagctagaagccaaaatcaaagaggtgactgagagagctgaggatgaggaagagatcaatgctgagctgacagccaagaagaggaaactggaggatgaatgttcagaactcaagaaagacattgatgaccttgagctgacactggccaaggttgagaaggagaaacatgccacagaaaacaaggtgaaaaacctcacagaagagatggcgggtctggatgaaaccattgctaagctgaccaaggagaagaaggctctccaggaggcccaccagcagaccctggatgacctgcaggcagaggaggacaaagtcaacaccctgaccaaagctaaaatcaaacttgaacaacaagtggatgatcttgaaggatctttggaacaagaaaagaaaatccggatggatctagaaagagcaaagagaaaactagagggagacctaaaattggctcaagaatccacaatggatatagaaaatgacaaacaacaacttgatgaaaagcttaaaaagaaagagtttgaaatgagcggtctgcaaagcaagattgaagatgaacaagcccttggtatgcagctgcagaagaaaatcaaggagttacaagcccgcattgaggagctggaggaggaaatcgaggcagagcggacctcccgggccaaagcagagaagctgcgctctgatctctcccgggagctggaggagatcagtgagaggctggaagaagccgtgggggccacctcgacccagattgagatgaacaagaagcgggaagctgagttccagaaaatgcgcagggacctggaggaggccaccctacagcatgaggccacggcggccaccctgaggaagaagcatgcagatagtgtggccgagcttggggagcagattgacaacctgcagcgagtgaagcagaagctggagaaggagaagagtgagatgaagatggagatcgatgaccttgctagtaacatggagactgtctccaaagccaagggaaaccttgaaaagatgtgccgcgctctagaagatcaactgagtgaaattaagaccaaggaagaggagcagcagcggctgatcaatgacctcacagcacagagagcgcgcctgcaaacagaatcaggtgaatattcacgccagctagatgaaaaggacacactagtttcacagctctcgaggggcaaacaagcctttacacaacagattgaggaactgaaaaggcaacttgaagaggagataaaggccaagagtgccctggcacatgccctgcagtcctcccgccatgactgtgacctgctgcgggaacagtatgaggaggagcaggaagccaaggccgagctacagagagcaatgtccaaggccaacagtgaggttgcccagtggaggaccaaatatgagacagatgccatccagcgcacagaggagctggaggaggccaagaagaagctggctcagcgtctgcaggatgctgaggaacatgtagaagctgtgaatgccaaatgtgcttcccttgagaagacgacagaaggggctccagaatgaagttgaggacctcatgattgatggtgagaggacaaatgctgcctgtgccgccctggacaaaaagcaaaggaactttgataagatcctggcagaatggaaacagaagtgtgaagaaactcatgctgaacttgaagcttctcaaaaggaatcccgctcactcagcacagaactatttaagattaagaatgcttatgaggaatctttagaccaacttgaaaccttgaaacgggaaaataagaatttgcaacaggagatttctgatctcactgaacagattgcagaaggaggaaagcgcatccatgaactggaaaaaataaagaagcaagttgagcaagaaaagtctgaacttcaggcctgccttagaggaggcagaggcatcctcttgaacatgaagagggaaagatcctgcgcatccagcttgagttgaaccaagtcaagtctgaggttgataggaaaattgctgaaaaagatgaggaaattgaccagatgaagagaaaccacattagaatcgtggagtccatgcagagcacactggatgctgagatcaggagcaggaatgatgccattaggctcaagaagaagatggagggagacctcaatgaaatggaaatccagctgaaccatgccaaccgcatggctgctgaggccctgaggaactataggaacacccaagccatcctcaaggatacccagctccacctggatgatgctctccggagccaggaggacctgaaggaacagctggctatggtggagcgcagagccaacctgctgcaggctgagatcgaggagctgcgggccactctggaacagacagagaggagcaggaaaatcgcagaacaggagctcctggatgccagtgagcgtgttcagctcctgcacacccagaacaccagcctgatcaacaccaagaagaagctggagacagacatttcccaaatccagggagagatggaagacatcatccaggaagcccgcaatgcagaagagaaggccaagaaggccatcactgatgctgccatgatggctgaggagctgaagaaggaacaggacaccagcgcccatctggagcggatgaagaagaacctggaacagacggtgaaggacctgcagcatcgtctggatgaggctgagcagctggccctgaagggtgggaagaagcagatccagaaactggaggccagggttcgtgaacttgaaggtgaagttgaaagtgaacagaagcgcaatgttgaagctgtcaagggtctacgcaaacatgagagaaaagtgaaggaactcacttaccaaactgaggaagaccgcaagaatattctcaggctccaggacctggtggacaaactgcaagcaaaggtgaaatcctacaagagacaagctgaagaagcggaggaacaatccaacgtcaacctctccaaattccgcaggatccagcacgagctggaggaggccgaggaacgggctgacattgctgagtcccaggtcaacaagctgagggtgaagagcagggaggttcacacaaaaatcataagtgaagagtaatttatctaactgctgaaaggtgaccaaagaaatgcacaaaatgtgaaaatctttgtcactccattttgtacttatgacttttggagataaaaaatttatctgccaaaaaaaaaa

SEQ ID NO: 65424 - DNA, 499 bp, Homo sapiens
cagcagctgatctgtcaaccccggccagagccgagccgcctgaggcctgcagtgttctccatcaccactgtgatggcatccgcttccgtgactgtcactgtgcaccctccgcctgtcctgggcccacgcaggacccccaagcggggctctgcacaggccaggagggctacccagggactgaccacgggttgttcatgggtcctcacctgcttttccaggtccagggtgagaggacgaatttgaaggtagaagtcacagagttgcaggatgtggagtgcgaggagtggccccggggaagcagctccaactgagggtgattaaaatctgaagcaggccgggcgcagtggctcacatctgtaatcccagcacttttggaggccgaggcaggtggatcacctgacgtcaggagttcgagaccagcctgggcaacatggtgaaaccccgtctctgctaaaaatacaaagttagccaggcatggtggcgagcgcctgtaatccca

SEQ ID NO: 65425 - DNA, 4655 bp, Homo sapiens
gggagccctgtgctctgaccccagggcccagccacctggccctcacgttcctgcccagcaagccgggtgcccggccccagcccgagggagccagctgggatgcagggcctggtggggcaccctcggcctgggcggacccaggggagggcggcccaagccccatgctcctccctgagggcctgtcttcccaggctctgtccacggaggctcctctcccggccaccctggagccccggattgtgatgggagaggagacgtgccaggccctcctgtcacccagagctgcccggacagcgctcagggaccaggagggtgggcacgcaagcccagacccaccccccgagctgtgttctcagggtgatctttctgtgccttcccctcccccagaccctgattccttcttcacgcctccctccacccccaccaagaccacctatgccctgcttcctgcctgtgggccccacggggacgccagggactcagaggctgagctgcgggatgagctgctggactcgccccccgcctcaccctcgggctcctacattacggccgatggggacagctgggcctcttcaccctcctgttccctcagcctgctggctccggctgaagggctggacttcccctcaggctggggcctgtccccgcaggggtccatggtggatgaacgagagctgcacccagcagggaccccagagcccccgtcctctgagtccagcctctctgcagacagcagctcctcctggggccaggagggccacttcttcgacctggacttcctggccaatgacccaatgatccccgcagccctcctacccttccagggcagcctcatctttcaggtggaggcagtggaggtgacaccgctatccccagaggaagaagaagaggaggctgtggcggatcccgacccaggtggggacctggctggggagggtgaggaggacagcacgtctgcctccttcctgcagtcactgtctgacctgtccatcacggagggcatggacgaggcttttgccttccgggacgacacctctgcagcctcctctgattcagactcagcctcctacgcagaggcagatgatgagaggctgtacagcggggagccccatgcccaggccactttgctccaggacagtgtccagaagacagaggaggagagcggaggtggggccaaggggctgcaggctcaggatgggactgtgtcctgggccgtggaggctgctcctcagacctcagacagaggggcctatctgtcccagagacaggaattgatctcagaagtaacagaagagggccttgctttaggccaggagtccactgccactgtgacccctcacactctgcaggtagccccaggcctccaggtggaggtggctaccagagtgaccccacaggctggggaggaagaaacagactccaccgctggacaagaatctgctgccatggcaatgcctcagccctcccaggagggcatcagcgagatcttaggccaagagtctgtcactgcagaaaaacttccaactccacaggaagaaacaagcctcacattgtgtccagactctcctcagaacttgaaggaagaaggagggctggacctcccctctggcagaaagcctgtagctgcagccacgattgtccccaggcaggctgaagaggacctcaccttaccccaggactccgctatgacaccgcctctgcccctacaagacacagatctctcatcagccccaaagcctgtggctgcagccacgattgtgtcccagcaggctgaagagggcctcaccttaccccaggactccgttatgacaccgcctctgcccctacaagacacagatctctcgtcagccccaaagcctgtggctgcagccacgcttgtgccccagcaggctgaagagggcctcaccttaccccaggactccgctatgacaccgcctctgcccctacaagacacagatctctcgtcagccccaaagcctgtggctgcagccacgcttgtgtcccagcaggctgaagagggcctcaccttaccccaggactccgctatgacaccgcctctgcccctacaagacacagatctctcgtcagccccaaagcctgtggctgcagccacgaattgtgtcccattcaggctgaagagggcctcaccttaccccaggactccgctatgacaccgcctctgcccctacaagacacagatctctcatcagccccaaagcctgtggctgcagccacgattgtgtcccagcaggctgaagagggcctcaccttaccccaggactccgctatgacaccgcctctgcccctacaagacacagatctctcgtcagccccaaagcctgtggctgcagccacgcttgtgtcccagcaggctgaagagggcctcaccttaccccaggactccgctatgacaccgcctctgcccctacaagacacagatctctcggtcagccccaaagcctgtggctgcagccacgcttgtgtcccatcaggctgaagagggcctcaccttaccccatgactccggtatgacaccgcctctgcccctacaagacacagatctctcgtcagccccaaagcctgtggctgcagccacgcctgtgtcccagcaggctgaagagggcctcaccttaccccaggactccgctatgacagcacctctgcctctgcaagacacaggccccacctcaggtccagagcctctggctgtggccacccctcaaaccttgcaggcagaagcaggctgtgccccagggacagagcctgtggccaccatggctcagcaggaagtaggtgaggccttaggccccaggccagcacctgaggagaagaatgcagccctccctacagtcccggagcctgcagccttggaccaggtccaacaggatgacccacagccagctgcagaagctgggacaccttgggccgcacaggaagatgcggattccactttgggcatggaggccctcagtctccctgagccggcctctggtgctggggaggaaatagcagaagccctttctaggcctggacgggaagcatgtctggaagcgcgagcgcacacaggtgatggggctaagcctgactcaccccaaaaggagaccctggaggttgagaaccagcaggaaggaggcctgaagccactggcacaggaacatggacccaggtcagcacttggaggtgcaagggaggtccccgatgcgcctcctgctgcctgccctgaggtcagccaggcccggctcctgagcccagccagggaggaaagaggcctgagtggcaagtccaccccggagcccacgcttccctcagctgtggccacagaggccagtctggactcctgcccagagtcttcagtaggggctgtgtccagtctggacagaggctgccctgacgcgcctgcccccacgtctgcaccaacctcccagcagccggagcctgtactgggtctgggcagtgttgagcaaccccacgaagtacccagtgtccttggcacccccttgctgcagcccccagaaaaccttgccaagggtcagcccagcacgcccgtggacaggcccctgggccctgacccttctgctcctggtacccttgctggggcagccctacccccactggagcccccagccccctgcctgtgccaggacccccaggaagactctgtggaagacgaggagcccccaggctctctgggcctcccaccgccccaggcaggagtccagcctgccgctgctgctgtctcaggaaccacacagcctctggggactgggccgcgagtcagcctctcgcctcactccccactcctcagccccaaggtggcctccatggatgccaaagacctggccttgcagatcttgccgccttgccaagtgcctcctccctctgggccccagagcccagctggccctcaagggctctcagcccccgagcagcaagaggatgaggacagcctggaggaagactcgcctcgggccctgggctcgggccagcattcggatagccacggggagtcatcagccgagctggacgagcaggacatcttggctcctcagaccgtgcagtgtccagcccaggccccagcaggcggcagtgaggagaccatcgccaaagccaagcagagtcgcagtgagaagaaggcccgaaaggcaatgtcaaagctgggcttgcggcagattcagggagtcaccaggatcaccatccagaagtccaagaacatcctctttgtcatcgccaagcctgatgtcttcaagagcccagcctcagacacttatgtggtctttggcgaggccaagattgaggacctgtcccagcaagtgcacaaagccgcagctgagaagtttaaggtgccctcagagccctcagccttggtccctgagtcagcacccaggccccgggtgaggctggagtgcaaggaagaggaagaggaggaggaggaagaggtggacgaggcggggctggaactgcgtgacattgagctggtgatggcgcaggccaatgtgtccagggccaaggccgtgcgggctctgagagacaaccacagtgacatcgtcaacgccatcatggaactgaccatgtagccactgaccggaagctggagccatcctacgccttccctcagctctgctactcaataaatcggtgtcccttcaaaaaaaaaa

SEQ ID NO: 65426 - DNA, 2004 bp, Homo sapiens
agtccagcggggaattcggcctgcaagcctctgatataatgtggaccatatcagacacaggttggatactgatcatcttgtgctcacttatggaaccttgggcattaggagcatgcacatttgttcatctcttgccaaagtttgacccactggttattctaaagacactctccagttatccaatcaagagtatgatgggtgcccccattgtttaccggatgttgctacagcaggatctttccagttacaagttcccccatctacagaactgcctcgctggaggggagtcccttcttccagaaactctggagaactggagggcccagacaggactggacatccgagaattctatggccagacagaaacgggattaacttgcatggtttccaagacaatgaaaatcaaaccaggatacatgggaacggctgcttcctgttatgatgtacagatcatagatgataagggcaacgtcctgccccccggcacagaaggagacattggcatcagggtcaaacccatcaggcctataggcatcttctctggctatgtggacaatcccgacaagacagcagccaacattcgaggagacttttggctccttggagaccggggaatcaaagatgaagatgggtatttccagtttatgggacgggcagatgatatcattaactccagcgggtaccggattggaccctcggaggtagagaatgcactgatggagcaccctgctgtggttgagacggctgtgatcagcagcccagaccccgtccgaggagaggtggtgaaggcatttgtgatactggccttgcagttcctatcccatgacccagaacagctcaccaaggagctgcagcagcatgtgaagtcagtgacagccccatacaagtacccaagaaagatagagtttgtcttgaacctgcccaagactgtcacagggaaaattcaacgagcccaagcttcgagacaaggagtggaagatgtccggaaaagccccgtgcgcagtgagacatctaagagacattcatttggattcccctcttctttctctttcttttccctttgggcccttggctttgcctatggatggatatggagattctttatgggaagaacatgaatataagttttgtcttgccttggttattagcacaaaactttaccatgttagatgttgaaagaagaaagggaaggaatgagagagagtgaaaaggagagggtaacagaaaaaaaggaaagaaaagtaagtcagggaaatattaaaactgcaagggaaagcaattgaaaaagaaataaagtagggaaagaaggagagaggaagcaagggaaggaggaagaaaggaaagaggagatgaaagggggagaaaagatagaagaaaaataattgaagggagaatcagaaaaataaagagaagaaaggaaagaaataaagagagaaagagaaagaagaaagagcaaaagaacacaagaaagaaagagagggagaaagagagggagaaagggagagaaaaaaattgtaaaaataaaaatagtaaaagaaactgataaagaaaagtaatggaagacaggaagaaaagaagagaaggaagtaaagaggaaaacttataaatattcccacagatagacaaagtcaagcataaaactggagcttgagaaggaaatgaaaggccgtggcaccttcttataccctagaagaagacctccatacaggaagacttgtgtgtggggttgggacattagaatcatccacaagtcaccccaaaccttggaactgtcagggtcagaggggaaccaccatttattaagcatttgccatgtgccaggcactaacccagatgcattataaataccacgttgtttcacctgtgtgtggcatctacagaccttagatcatagctgtgagaacaacgtaagcactgccaaagttatcagctacccatatctcatgtttttgatgttatctactcttcctagaatcaaatattaaaataattttaaaaaaaaaa

SEQ ID NO: 65427 - DNA, 4490 bp, Homo sapiens
ttttttttttttggtgcagcgatgtttaatggcaattcgtataaaccaagcccatgcacaagtagaaagtgcccgtggagccggcaggaggcccccgccgcgctagagaaccacaagcccggccgtgcagccctccccgcggcgccttaaatagattcttcactatactctgtatgttacagtatgtacaagacccctcccctcgggggacggggcggactccgcaacgcgttcctatgtacaccacctccccttcggccctgaggtcagtggccagagtcgggtgatggggtaagacagggccagagagggaggaaacagacgcaaacatgcggagtcgggtggggacacggtcagccctgaaacacgaggggcgtgcgcagcgaaggcagtggtgggaaccgaggcggatacattcagagacgcgtcgaacaaataaataaggcaagtcaggagggggccgagtcgggtgcaggcaggaggagctggggagcaggggcaggcagggctccggaggtcacagcggaagatgcaggtatgtggggcgcgggttttctggagccaggaccaaaagagacggggcacgaccaggagggacgaggagaggggtgtgggagcaaggcgtggggaggagggaggaggcctacagagggctccaacaaaggtgaacaggaaagctgccgacaggggctccccctgccccagaaagccctctccctgttaagactgcacgaggcgcccccagggtggtgagaaaggcggtggccaggtcatgtggccagtcccggctggggaagcccttccagctcctggttctgcttcagttccctcatcctgtgtcggcagcgccgcaggaatctcatgatcttccgggctgcctggtcctgcttcttggtgagaaaggagcctttgttgcgggcaggcagggtggccgaagtccggtggggagggccgggcctgcggcggtaggagcggtagtgctgctggatgagcacagccgctcggcggctctgctgaaatcgcttctgttcatagtagcttcggaacttgctctggatcaggatggccgcctgggtcatcttcttatagagtgcaaacttaagtgcaatccaggtcagctgcttgtacttccggtaacagcgctggattacagctgctgctacctcctgctgctccttcagccgccggcccttgtactttcggaaggccgtctggatgactcgggcagcctcatacagttcccgctgctcttgaatctgaataatgtcaacaaggcaaaaatcaactttccaatcttgcccactggtggaatgcagagagaaactctgcccaggagggtgctgtaagggacaagcccaggcgacctccgctcaaagggcaagttcgctgggaggggttgagctggggaaatggtccacattctcccaggtagctggccagccaggacatggtctcactgagccccacagcccctgtccgctcccgcattgaggctccagcctcgggcagccccacgaagtcctctcgtttaatccgctccggtgtggcttcgatgatctgcttggctagtgagatcatgtccaccgggatcacatccacagcctgtgggctgtcagcgtcctccggagcagccccatcatctgaagctggtgggagggcaggaagggaggagaggggccccttggagttggtagcctcatagtccatgaggagtaggggggcttctgggacaccagaggaaagctggcctggggccatgtcctccatagtcatctcagaggctggcagaggtgcaggggggggactgccatctggggcactagaataggctgacgtgacggaaaaggtgccatccgacagctccgagggcgaggagacgctgctcagaccagtgtctgggctggaggagggtggcgatagggcaaatgggggctccaccgaaggctcctgtctctgtagttcctcaaggcagcgggcaaggcgcacatgaccccgggaatgagccacagacaatggcagacggcccagagagtcgggaatgctcagtgcctgtcggttccaacggaaaaggagcacagcagcttccaggtgtcccagggcacaagcccacatcagaggggtgcaagagaaatgatccacgttgagcgggtcaacctcctgctctaagtccaagcttccagtctccacactccgccactggctcagggtctcgatgaggcgggcatagccctgggcagcagccaggtgcagaaggctcatgccccggaaggggcttccatgggccagacgttcaggacccttccaggtggagcgtgggatcatgctttctaccaagaccactacccgtgcttcgaacccaggcccctggccttcatcctgaactggaggagcatcaggaccctggcaaggcacctgcccagctgctgcgatctctgccatccgcttctccatctgctccagtcgctctagtatggacatccggaactggttgtcgtccagtgacagccagtcaagttgagtactaggcagagacaggaatcggcgggctcgatactcaaagagcacagaagcagaaaggggcccctcccgccctgccacctgcaaagacaccagccctacctcatgggcgggacagtagcagcgtaagacaccaggctggacaagtgaggctggcactgcgatgtgatcaaagacacaggagtaatgctcggcggcttcggtccaaggacctgtgatgagcaccttgaccccaccctctgggtaggaccactctggggagaagtctgtgatggtgctaagagcaggagacagctggggggttggagcagggatgcttggagcttcgtcactgatgagttctcccataaggtctgggaatgatgaaagactgaagggctccagttcactggccccaacaggtcctccaaacaaggcctctcctcttcctaccctgcttgacggctccaagggggcaggtgagggtgggggtgagggagggggtgaaggtatgggtggggcagccccgtgacccttgagctcctccccactgtcatcatcttggatgaagaagcagtttcctcttctcccacctgctactgactgtggtgggggaccccgagcagctgcctggggctccagggcagcagcaggctctagggcagaacagggggtatgagcggcctctgcctcggggaagtctgggcttactccctgcccccctccatatgtctggcccctctgggggctgttgagaaaacgatcagggtcaaaggcaggactgggaggagctggtggggcagaaggctcagtgcctacaaccactgccaaactcatggaaggcctaggatcagcctgtggagccaagtgcctggtgggcgtcaagcctccagcccgctgctccagtcctgtcaggaggaggatagcagtgcctcctcttgaagaaccccctcgagaagtgggagggctaggtctgatttctaggggctctgcaaaacctgatgaggaggaagaagaggaagaagatggggaggtgtgtgccttggggagctctgggggaagtggggctatcagtggaggaggctctggggggtgagggtgggggatagaggtcagggttaaagctcggggctccactttgggagagatgatgcggtgtttcgtgctgctgcatttgtgggtaaggctcccagaaccaagccccccactgcagagacaggcgtgggttcggggagcaggcttggttgggtgggtgtccaaaatctgctgcaccaggtgttctacagagaactcttctgttccattcccgcagctccacttgatgccatgaaacatgggcttcagctgtcccaacaactcctcccgggaccacttcagccactctcgacggtcgctgctgatggaacaaaagatggggctgcagccctttccacagtcctccagggctgggacgttcaggtagtgcacaaggacgatgtcagggttctggagcagccagtagcagcgccgatggaatgtggggacgatggaagagtgaacgtagcagccatagagacactccatgccctggaccttcagcttcatgtggtcctctcgggtggtcttcccatccttccgcttcttccagaggtaaccatccttccgatatttcaccttcttgcgattgtagaggatgatggagccattctgaggccttgtctttggggcacaagacagccactcatcatgcttctcaaaggtgatcaggtaggatgcaatctcctcatttgtattccaccgtagcctctctggaggcagcagcgggcagcgaggaagacactccagcagcttcttggggagaaagatcttcaggtggtggctgttttcagcaacctcggtggtgtccttggtattcatggtgagggctccagggggcaaggtcacccccggcctgaggggccggggggagggggagtctgtgctcccggggtcccgcgggtgacggcggcagcggc

SEQ ID NO: 65428 - DNA, 2333 bp, Homo sapiens
ttttttttttttctattttcaatcaaatttctttttaatgaaaactaatttttaagggcaagataccacagcagaagaaaaacgtcttgcaagaaaagacttcatggtttacaacgatcaaatgtatgggctatttgcctgattggtggcctggactcagcaagagattcctttgcagcagaggttggccacacatctgggggctgcaacaccactgaaaagacagctttctaagcattagtgtaaggcaaaaagcagagtgcctaaacttggccatttccaccaagaaaaaaagtttcatagcaaccttccttcaccagaaaggcttactttatgatatgctaacagaacagaaaagcaggttgggacaagatacagactttgttgcatttagctatgacccttctctcccctctgtggatgtgggcagggtggggagaggcaggaagaggcagtagagggaaatgacatttgcactcaggcttcccgcccctacccacccctacccttcgcccagacagacgtcggatctatgctgcaccaggggtgggtcatggagtccagctaattgccaggagctgaggcgtgtacaagccatgaaaagagctgccccacggcctccccacatcactgtccttcatgcacttgcatctttaaggctgccagcttcagagctccctggacattccctggccaagtgtcatccctgtgtcaaatggatgggatgccaggtaatccttgtactccccgtcaatcagtttggcggcattgttcctggcaaaccagcagtctatctgctcttccccgttgtaaatcttcctttgcttccagaccactgggacttggtggcctttcactgttaggacggcctcaggcccctctcccacctgaaggagcagagggtgagtgaggttctggctgggccctgcagggtcttctgtgagtctggcatcctgattcaggaactgacccagcagtccgtggcagttgctggaaaggccctcgctgttggcaatgtagaaacccaggtggtgtcgctggaagggcgccggctttttgtagaggtggatgaggatgacaaaggctatggagccctggatggtgacggtgacattggcgttggcagacacggacacctccagcccccagctccccaccaccacactctggttgcaggggagcaccagtctgtccccaccatccaagatgactctgctcggtgtgatctcgagataagatctctctggcttgttgatgaggatggtgatagtgcgcaagtaagtgcgctgtttcttgtggccatttggaggggcgggtgccccaattaactctccgttcactgtgacaccagagtccctgtgatcagagaccagcctgaggatgtccccgggctgcccatcaatgttgaagcacacggtgagtctgctcagggggaaatccacaacaaagtggggatcaccatccactgatgttttagagattttaattcttggctggtatggcttcttgagcaaaggtcctggctgcgtgccagctcctcgcacgctctgcaccaccggttcgggtcccatggcagccgacatgccgtgggcctcctccaggccatccatgcgtgggaccggccccctcagcttcatggaggtgaagggagtgaggaagcggtagctcacagccagggcctgggcccgctgccgcagccgctccttctccggttcatcgtcactttgcagccaggagctcagcagctcctttgtggtgaggtagctccagagacgctcgatgtggttggtgtccccctctccatcgcctccaggcctggggcttcctgtgacatctttccctgccttctgaggccgcacaggcacatctgtcttcaggatgatgaatttcttactgttgctggcggtgacctccacgtgcaggtgatccagcttcctgtccaccagcttccccgcaatgatgatctccgagccgttgaagtagttggggaacagggtcttggtggcctgcaccactgagctggggggataatcgatgcggatgtcagagaggagcggggtcctgatttcatcgtagaacccgatgagctgcgagcctgcgtcctcctcctcgtgcacgcgccgtgtgaggccacagttctccagcgacagtttctccagcagcctgaagtccacgtcgttgccgatgccaatggtgaagatgcagacttggcctcgggcggcctctcgggtgttgttgaggatcttgagggtgtgcgtctccccgaccgtgggcttgccttccgtcaggaagacgatgagggacacgctccggtctcccgtacgcgtgggcga

SEQ ID NO: 65429 - DNA, 2304 bp, Homo sapiens
ctcaagaccgaatccttcaagccatgggaaacatcgcactggcctttcatttgctgggggagcgagccagccctaactccttctggcagccctatattcaaaccctccccagggaatatgacactcctctctactttgaagaagatgaagttcggtatcttcagtccacacaagctatacatgatgtcttcagccagtataaaaacacagctcgacagtacgcctacttctataaagtcatccagacccatcctcatgccaacaaactacccttgaaggattctttcacttacgaggactacaggtgggcagtctcttctgttatgacgaggcaaaaccaaattcccacagaggatggttcccgcgtgaccctggctctgattcctttatgggatatgtgtaaccacaccaacggcctgatcactactggttacaacctggaagatgaccgctgtgagtgtgtggctctgcaggattttcgggctggagagcagatttacattttttatggcactcgatccaacgcagagtttgtgatccacagtggttttttctttgacaataactcacacgacagagtgaaaataaagcttggagtgagtaaaagtgacagactctacgccatgaaggccgaggtcttggctcgtgccggcatccccacttccagtgtttttgcattgcattttaccgagccgcccatctctgctcagcttttggcttttctccgagtattctgtatgactgaagaagaactgaaagaacacttgctgggagacagcgctattgatagaatcttcaccttggggaactcggaatttcctgttagctgggacaacgaggtcaaactttggacatttcttgaagatagagcctcacttcttttaaaaacatataaaacaactattgaggaagataaatccgtcttgaaaaaccacgatctttctgttcgtgcaaaaatggccatcaaattgcgcttaggtgagaaagagattttggaaaaagcagtaaagagtgcagctgtcaaccgggaatactatcgccaacagatggaggaaaaggctccgcttcccaaatatgaagagagtaaccttgggctgttggagagcagcgtgggggactcgaggctccccctggtcttgagaaacctcgaggaggaggctggagtgcaggatgccttgaacatcagagaggcaatcagcaaagcaaaggccacagaaaacgggcttgtaaacggtgaaaactctatccctaatgggaccaggtccgaaaatgaaagtctcaatcaagaaagtaaaagagcagttgaagacgccaaaggatcttcttcagacagcactgctggagttaaggagtagctcgaggtgaagctggatgggggatccagtggagcaggagttgacggacagtccgttcacatcgctgtgtttccttgttaacatttttctttctgcagagaggaagatatgtttttgctgctttatataaaaatggtttttttaagttattttaaaaatctagcttccctttttgattaagattgccatcttgcttttaggcaaaacaaaccaattaacaaacaaccacaagaaagggagaagaggtgcctgtgggagattttgcagacctattgtgggtataggtattttcttcctggggaagaattcagttcccgtctcagctgtacttttgtgggcctgtcatcttgatgaccagaatgaaagcttgctctgcctcctgccagccagaattggtggcgggacttggggatacagcgtgaaggtggggaagttgcacagcagaaaacagaattgaagttgggaaactctagagtctgggcaaaatgtttggttttttctcttaaaaaaaataacaccccattaccaaaagaaaaggtaaggtggcaaccttatttttaatagtttgaaatgatgataatcctaattatataaaaatatatatataaacacacatatatatagtgatttctaaagatttgtttacttttgtgttttgttttacctgtacctaagaacttgtcctttctccttgaatcaaaagtaggacatgcatcatcctcctaaatttaaaatgttggctctgattttaaagtggtgcatttgattccagccttggtaatggagagtttgcaaacaccacagcggcccacagcttacacgtggtggtgtgcagtgtgaggcagctccttggctttcctggttttcacaacaagctagagattttcaaagctacacttttgagtaaaaacccttattaaaagaaaaaccccattaaaaaaaaaaaaaa

SEQ ID NO: 65430 - DNA, 5048 bp, Homo sapiens
ttttttttttttaagatggagtctcactctgttgcccaggctggagtggagtgattggagtgatgcggtctcggctcactgcaacgtccgcctctcaggttcaagcaattctcctgtctcagtctcctgagaagctgcgattacaggcgcctgccaccacgctcggctattttttcgtatttttagtagagatggggtttcaccatgttggccagcctggtctcaaactcctgacctcaagtcatctgcccaccttggcctccccaagcgctgggattacaggcgtgagccaccgcgcctggcctgattcatatatattactaactgaaatgcagtatcactgcacttccccaattagtaaattcaatacatcctgtatgtaaaaaaacccaccaatccccacaaaaaaccaatcaaacaaaaaccccaaaaaaatcaccaaaccatactgtcaagcgaaatagttttaattagtaggctgatcataaataaatctacataaaagatttaacagaattacaaagagttttgtgttcctttgtggactcaattcataatatgcattagtcaacctcattctctaactgtgacaaaaagagttgtcatccaacaatgcagcacagtttaagcaattcatatgctatagttacatttttacattttctttacaaatgtaacatttatgtacattatatatagatttttttctatagttcatgtactgaaactctattgtttttacagagaaaatgttgaattcatttaatgaataagaaacattccttgttaaaaagtaattcatataaacaaataacacggtaccaatgccttttggcatctcttgccagagttcaagtccagaaatgttatattaattataagaaaaaagaatttatctaattttacattatgacatatcattccacatagctacataaatttgccagcttgcaatgaacagagcactgtactgccatactactggaaatgtgtagaaaccaattcaaaatatacttggtgaaacagcatcatcgttaccattaatttgagttgaaaaagatctgtcaagttctttcttcccctttactttttaccaaagcctcagacagagtgctgtgcgttgcatcttgtattaacaaatgccttcatttcaaatttctcacgcgcttctctgacagattatgctttacctaggttatagatctttttcttattcaattttattctacttcacttacaaatctgctgctgaacatgaagcaaaaattcatagtaagaaaatgcagcctctgtccggtcttcaatcaaatgctgaaaaaattctgctttggcaggactctcatcttttactatgtgaaggattggacttaatggtctgctgtctctaagccaagttatgaaggatctggctctttctgatgaaagtgtatctagctctggaagatgtgtcattttctgtggtattgatgcaaaattagtatatccaagcacatcctctatgaagttattgtcacagcctttcccaacccaaatgtaaaaaacagagccacagtccataaggaaagcaccttctcttgtcagcttctctgcagacaatttttgaagaggtggctgtggtacaatcctgtcattaacatgtactgcaccctcatctgtcaatctgtctatcctgtataagttgggatgaatcattttcattagatgaacaagtggctgagactttatctgacacatggcatatacacgatcatccagccgtgtgcttgtacccgttctaaatgctttctgtttgagaagggccaaaacatagagaggaaacaacttgagggagctgggcgccatcaatgcagagtgctgtaaatttgagacagttgagccatatgcagacaatgagtccactacagcattcactaaggcatctcttgcatctgacagacttgatgaaacggaccgatccacagccatgtttgccagaaggcagatggcagcttgtacatccactcccgcatatacatctgctagtgaacttaccactggcaaacaaagtgtatgtactctaattctccgctcacctttgcttgatgtatataatagggctgtttgaaaacatactaaggaagtatctgttaaactttcttcaattgacaactgcaccgcaaatccagcatcaggattgatgttggcaagggataacaaatcagtagaacggacaaagaagttaccgtgaaaagtgtgcattgaaagacctttagtacaccttattctcataacagcttcaaacccaatttttcttgtgagataccgttttaggtctttttgtaacttttctgcttgtgaaggattgtgagtatagtggaatgatggataataatagatgcaccctgcagaatacttggacatgcaagctagagaagcaagatcagaatactgtgaacttaaaaggaacaaatccactgcagtttgctgtcccgagcaatctaatgcaagtttcttataaaaatcagttgcagggccaagatgttgtaccacctttgtacttgatctctgattaggatcttctctggattgcagaagtcctgcacccaaggaaggtaactgtgtctgaaatacagacacacggccacctgttggagacattaatttaaaggcagcctgaagtgcaggaccaagggcactgtgtgtttctcttgtattggtgaacatgtttggtaatgcattcagtaagtcttttataagctctttactttcatatagattcacaagtaaactatccggtgtaggtagaaaaacatcatctatatcagacacaatcaacatttgaggctgtgataatccttcctgggtaaattgtagaaatgaataggtgcttatcaaaggtcatgaatcctattcttggttcgtgaattctccaggaagcttgtctagatttttctaggagtgactggcaccaaaaattgtcaaatatccagcttccactgcattatgagacacatctaaaacaaacaagtaaactgcaggttgaggaggacgcagcatgtaatctgaagaagcaatgaactccacagttggaattctgaacttctggtcgtttatgaggctctccataagatcgggtaagggggttatacataaattcttcaggaacatcgtttactctatagcacaaattgcatttccatctacgttgatcaatgaaggatacaaacggggttaatatacgttcgacaggatcggcacctcacaatggtatttgatgttatcactggtaattgcgttaggtctctgaagggatgtaacaacaatcctaaaggaagcttagctttattcagtaaagcctgtgtctgtggaatatttgtcaaagtacaccgaaatgaatctgggctacagtttaattttttgaggtctgcattcaagttaggtacaggagcccaaacaggagtcataggtaaaatattcctctcctgagtaaggtttacaggtctcaggctttctggttgtggagaactctgaagactcaatcctcctatactggaggatagctggttcacaccaggatactgttgaggatactgctggaatccagaatataccgggttactggggctgtactccagaaataagtggtgctgtagcattctgataaccaggctgaagtgttggatagccatagccaaaggcttagccatttttgaaggctgagggacgacaggagctggagctgaagctggagctggagcagaagcaggatcaggttcaggggcgggatcaggagcaggactgcttgctgatgaagaaagcatatctgggtaactgcctccttccagggcatcataactgttgggcattggagaagcactgcttgtggtagaagagctgtcaacacctgcttcctcatcctcctcctcctcttcctcatcatcggaagttgatgacaagggagttggtgcggagctagcttggttattaacatattcaccatactgcacgcctttttgttgtaatagctctgatggctgtgtaactgaggtcacaggctcaactgggtgatttgcagtgggaggtgttcttgttgatgaggatcctgaggatcctgataaaacagtggataccactgggctggacttgggaggctgaacattttgcataacaggacaggataaagaatctgcaacagtaatggttgggttgttgttcgctacagccagggatcctgtgtggtttcggatgagattgtcttgagtcgatggaaggcctggagatgaccacgttagagtactgtatcctgaaagactttgctgctggtggtgctgttgtgatggtagaggtggaagtggcgatggatggctgatagctgtattttgaccagagaatgaattatctttaactggcctaacagtcggagcattctgtgaggtaaacatttgcccatatgtatcaccagcaggcagagagggatatgaaacactaggatacgcggcattagaaacagttgacatagcataatgaccacaagtagagggaaatccctgagacgcaacagaagagctggcagagtacatggctggactattgtagtgattcacaaaagaggagtatggttgggaggcactcgtatgcaaatgggatgctgacgatgcagcaccttggaaagatcctagagtggatcccacaatatgaggggcaggaggacccctgctgtacaactgctgtgctcctggttgctggttcactgtgttaggagtcacattttgtgttggtactgtatagagagcagagtagtaatcaccacactgggtatccaatggcaatgaggtcattttcccaggtccttgagagtaatgtcctgagggagcaatatagttttgatgatgcaatccatatccagatggaacctgcatttgattctgggctggaccgttctgctggtgcggcgccgggcccgcacccgggcccgcgggcgctgcggctcctgagacggccgatccgccgaacttgggcgggatccgggcgctggcggccgggtgagaggacccggcgggggccgacat

SEQ ID NO: 65431 - DNA, 606 bp, Homo sapiens
ttcagtgctgtaagaaaggacggaggctgttatctatggcagatctatccaataaaggagagaaaggaccgcatacgcctggttctcatcatatgcaataaagagtttgaccatctgcctccaagaaatggggctgactttgccatcatggagatgaagaagctgcttgaggatctgggttacagtgtggatgtagaagagaatctgacagccaggataacgtgtccaggagagacagcacaaggggctccatcttcatcacacaactcatcgcatgcttccagagatattcctggcgctgccacctagaggaagtattttggaaggttcagcaagcatttgaaagtccggaggcaacagtccaaatgcccaccatagaacgagtgtccatgacaagatatttctacctctttcctgggcaactgaaaatggttaagcattgagagttgttggtggtgtatgaaataaatgaaagtgtgatattggagcaggaaaccacaagcagcccagccctcctttatcaacttcaagaaacacctttactagtacagattgaatgcttaacattttgtatttcaataaaggtgaagacaaatgaaaaaaaaa

SEQ ID NO: 65432 - DNA, 559 bp, Homo sapiens
ttttttttttttaccaacaaagcctgcctttattaaatagagatcgcgttacattccatccaaagaaggaaatccggacgtggtgagggatgcgtccaggtgggagctccgaacgctggtcctgagtgggctctgatgggtgggagggcccaggtcctgcctgcccacccaggccccacatgccagggcgcgtgtctgcatggccacccacagctgaaaacaggcgtgggcgatctgaagccctgtctgtgttctactgtggcagaaagtgccccagtccttccagcggttttgggagcaggatggccacaagggggtgctgctggcccagggcttggcagctggggtggagggtaccctggagatccagccacccagaacagtccctttctgaagacaagccagcaacaaggcacctgcaggcagttctggggactggggagggggcgctggctgcctcaggtgtcccctcccaagggctgaggccccccgagtatggatccgagctccctggtctttggtgctttcttgaaatcctcctggtggtggcagaacccag

SEQ ID NO: 65433 - DNA, 986 bp, Homo sapiens
  misc_feature (1)...(986): n = a,t,c or g
ggcacgagacgcagtgggctatccagaagcagcaatctcagggtaaccagaactagagctgctcaaagaaaaactggtcccgtttcattagcaaatggatgtggcagaaaagccactcgaaagagagtctatttaagtgattctgataacaattcattggagactggtgaaattctaaaagccagagctggaaataaccgaaaagtcttaaggaagtgtgctgctgtggctgccaataaaataaagctaatgagtgatgtagaagagaattctagctctgaaagtgtctgttctggtcggaagctgcctcaccgcaatgcttctgctgtagctagaaaaaagttattacataattctgaagatgaacagagcttaaagtcagaaattgaagaagaggagctaaaagatgaaaatcaaccattaccagtgtccagttctcacactgcccagagcaatgttgatgaatctgaaaacagagactcagagtcagaaagtgatttgcgggtagcccggaaaaattggcatgctaatggttacaagtcccatactccagcaccttcaaagacaaaatttcttaaaatagagtcttctgaggaagactctaaaagtcatgattcagatcatgcatgtaacagaactgctggcccatcaacgtctgtgcagaaacttaagggcagagagcatctcagaggaagcagattctgaaccaggaagatctggtggtaggaaatacaatacatttcacaagaatgcgagtttctttaaaaaaaccaagattctgagtgactcagaagactctgaatctgaagagcaagatagagaagatgggnaaatgtcataaaatggaaatgaacccaatttcnggaaatctgacctgtgaccctattgctatgtcccagtgttcctcagatcatggatgtgaacctgatttggattcggntgatgccaaactggaaaacccaacaatttttttgaagattctgctt

SEQ ID NO: 65434 - DNA, 3047 bp, Homo sapiens
gcccttaaaaattttttttttccctaaaaccttaaaattcttgaggggggttgggccaaaaagttccccccccaaaaaaagggtttcttccaaaaattcccaacgagggtttaaaaaggccccccaaaaagaaaaaaaataaatcttcccccccccggttaattttggcccccccaggggatctttaaaagggccccccctttttgtttttttattatcatctttttggtttttttttttaaatattaaaacaataaatctttattaaacagttttcacggcattttaaaataaatttaaaaaataaatatttgcattatagcagaaagtcacatgtattgcatcaactcacttttacaatttaatggcatgagacaactaagcatcagcaccataaaactgttaagatttgtttcttaaattcaaggaaatagctctaaagcactgcagcatcaataattttgaaagctataacccagtgattggtgctcatagtagccaatgtttctttttattactgggcaactgtgggagacagagttcttccagtactaaatattaataaggttctctgatcgacaatcccccatctatcagtgtgtcagggattcacaaaggaaaaggaactgcagggttatgtaggtatattcccctatctggtggatttaggtttgcacaaagacacttattctagcaaaaaagaaaagatagtgtttccaccatggctaccttttttttctttttatagagtctcagagtaagatttaaatcataatttttaacctttaaaagtctgttcaagttcaattacaaccatagaaactgtactggtatcagaacataactattttattacaaaacttaacattatttacaaaatgaaaaaataatcaaatgactattgcaggccaaagttaaaggtttctcactcaatgattgaagaaaaattaagcaatatttccatgcactcacaccagatcatttctgaaatatgcaaactcttaaaattcatgttagtaaaactttaatgtattcataatacttgctatgtttattagaagatggtcaaaaaaaatccatggttctgtacaataatattaacagtttgttcattttcctttaatattttttggcttccatgaacactcgtagattgaacattctgcaagtaagaattataatagtacctctgtcaccttgctgaattcatcaccacaagaaaaacacaaatagtttaatgcttttgcactaaactgaatagttataactccaaagttatattaaactgaagccttcattgtgatcaatagcttggatcagtttagagcgtagagtttctttttctgtatattttggaagatccagaagattaaaacaagtatgggaaactgggagatactcctcaccacctcctgtggactggatgactagtttcagactcttcataccaagaataggaatgcgatcactacctgtcaaaaataacagaaactgtttcttcttttccaatggtaattcgtgaaatacttcccaaaaaatttttatcgtaggatgttctgcccaatattcccctttgtattctgtattcttttccagttccttccaatcataatttgtatttccaatgaccattgcttgtagttcattaggctgaaagagcagaaggacttttcctccacagaccttatgaaagcccgcatgaaaagcatcaaataaggaagccactgatttattgaatatgtaatccacataagcatcgacaaactcttgccgattttgtttgttaacagctgtgtctgcaccatttagaaccagctctttcacttctgttgcaccaaagttttcaactgtgatcgtaaaattaagacaaaatgtttcctctatgtcatcttctggataatccagtaactgttgcatgcttctcccaacatcaggcattagttctttcaaatcatccaaggatggcttctttttcagtagtttcttatataaagccaaaggaaaatggaggtccacaatggtacaattataaattgctaagccacagataccaccaatcaaatggaacaaatctctgtcttcaaatgtcttatcagaaaaccaaatgagcctggaatcttcataatacctaaacatgccgtatttaggatccaataattccctcatgatgagcaagaaaaattctttgcgcacccctcctgcatccacagcatcttctccaacaaatataaccttgagtggcttcttgtaatctatgttctttgttttcctaaggacttccattgcatctcctacaatattttctctacgcaccactagaattaagcagggattcacagattcaatcactgggagaaaaagagaggagacattctgcctgtgggcctgatcaatagccatctgcatctgtaagactgcatcggtctgtaacagagtagtttttgcttgggcatcaaatacaaatggatatgtacagattgtaacagggatatctgccaacattccataggcctgctgttggacccagttgatataatcatttcttatgtctatcaattcttgtacttcatgtatataaaatttatcatactgtataatctgtcccattttctcatttaccctatgtagtatttctaaaacctttaatgcagtatgaagaaaactgttgaaaattcttctttcagaagggggaataccgatcttgtagagtttcaaaagatgtaccacaacttccttaaaaagttctactatcttgaggaatagtggaggttcaagtactgaccaccagttttcaagtactttcaggggtgccttttctaggttcacaagagctgtaccaaagggaattgctattgctgagaaattggtggaatcactcatcaggggacattctggtagagtaagataaaacctcaatgcctcaacatcaggtaaggagctagtcagtttaggaataagattcttttccaaactagctgccacctgctgagatatctgcggatgatcaggttgtataagtttgggaaaaacagcctagcagcattcat

SEQ ID NO: 65435 - DNA, 792 bp, Homo sapiens
attgagaccatagagagcccggcggaattcatttttttcttcaagctagaaatattacggcttatgaagcatgtgagacagtccccgccatgtgctgattacacagacccctgtaccagaaatcagaaggaaaggagtcagacttgaatcaaagaaatgtctctggcacacaggccttcaaattgatggctggagcctgtcttttaagaacaaattaattcattataggaaaaaccctaactaattgaaaggtctaaattcttcaggttctcttgtgatcctgggaaatgctagaccgtgagcatcttgatggaggatgtgaactgccacttcctcacaggcagcaggcaggtgctgaataagtgcttgctgaatgaatgaatgaatcacgccaaggggcatgttacctgttccgccaaaatctgctgctgctgctgctgctgctgcctttgctcccgcaggaactgttgcttctgctgctctatcaactgggcccgctgatcaatgagcatctgcttcatgatggctgcttggggctggctgcccaggaagccggggcctgcgggactggctcctgagaccatgccacctgagcctgggggcacggaggactgcatggggcctgtggttcggggaagtccaactggatgctgctcctgaccgtgggatggaagtgcagcgtaagccatgggctgattcatcactcctttctgcttcatgagaagcaggcgtttctggtcttcgctcaggtgtgccctgggggcctgaagctagaagaggcggacgcgtggg

SEQ ID NO: 65436 - DNA, 823 bp, Homo sapiens
ggaattccactggccttcctctcggagggacaaggaagcgtggcctccctttcactcaccttacttttccttctggtccagggccagctcttccgaggctccagcctgcttttccgccgggtgtcatcaggatcatgctttgccctggagtaacctgaatcatctaaaaaacacggtctcaacctggccaccgtgggtgaggcctgaccaccttgggacacctgcaagacgactccaacccaacaacaaccagatgtgctccagcccagccgggcttcagttccatatttgccatgtgtctgtccagatgtggggttgagcgggggtggggctgcacccagtggattgggtcacccggcagacctagggaaggtgaggcgaggtggggagttggcagaatccccatacctcgcagatttgctgagtctgtcttgtgcagagggccagagaatggcttatgggggcccaggttggatggggaaaggctaatggggtcagaccccaccccgtctacccctccagtcagcccagcgcccatcctgcagctcagctgggagcatcattctcctgctttgtacatagggtgtggtcccctggcacgtggccaccatcatgtctaggcctatgctaggaggcaaatggccaggctctgcctgtgtttttctcaacactacttttctgatatgagggcagcacctgcctctgaatgggaaatcatgcaactactcagaatgtgtcctcctcatctaatgctcatctgtttaatggtgatgcctcgcgtacaggatctgggtacctgtgcaattttgaaaacccattggtt

SEQ ID NO: 65437 - DNA, 1533 bp, Homo sapiens
  misc_feature (1)...(1533): n = a,t,c or g
cagatggagcacgtggtccaggcttgccaccgcttcatccaggccagctatgaacctctgggcatctccctgcgccccctggaagcagaacccccaacacccccaacggcccctccaccaggtagtcccaggcgctccgaaggacacccagacccacctactgaatctcgaagctgcagtcaaggcccccccagtccagccagccctgaccccaaggcctgcaactggaaaaagtacaagtacatcgtgctaaactctcaggcctcccaagcagggagcctggtcggggagagaagttctggtcaaccttgcccccaagccaggctccccagtggagacgaggcctccagcagcagcagcagcagcagcagcagcagcagtgaagaaggacccattcctggtccccagagcaggctctctccaactgctgccactgtgcagttcaatgtggggctccagccagtaccccctacctcctcacatcccaggctcaagacacctctggatcaccctctgaacgggctcgtccactaccgggaagtgaatttttcagctgccagaactgtgaggctgtggcagggtgctcatcggggctggactccttggttcctggggacgaagacaaaccctataagtgtcagctgtgccggtcttcgttccgctacaagggcaaccttgccagtcaccgtacagtgcacacaggggaaaagccttaccactgctcaatctgcggagcccgttttaaccggccagcaaacctgaaaacgcacagccgcatccattcgggagagaagccgtataagtgtgagacgtgcggctcgcgctttgtacaggtggcacatctgcgggcgcacgtgctgatccacaccggggagaagccctacccttgccctacctgcggaacccgcttccgccacctgcagaccctcaagagccacgttcgcatccacaccggagagaagccttaccactgcgacccctgtggcctgcatttccggcacaagagtcaactgcggctgcatctgcgccagaaacacggagctgctaccaacaccaaagtgcactaccacattctcggggggccctagctgagcgcaggcccaggccccacttgcttcntgcgggtggganagctgcaggcccaggccttgcttccctatcaggcttgggcataggggtgtgccaggccactttggtatcagaaattgccaccctcttaatttctcactggggagagcaggggtggcagatcctggctagatctgcctctgttttgctggtcaaaacctcttccccacaagccagattgtttctgaggagagagctagctaggggctgggaaaggggagagattggagtcctggtctccctaagggaatagccctccacctgtggcccccattgcattcagtttatctgtaaatataatttattgaggcctttgggtggcaccggggccttcattcgattgcatttcccaccccctctctgaattgcccctgcggacgatgctaggttcaggnnnnncccgct

SEQ ID NO: 65438 - DNA, 607 bp, Homo sapiens
cctgggcgtgctcccccgggcacctactcctaagagtacccattacatatcagtttccctcaccaagctcagccccctctgccctctggtgagtctcctgagtccctttggagtccctctcttgctcccatgcagacaactggaagcaggagctgacaaaattcatcagccccgaccagctgcctgtggagtttggggggaccatgactgaccccgatggcaaccccaagtgcctgaccaagatcaactatgggggtgaggtgcccaagagctactacctgtgcaagcaggtgaggctgcagtatgagcacacgaggtccgtgggccgcggctcctccctgcaggtggagaacgagatcctgttcccgggctgtgtgctcagatgtcctgaggttttacaacacctacagcctggttcattctaaacgcatcagctacaccgtggaggtactgctcccagaccaaaccttcatggagaagatggagaaattctaggtgaacctcatggtccccacaccctcctctttgatctctgaatccacaatgagttcacagccttccctggccagaccctgttcaacctctcaggaacagggattctacaaca

SEQ ID NO: 65439 - DNA, 907 bp, Homo sapiens
tccagtgtggtggaattcgggctgtcagtgctcggaggcctcttcctgctctttgtgctggagaacatgctggggcttttgcggcaccgagggctcaggccaagatgctgcaggcgaaaacgaaggaatctcgaaacacgcaacttggatccggagaatggcagtgggatggcccttcagcccctacaggcagctccagagccaggggctcagggccagagggagaagaacagccagcacccaccagctctggcccctcctgggcaccaaggccacagtcatgggcaccagggtggcactgatatcacgtggatggtcctcctgggagatggtctacacaacctcactgatgggctggccataggtgctgccttctctgatggcttctccagcggcctcagtaccaccttagcggtcttctgccatgagctgccccacgaactgggtgactttgccatgctgctccagtcagggctgtcctttcggcggctgctgctgctgagcctcgtgtctggagccctgggattggggggtgcagtcctgggggtggggctcagcctgggccctgtccccctcactccctgggtgtttggggtcactgctggggtcttcctctatgtggcccttgtggacatgctaccagccctgtttccgtcctccggagcccctgcctacgccccatgtgctcctgcaggggctggggctgctgctggggggctgcctcatgcttgccataaccctgctggaggagcggctactgcccgtgaccactgagggctgatggggccagtggaaaggggtcgggttgcccttccttccccccaaccacaggaatggaggcgggacacagggccagtaggagcaataggattttaataaacagaacccatcccaaaaaaaaaaaaaa

SEQ ID NO: 65440 - DNA, 780 bp, Homo sapiens
ggaattccacgctgctttttctctttcctaaatgcagcgcttgcttggggacttcaagggaaggcttttggttggtgggctgagtgaccccaggctccgagaggggcaggcattgcttgggaggaggtgggagatgcacgcatgcccttagctaggcgtggggtggctcagttaagaagggcactgcctccgcagcccctcggcgctcagccagctgcagccccaaaggtctagggctttagggaaccgatccaggtttgggggcggggagaaagttctgaggcagctcctccctggacagagcagggcgaccccgcgccgggcctgcaggctcctacagctactgcccgccagcgggcaaggcgaagggccctaccagccagctgagcgggggattgtgctgtaggccctccagcagctgctctaacccctgccaagcctggtgcacaccctcgcggctctgcaccagccgctctgcgggcagctcctctacagagccagctgaggccacgatgccatagagctcacagaggctgtgccgcgcccgccccactggctgctggagctcggcgggcaggccctggaggctggagaccaggccactgtaggccgtgtgcagctgccggagaaggccgcagaccctggacagaaccccggcatcccgctcctgtgggaggaaggcgcaaggtgagtggagacccatgggcggggtggggggaccctagccctgtgccagacccatctcctggacagcagcgtcctccgcactggcacctgagg

SEQ ID NO: 65441 - DNA, 2796 bp, Homo sapiens
ggaaatcccaacacgggggatccttcagctcatgcacagttgcaaagagggctacgttaaagatttgaaaggtaacccaggcctgcacagggccatgttggatcttgataatggtacacgtccctcagagttgggccatctcagtcagacagcgtccctgaagaggggcagcagctttcagtctggtcgagacgacacgtggagatacaaaactccccacagggtggcctttgttgaaaaattgacaaaactcgtcttgagccagctgcctaacttctggaaactctggatctcctacgttaatggaagcctcttcagtgagactgctgagaagtctggccagattgaaagatcaaagaatgtaaggcaaagacaaaatgattttaagaaaatgattcaggaagtaatgcactccctggtgaagcttacccgcggagccctgcttcccctcagcatccgggatggggaagccaagcagtacggaggctgggaggtgaagtgcgagctctccggacagtggctcgctcacgccatccagactgtaagacttactcatgaatcgttgactgcccttgaaattcctaatgacctgttacagactatccaggatctcatcttggatctccgagtacgttgcgtaatggccacgttgcagcacacggcggaagaaataaagagattagctgaaaaagaagactggattgttgacaatgaaggactgacttctctaccatgtcagtttgaacagtgcatcgtgtgttctctgcagtcactgaagggggttctggagtgcaagccgggagaggccagtgtcttccaacaacctaaaacacaggaggaggtttgccagctaagcatcaatataatgcaggtttttatatactgtctggaacagttgagcaccaagcctgatgcagatatagatactacacatctctctgttgatgtttcttcccctgacttgtttggaagtatccatgaagacttcagcttgacctcagaacagcgccttttgatagtcctaagtaattgctgctatctagaacgtcacaccttcctaaatatcgcagaacattttgaaaagcacaacttccagggaatagaaaaaatcacacaggttagcatggcctcattgaaagaactagatcaaagactctttgaaaattacatcgagttgaaagcagatcccatcgttggctccttagaacctggaatttatgcaggatattttgattggaaggactgcctgcctccaacaggtgtcagaaactatttaaaagaagcactggtgaatataattgccgtgcatgcagaggtgttcaccatttccaaagaactggtccctcgggtactatccaaggtgatagaagcagtttctgaagagctcagtcgactgatgcagtgtgtttcatccttcagcaaaaatggagctttacaggcgagacttgaaatctgtgctttgagggacactgtggctgtttacctgacacccgaaagcaagtcaagttttaagcaggctttggaagccctgccccagctttccagtggagcagataaaaagttactggaagagctcctgaacaagttcaagagtagcatgcacttgcagctcacctgtttccaagcagcttcttcaaccatgatgaaaacataaatatctgccacataaaagaagtccaggaaaataacacgtaataagactgttcactctctaagtaccctaaaggtatttggtgtattaaacattgggtttgccatttttctcttttttcttcctctgacttcgaaaattgttggtatacatttcaaccaaaatgacctcatttgaaatgcccaggaagtatttgttttgccattcttactagatcagatcctgtatgactttaaaatacattttaaaatatattttgcatctcagcagaaggttgagtgctgcaggaagagctgcttctgcagggagttttctggaatggcgtggcacatattgaagcatttctcagtgtcccgttcacggaagcgcaggcagctcccacgacacacggagagactgactgatacgagatttggaaagctatgtagacatctttggagctcttactgtcctaaactgtacagctgtgcttaaaacccttatttcatataaatggccttaagttttctaattcaagcgggtttttggaaaaatttatggtctccattaaaatacatattacaactggggtagattatttgtggtccaggtgtctgtgatttaactttgcgttttgctatctgatttttatttttcacagggctaagcatgagctttcattctcactcactcttaatttgtcgtgcgtcactacacatgcacgtgttgcagtccctgaggccctgtgtgttatctgtgatggagtgtgaatgtgtaacgggcactgtgttacactctcaggtgttggcggggcggtcgcagacttcagggtcccctaacggaaaggccaggctccgcgtggacggccaactccctgcccgctccttcagcaggtgactgtctctgccacttcttacctgctgaaggatcttgctcagtagctggaacaatgctgctgtcacacagtctcttctctgaaacttcaggatgctccttggtcaccaggcaatgggagctgtagaccagccgcatgcacttgccccacattcactggtgactggcttcactggaataagttcaggtcaccgggacttctctcagagtcagcggcccacccaactccctcataccgtcgcatctgaaaatttcagagaggaatctctttg

SEQ ID NO: 65442 - DNA, 4197 bp, Homo sapiens
gccctgctgcccctgagcacacggacccgtccgaaccgcggggcagtgtgtcctgctgctccctgctgcggggactgtcctcagggtggtcctcacctctgcttccggcccctgtgtgcaaccctaacaaggccatcttcacggtggatgccaagaccacagagatcctcgttgctaacgacaaagcttgcgggctcctggggtacagcagccaggacctgattggccagaagctcacgcagttctttctgaggtcagattctgatgtggtggaggccctcagcgaggagcacatggaggccgacggccacgctgcggtggtgtttggcacggtggtggacatcatcagccgtagtggggagaagattccagtgtctgtgtggatgaagaggatgcggcaggagcgccgcctatgctgcgtggtggtcctggagcccgtggagagggtctcgacctgggtcgctttccagagcgatggcaccgtcacgtcatgtgacagtctctttgctcatcttcacgggtacgtgtctggggaggacgtggctgggcagcatatcacagacctgatcccttctgtgcagctccctccttctggccagcacatcccaaagaatctcaagattcagaggtctgttggaagagccagggacggtaccaccttccctctgagcttaaagctgaaatcccaacccagcagcgaggaggcgaccaccggtgaggcggcccctgtgagcggctaccgggcatctgtctgggtgttctgcaccatcagtggcctcatcaccctcctgccggatgggaccatccacggcatcaaccacagcttcgcgctgacactgtttggttacggaaagacggagctcctgggcaagaatatcactttcctgattcctggtttctacagctacatggaccttgcgtacaacagctcattacagctcccagacctggccagctgcctggacgtcggcaatgagagtgggtgtggggagagaaccttggacccgtggcagggccaggacccagctgaggggggccaggatccaaggattaatgtcgtgcttgctggtggccacgttgtgccccgagatgagatccggaagctgatggaaagccaagacatcttcaccgggactcagactgagctgattgctggaggccagctcctttcctgcctctcacctcagcctgctccaggggtggacaatgtcccagaaggaagcctgccagtgcacggtgaacaggcgctgcccaaggaccagcaaatcactgccttggggagagaggaacctgtggcaatagagagccccggacaggatcttctgggagaaagcaggtctgaaccagtggatgtgaagccatttgcttcctgcgaagattctgaagctccagtcccagctgaggatgggggcagtgatgctggcatgtgtggcctgtgtcagaaggcccagctagagcggatgggagtcagtggtcccagcgggtcagacctttgggctggggctgccgtggccaagccccaggccaagggtcagctggcggggggcagcctcctgatgcactgcccttgctatgggagtgaatggggcttgtggtggcgaagccaggacttggcccccagcccctctgggatggcaggcctctcgtttgggacacctactctagatgagccgtggctgggagtggaaaacgaccgagaagagctgcagacctgcttgattaaggagcagctgtcccagttgagccttgcaggagccctggatgtcccccacgccgaactcgttccgacagagtgccaggctgtcaccgctcctgtgtcgtcctgcgatctgggaggcagagacctgtgcggtggctgcacgggcagctcctcagcctgctatgccttggccacggacctccctgggggcctggaagcagtggaggcccaggaggttgatgtgaattcgttttcctggaacctcaaggaactctttttcagtgaccagacagaccaaacgtcatcaaattgttcctgtgctacgtctgaactcagagagacaccctcttccttggcagtgggctccgatccagatgtaggcagtctccaggaacaggggtcgtgtgtcctggatgacagggagctgttactactgaccggcacctgtgttgaccttggccaaggccgacggttccgggagagctgtgtgggacatgatccaacagaaccgcttgaggtttgtttggtgtcctctgagcattatgcagcaagcgacagagaaagcccaggacacgttccttccacgttggatgctggccctgaggacacgtgcccatcagcagaggagccaaggctgaacgtccaggtcacctccacgcccgtgatcgtgatgcgcggggctgctggcctgcagcgggagatccaggagggtgcctactccgggagctgctaccatcgagatggcttacggctgagtatacagtttgaggtgaggcgggtggagctccagggccccacacctctgttctgctgctggctggtgaaagacctcctccacagccaacgcgactcagccgccaggacccgcctgttccttgccagcctgcccggctccacccactctaccgctgctgagctcaccggacccagcctggtggaagtgctcagagccagaccctggtttgaggagccccccaaggctgtggaactggaggggttggcggcctgtgagggcgagtactcccaaaagtacagtaccatgagcccgctgggcagtggggccttcggcttcgtgtggactgctgtggacaaggaaaaaaacaaggaggtggtggtgaagtttattaagaaggagaaggtcttggaggattgttggattgaggatcccaaacttgggaaagttactttagagatcgcaattctatccagggtggagcacgccaatatcatcaaggtattggatatatttgaaaaccaagggttcttccagcttgtgatggagaagcacggctccggcctagacctcttcgctttcatcgaccgccaccccaggctggatgagcccctggcgagctacatcttccgacaagtgagagcagggccagagccgtctagtgtcagcagtgggatacctgcgcttgaaggacatcatccaccgtgacatcaaggatgagaacatcgtgatcgccgaggacttcacaatcaagctgatagactttggctcggccgcctacttggaaaggggaaaattattttatactttttgtgggaccatcgagtactgtgcaccggaagttctcatggggaatccctacagagggccggagctggagatgtggtctctgggagtcactctgtacacgctggtctttgaggagaaccccttctgtgagctggaggagaccgtggaggctgccatacacccgccatacctggtgtccaaagaactcatgagccttgtgtctgggctgctgcagccagtccctgagagacgcaccaccttggagaagctggtgacagacccgtgggtaacacagcctgtgaatcttgctgactatacatgggaagaggtgtttcgagtaaacaagccagaaagtggagttctgtccgctgcgagcctggagatggggaacaggagcctgagtgatgtggcccaggctcaggagctttgtgggggccccgttccaggcgaggctcctaatggccaaggctgtttgcatcccggggatccccgtctgctgaccagctaaacaccaatttcttcctgcttttctccacttggtttggaaaatcacacagttttcaggctccatctgtttggagaaaatacattctgaagcatccccaattcaccttctaaaaactcatgtgcaggtttgataaacaccagaacagaagacagtgatgctgtattattttagatttattacatagatttggaattcacttttttcatgacctagaaaaaaacattccagtgttcaactgttttatattattaaagggcttttaatttgtgaacttctgaaggcatgagtgttttctctttctacttttgtatatgtgcatgttttgtttcctctgacttggtatatgctcatctgagtgacggatatgtgaaatttgtagaactggttagtcaaatggccagactatttcattaatttatttcctcaaatgcttttcaaattaaagcacctttgttagtaaacagttaa

SEQ ID NO: 65443 - DNA, 1239 bp, Homo sapiens
  misc_feature (1)...(1239): n = a,t,c or g
agagttttttttttttttaatcagaatgacaaaggtaaagcagtgtttaggaacataaatctgacaggtggctcgccaggtcacttggagccaggataggcaggagtagctggccagagacgagcagccctgaaaactgttcctgccctggcctcacctcgtcaccacgtctgctgtggaaagggctgcgacctggaggctgtgctgttgaacaggcacatcgaggaggtccaacacagcgtcagaactcccacgccctcttctcagctctgccccttggtcagctgtcaggtgactcccaggcagagtccgttttgaggctcctgggactggaatacgggaccagcctgagttgctgtcagtcacgtcgcaggagaaaggactggcaaaggctcatggccccttgaaattctgttccttctaggcctttcctaagaagcttgtggccttctcaacttggattgaccggacccgctgggccaggaacacctgggccatgctcgccatcttcatcctggtgatggcaaatgtcgtggacatggtgagctcctgctgtccttgttgaagggacgcccctgttctcagtggagaagggcttctgtttgggtcacacaagcagtttctcagtccatccctccaccgtcatgtagctttggagtggctcttaggttcccaaacacatcatccccacctagtggaaggagtcttgtccctgtcatccagggagcctctgggatggacttgtttccttgaagctcctctcccagagtccgagagcacagttccatgtgcccaggcctgtgctaggtaccttatgtatgttgattcatttaatctgtgaaaaagtcctgagcagttgtaccagtatctgcagtttcatagggagaaactaactctcaaaaagggtaattggttgggcgcggtagctcacgcctgtaatcccagcactttgggaggccaaggtgggcggatcacgaggtcaggagttcgaaaccagcctggccaacatggtgaaaccccatctgtactaaaaatacaaaaattagccaggcatggtggtgcacacctgtaatcccagctacttgggaggctgaagcaggagaatcgcttgaacccaggaggcggaggttgcagtgagccgagattgagccgctgcactccagcctaggcaacagacagcaagacgaattccaccacactgantagggatctcgaaagggnctcgaannggcatctcca

SEQ ID NO: 65444 - DNA, 1587 bp, Homo sapiens
atgaggatggaggccggggaggcagcgccgccggcgggggcgggcggccgcgccgcaggcggctggggcaagtgggtgcggctcaacgtggggggcacggtgttcctgaccacccggcagacgctgtgccgcgagcagaagtccttcctcagccgcctgtgccagggggaagagctgcagtcggaccgggatgagaccggggcctacctcattgaccgtgaccccacctacttcgggcccatcctgaacttcctccggcatggcaagctggtgctggacaaggacatggctgaggagggggtcctggaggaagccgagttctacaacatcggcccgctgatccgcatcatcaaagaccggatggaagagaaggactacacggtcacccaggtcccacccaagcatgtgtaccgcgtgctgcagtgccaggaggaggagctcacgcaaatggtctccaccatgtctgatggctggcgcttcgagcagctggtgaacatcggctcctcctacaactacggcagcgaggaccaggcagagttcctgtgtgtggtgtccaaggagctccacagcaccccaaacgggctgagctcagagtccagccgcaaaaccaagagcacggaggagcagctggaggagcagcagcagcaggaggaggaggtggaggaggtggaggtggaacaggtgcaggtggaggcagatgcacaggagaaagctgttacaagccagaggcacccggatgtgaggccccagatcacctccagggacttggggttcccatctgaaatcctttatttttgtaccatggggtgggccccgggcctgagaaggaagaagcaccctctccccggcctcctctgtctgcacccgtggggctgtgacttactcctgcctccaggggcggggcggggcccccctgggacctcttaaggcccaaggtgggccccaggacctctgggcagagtggactgctcatggcagatgtgtggcaatgtctggctgtgtctctccggcacctgcgtcccctctcccgggctcccctgctgcatggtggatgtgctccttcctggcccggtcacattgcctccttgagccttagtccagggggtcactcctcccaccccacctacctcacagggttgttgtgagggtgcacagaggagcaaagtccctgaaggccctcaggcagtatataggggccgcccaccttcagctgccctgggatgggaaggacccagcccgacccctgggcataacactgtgtttgcaaatggagattcaggtattggggatgcaggttgtggggagctggcctggcagagtaggggtagttggcttggccttctctttggtgatcccacccccagccatttgcattgctggcccagcgcctggcctggggggcggggagaggcagcagaaggggctgggcaggggcggtggaggactcaggaactgcccggggagagtgggtatggcggctgagccaggggccctcctgtgtttgacttcccgggatgggtccttgcttctcagctgtgtccgaccccaccatgtaataaaacccaaaggaacagcccaaaaaaaaaa

SEQ ID NO: 65445 - DNA, 4406 bp, Homo sapiens
  misc_feature (1)...(4406): n = a,t,c or g
ttttttttttttgtgcaagatttaaataaaaaaacaaaacaaaaaaataggaaatggttgctttcaaaaatttccccaggttgtgaaaaggtttgccaacgactctcagggggtgtggttctaagctgcatcaagtgaaacaaatacaaaatgctgtccctcctccctgggctggaaggcagtgcactttctccctcttaacagcccagactagacgggtgaggaggtcagtggcctgtgacccagggccaagctgggagtgttccgcattagcctttttctctgaaccagtggggggaattccatctacccttgagggcgtgctgggctggggccccgttttccacaaccagcacatgtgntggtgagaaaaaacccaagggtagctttatcaacagggctgctggggccttaaataacttgacagtgagtgttgggccgggtcacagccaggggaaaggacttaacacagattgccctcccaagcccccactggctgggcctaattttaggattaccacgggaaaaaaagctttgatgaaagacaacaggaagtcaacacagcagagagtggtgtggacaacccagaagccagcctcacgcattccatgcccacagttaacgatgacaacaacagcaataataataataataataaaacaaaggtacaggtgaaaagcagcgcttggggtgtgctgctgcaagctggggaaggcgcgtgctcaacttggatgggacacacctagtctttcttcaagtccctggattcaaagagcttcaaccgttcttgcaccgtcaggccttccttcagactcttggacctgatgtttctgagttgccgggtgacacaggatctgtctttcttcaagaagtcagggttgcttttagatttcattatatcatatccggacaccgtggcactgtcaggggacttctcccccagtgcttccgttgcagccttgagctgctccttcaacctgctgatgtcacagtcagccttagccttcgcgatgctgagctctgtgtagatgtctttgtacttgtcacttgcatacttcttgtcccgcagtgccgtctgcagctcatccttgagggagctaatctcctgtttcaggtactgtatttccgattcctttacccgcaataagacctccagttcataggcatccttgccctgtgcaaggggtgacccagtggcctccccaccgccgtccccaatcaagcaacgtccgcaaccgtgtgatctctgcagccaggcggttgttcagctcctggttgtgggcattgagctcctggttctcacgctggcactgccgcagggcctgccgctcggcctccagcgcctgggccagatgggcattctccaggcacttctgcgagtactgctccgagaggacctccaagttccacgctgcaccgactgcagctccctccaggtactggcgccgcagggcctcaaacatccgaagttgacgctgctgatctgggaccgctggctcttctcccagtcccgctccatttcctcccggtgggcgttcttcatggcttcgatggctgagatggtggccgctgtctcctcggctaggaggcggtctttctcttctcgaagtttctctagctcccgctggtgctgcctctggagatcttcaatcttccttctggtgcgtttcttccattgctgcaaaccctcgctcgcacgtggccttaaggctctccaagtccctctggtacttctcacgcagtgtggccgcgtcgccctccaggtccttgtgtcccagctcctcccgcatgacatccatctgggcctccagctcctggatgcgctccctcagccccgtcatggagtcagcctctccctgggtggcctgccagttgggggcaggggctggcagggccttggggtgtggcccctggtggaggcagagggtgtcctgaaggcacctcaggctctgcgagtagtgctcctgcagggtcctcagctcctcctcgtggatcgtctgcagctcccggaccttgagctggaacctgtcctccagggtctgtatctgctcaccatgatgcctctccatgtcctgcctgtctctgaccgaggcatccagctggctcaggacccggctgcgctcagcctgcagtgtgctctcggtcctggtcagctgctccaccacacaccgaatctcctcctcatacctgccccgcagggtgaacatgctcatgctgtgcttgctctctgcatcctccagacactgctgctgatggtctagctgggcggccttggccttgagctctgcattctccctttcaacaatggcgatcacatccaggtactcgctcttctgcttgcggagaagctcctcatactcctccctcagggcccgggctgcctgtgcctgctctgagcaggagggctcccgggtttgccaggactccttgcagagctggagctccttctcatattctagccggattctgcaggacgcatagcaaacctgggcctgaataatggcatcctgaaccaacaatgaagaatactgaccgaggcctcccaaacaagtgttatacgagagactctgggacacctggagaagcttctggcaatctctcagcgattccacaggtggcagagatggtaaggcagccgctatctcctctaagaggctggccttctccttcagctgctgggcaagctcctcctgaatagcaacaaaggccccagggctctggtcagacacatcgaagggctcctgagagctgtctgagtctcggcccaggacttctcctaaggggctcaggtcccaggacagctgaacaccatcttcatggcccgctggaagcctgagggcttccaagacctgctgcatcactctttcaaagtctggggtttggtaggctcccaggatttccctcagcaggcatttgtgctgccgcagggccgtctgggtgccccgcagggtctcctggatgctctgtagcctgcggtggaacgactccctcactgactgtgtggcaaagctgagctctgccctgacccatgtggcattggccaggatgggggccaggccctgtgggatgctttgctgcccgtctcctgaggcaccgactgcctctcctcccagtgtccccaagtgcttcctcagagactcaacctggctccagaactcaccatccactaggaccttcctggcccaggtgtctacgggggccccagcagattccatcggtggctgtcctgaccaagaaatctcatggagcattcgggagacatctgatgttgtgttcttcagggaatctgctatctggctgatcagcgaggcctccagagcaatctggtcagaaagaagcctcacctgctcctgctctgtcaactcagactgggagcactgctgcagggaggcaggcttcccattctcctcggtgccacctgtctccagctgtgcacgggccccgccatgggctggggccggccagtgctgcagggcttggatggcgctgacgagtgcactctccacactggccagggaggctgcgcgtgcgtcctgctcatcctcctggctggccctaggcagagatctcagttgttctcggcaattttccaggcacatcagggcctgactattcttgacctggaagtccccaagctctccaacatgcccttcaaccctcctggccctctcctgcctctcctgctccagctgggaggccagtgcgccaacctggagcaggctggcgcggagctgctcacgcagctgggcctcggtgcccgcccactggtggtgcagtgcgagcagtgcctcacggctctgaccctgctggctctccagcctcacggtcacgtctttgagcttttcctctgtgacgtagagcttggtctccagggagtggatgatggagaggtacgtgtcagagtcgccagttgcaggcagtacactgggtgcaggctctgaggacatgctttcttccgagggtgaccggtcctggctggtgtcggaagatgtgctgctggtccaggtcttctcagacccttcggggtgaatgtatctttggcactggattgtggagaaccggattctttgccttttaacaccaggtgccccttggtcgagtttggctgtgccctgctgatggccctccctgtcaagcacttccactgactttgggggcaccatgctgtcttccctactggggctgccatcaccgtactcttcccccggaggagcccccaggtcctcgtcctcatcctcgagccttgtgtgtgggaggcctagaggtgccctagtggcttggactggttggcctgggagcaaagtgccatccctttctgtctcttcaggggtactccgtggctcttccatgtcctttggagattcacttgcaaatttccttaaaatctcttcttttgcctggagctt

SEQ ID NO: 65446 - DNA, 1918 bp, Homo sapiens
atggagccaggcagcgtggagaacctgtccatcgtgtaccggagccgcgacttcctggtggtcaacaagcactgggacgttcgcattgacagcaaggcgtggcgggagactctgaccctgcagaagcagctgcggtaccgctttcccgagctggccgaccctgacacctgctacgggttcaggttctgccaccagctggatttctccaccagcggggcgctgtgcgtggccctaaacaaggcagccgccggcagcgcgtacaggtgcttcaaggagcggcgcgtgaccaaggcttacctggcattgctgcgggggcacatccaggagagccgggtaaccatcagccatgccattggcaggaacagcacggagggccgggcccacaccatgtgcatcgagggctcgcagggttgtgagaacccaaagccaagcctcacagatctcgtggttctggaacacgggctgtacgcaggcgatcctgtctccaaagtgctgctgaagccgctcacgggccggacacaccagctgcgcgtcgcactgcagtgccctgggccaccccgtggtgggcgacctgacctacggagaagtctcgggccgggaggaccggccgttcagaatgatgctgcacgctttctacctgcgcatccccacggacaccgagtgtgtggaggtctgcacgcctgaccccttcctgccctccctggatgcctgctggagcccccacacactgctgcagtcgctggaccagctcgtgcaggccttacgggccacccccgaccctgaccccgaggataggggccccaggccaggcagcccctccgcactcctgcctgggcccggccggcctcctccacccccaaccaagccccctgagactgaggcacagcggggcccctgcctgcagtggctgtcggagtggacgctggaaccggacagctgagagccgtggggctggggcagggggtgtcagctgcacagcgggactctagggagatgggcgagcgagcgtctgctcactggctctggggcctcgaggtgccaggcagcatcaggcccactgggttgccccggccaggcctgcgaggaagggctgaggtggggccggcagggggcgccaggcagccgtgatcacaggtgacgaccgcaccgcggccgtgggactgatgcgggatcccgagggccttcctgcccacatgccccgggagaaaccgaggcccctccctcctcctggaacagcttccggctctcaagcgtcaccccaggggcgtcagttttacggactcaaggtcacctcaggaagaggcagggccaggttttgggataggctttgcctccaggatgggctgctcctgggcctggtgagctactgcccccaacctaccctctagaggggctgggaagggccgttctgggctcacctggcctgggagacccatctggtccctgcgtcctctgcccctcactgctctgtgcagatcctgtcgccctcagctgcctcctcccgagacctaatggtccctgctgggctcgagtctgcaggcccggctgcgtgtgccttggcctcactgtaccagtggttccctctctgcccggattctgagctcagtgtggtgtttggtgcacaggggttggtcaggggccatggccaaggccctgccacgcacgcccatccctcagatccactgtgagcaccaacctgctgcagtctcttgggcccctgctggcagctctgccacgtcaccgcctgcctggctcccacacagccatgcattgtcactctgcctccgggaccccagcttgggagctgtgggtctgccaggtcccacctcctctgtcccccatgccacaacctgggctcctggctacagcagggctccagggactccaaataaatgttcagtgactggcaaaaaaaaaa

SEQ ID NO: 65447 - DNA, 601 bp, Homo sapiens
gcgcggcgcgccagcaacactgcacgcaggtgcgcagccggcggctcatgaaggagctgcaggacatcgcgcgccttagcgaccgcttcatctccgtggagctggtggacgagagcctgttcgactggaacgtgaagctgcaccaggtggacaaggactcggtgctgtggcaggacatgaaggagaccaacaccgagttcatcctgctcaacctcaccttccccgacaacttccccttctcgccgcccttcatgcgggtgctcagcccgcgcctggagaacggctacgtgctggacggcggcgccatctgcatggagctgctcacgccgcgcggctggtccagcgcctacaccgtggaggccgtcatgcgccagttcgcagccagcctggtcaagggccagggacggatctgtagaaaagctggcaaatcaaaaaagtccttcagtcgcaaggaagctgaagctacctttaagagtttgggtgaagacgcatgaaaaatatggttggggtcaccccgcccgtgttcccgacggctgatgtctgccacgtgcagtagacggttcgagcgcctgtccacacacacaccagtaccctgacatct

SEQ ID NO: 65448 - DNA, 3479 bp, Homo sapiens
atgaactctcccaacgagtcggatgggatgtcaggtcgggaaccatccttggaaatcctgccgcggacttctctgcacagcatccctgtgacagtggaggtgaagccggtgctgccaagagccatgcccagttccatggggggtgggggtggaggcagccccagccctgtggagctacggggggctctggtgggctctgtggaccccacactgcgggagcagcaactgcagcaggagctcctggcgctcaagcagcagcagcagctgcagaagcagctcctgttcgctgagttccagaaacagcatgaccacctgacaaggcagcatgaggtccagctgcagaagcacctcaagcagcagcaggagatgctggcagccaagcagcagcaggagatgctggcagccaagcggcagcaggagctggagcagcagcggcagcgggagcagcagcggcaggaagagctggagaagcagcggctggagcagcagctgctcatcctgcggaacaaggagaagagcaaagagagtgccattgccagcactgaggtaaagctgaggctccaggaattcctcttgtcgaagtcaaaggagcccacaccaggcggcctcaaccattccctcccacagcaccccaaatgctggggagcccaccatgcttctttggaccagagttcccctccccagagcggcccccctgggacgcctccctcctacaaactgcctttgcctgggccctacgacagtcgagacgacttccccctccgcaaaacagcctctgaacccaacttgaaagtgcgttcaaggctaaaacagaaggtggctgagcggagaagcagtcccctcctgcgtcgcaaggatgggactgttattagcacctttaagaagagagctgttgagatcacaggtgccgggcctggggcgtcgtccgtgtgtaacagcgcacccggctccggccccagctctcccaacagctcccacagcaccatcggtgagaatggctttactggctcagtccccaacatccccactgagatgctccctcagcaccgagccctccctctggacagctcccccaaccagttcagcctctacacgtctccttctctgcccaacatctccctagggctgcaggccacggtcactgtcaccaactcacacctcactgcctccccgaagctgtcgacacagcaggaggccgagaggcaggccctccagtccctgcggcagggtggcacgctgaccggcaagttcatgagcacatcctctattcctggctgcctgctgggcgtggcactggagggcgacgggagcccccacgggcatgcctccctgctgcagcatgtgctgttgctggagcaggcccggcagcagagcaccctcattgctgtgccactccacgggcagtccccactagtgacgggtgaacgtgtggccaccagcatgcggacggtaggcaagctcccgcggcatcggcccctgagccgcactcagtcctcaccgctgccgcagagtccccaggccctgcagcagctggtcatgcaacaacagcaccagcagttcctggagaagcagaagcagcagcagctacagctgggcaagatcctcaccaagacaggggagctgcccaggcagcccaccacccaccctgaggagacagaggaggagctgacggagcagcaggaggtcttgctgggggagggagccctgaccatgccccgggagggctccacagagagtgagagcacacaggaagacctggaggaggaggacgaggaagacgatggggaggaggaggaggattgcatccaggttaaggacgaggagggcgagagtggtgctgaggaggggcccgacttggaggagcctggtgctggatacaaaaaactgttctcagatgcccagccgctgcagcctttgcaggtgtaccaggcgcccctcagcctggccactgtgccccaccaggccctgggccgtacccagtcctcccctgctgcccctgggggcatgaagagccccccagaccagcccgtcaagcacctcttcaccacaggtgtggtctacgacacgttcatgctaaagcaccagtgcatgtgcgggaacacacacgtgcaccctgagcatgctggccggatccagagcatctggtcccggctgcaggagacaggcctgcttagcaagtgcgagcggatccgaggtcgcaaagccacgctagatgagatccagacagtgcactctgaataccacaccctgctctatgggaccagtcccctcaaccggcagaagctagacagcaagaagttgctcggccccatcagccagaagatgtatgctgtgctgccttgtgggggcatcggggtggacagtgacaccgtgtggaatgagatgcactcctccagtgctgtgcgcatggcagtgggctgcctgctggagctggccttcaaggtggctgcaggagagctcaagaatggatttgccatcatccggcccccaggacaccacgccgaggaatccacagccatgggattctgcttcttcaactctgtagccatcaccgcaaaactcccacagcagaagttgaacgtgggcaaggtcctcatcgtggactgggacattcaccatggcaatggcacccagcaggcgttctacaatgacccctctgtgctctacatctctctgcatcgctatgacaacgggaacttctttccaggctctggggctcctgaagaggttggtggaggaccaggcgtggggtacaatgtgaacgtggcatggacaggaggtgtggacccccccattggagacgtggagtaccttacagccttcagcttgagccatccctttgcaggacagtggtgatgcccattgcccacgagttctcacctgatgtggtcctagtctccgccgggtttgatgctgttgaaggacatctgtctcctctgggtggctactctgtcaccgccagatgttttggccacttgaccaggcagctgatgaccctggcagggggccgggtggtgctggccctggagggaggccatgacttgaccgccatctgtgatgcctctgaggcttgtgtctcggctctgctcagtgtagagctgcagcccttggatgaggcagtcttgcagcaaaagcccaacatcaacgcagtggccacgctagagaaagtcatcgagatccagagcaaacactggagctgtgtgcagaagttcgccgctggtctgggccggtccctgcgagaggcccaagcaggtgagaccgaggaggccgagactgtgagcgccatggccttgctgtcggtgggggccgagcaggcccaggctgcggcagcccgggaacacagccccaggccggcagaggagcccatggagcaggagcctgccctgtgacgccccggcccccatccctctgggcttcaccattgtgattttgtttattttttctattaaaaacaaaaagtcacacattcaaaaaaaaaa

SEQ ID NO: 65449 - DNA, 1116 bp, Homo sapiens
gcggccgccggcgggccgggcccgcgcacagcgcccgcatgtacaacatgatggagacggagctgaagccgccgggcccgcagcaaacttcggggggcggcggcggcaactccaccgcggcggcggccggcggcaaccagaaaaacagcccggaccgcgtcaagcggcccatgaatgccttcatggtgtggtcccgcgggcagcggcgcaagatggcccaggagaaccccaagatgcacaactcggagatcagcaagcgcctgggcgccgagtggaaacttttgtcggagacggagaagcggccgttcatcgacgaggctaagcggctgcgagcgctgcacatgaaggagcacccggattataaataccggccccggcggaaaaccaagacgctcatgaagaaggataagtacacgctgcccggcgggctgctggcccccggcggcaatagcatggcgagcggggtcggggtgggcgccggcctgggcgcgggcgtgaaccagcgcatggacagttacgcgcacatgaacggctggagcaacggcagctacagcatgatgcaggaccagctgggctacccgcagcacccgggcctcaatgcgcacggcgcagcgcagatgcagcccatgcaccgctacgacgtgagcgccctgcagtacaactccatgaccagctcgcagacctacatgaacggcttcgccccacctacagcatgtcctactcgcagcagggcacccctggcatggctcctggctccaatgggttcggtggtcaagtccgaggccagctccagcccccctgtggttacctcttcctcccactccagggcgccctgccaggccggggacctccgggacatgatcagcatgtatctccccggcgccgaggtgccggaacccgccgcccccagcagacttcacatgtcccagcactaccagagcggcccggtgcccggcacggccattaacggcacactgcccctctcacacatgtgagggccggacagcgaactggaggggggagaaattttcaaagaaaaacgagggaaatgggaggggtgcaaaagaggagagtaagaaacagcatggagaaaacccggtacgctcaaaaaaaaaa

SEQ ID NO: 65450 - DNA, 2990 bp, Homo sapiens
cggcgcgcgggcagcgtgaagcgaggcgaggcaaggcttttcggacccacggagcgacagagcgagcggcccctacggccgtcggcggcccggcggcccgagatgttatctgggaagaaggcggcagccgcggcggcggcggctgcagcggcagcaaccgggacggaggctggccctgggacagcaggcggctccgagaacgggtctgaggtggccgcgcagcccgcgggcctgtcgggcccagccgaggtcgggccgggggcggtgggggagcgcacaccccgcaagaaagagcctccgcgggcctcgccccccgggggcctggcggaaccgccggggtccgcagggcctcaggccggccctactgtcgtgcctgggtctgcgacccccatggaaactggaatagcagagactccggaggggccgtcggaccagccggcgcaagcgggcgaaggtagagtacagagagatggatgaaagcttggccaacctctcagaagatgagtattattcagaagaagagagaaatgccaaagcagagaaggaaaagaagcttcccccaccaccccctcaagccccacctgaggaagaaaatgaaagtgagcctgaagaaccatcgggtgtggagggcgcagctttccagagccgacttcctcatgaccggatgacttctcaagaagcagcctgttttccagatattatcagtggaccacaacagacccagaaggtttttcttttcattagaaaccgcacactgcagttgtggttggataatccaaagattcagctgacatttgaggctactctccaacaattagaagcaccttataacagtgatactgtgcttgtccaccgagttcacagttatttagagcgtcatggtcttatcaacttcggcatctataagaggataaaacccctaccaactaaaaagacaggaaaggtaattattataggctctggggtctcaggcttggcagcagctcgacagttacaaagttttggaatggatgtcacacttttggaagccagggatcgtgtgggtggacgagttgccacatttcgcaaaggaaactatgtagctgatcttggagccatggtggtaacaggtcttggagggaatcctatggctgtggtcagcaaacaagtaaatatggaactggccaagatcaagcaaaaatgcccactttatgaagccaacggacaagctgttcctaaagagaaagatgaaatggtagagcaagagtttaaccggttgctagaagctacatcttaccttagtcatcaactagacttcaatgtcctcaataataagcctgtgtcccttggccaggcattggaagttgtcattcagttacaagagaagcatgtcaaagatgagcagattgaacattggaagaagatagtgaaaactcaggaagaattgaaagaacttcttaataagatggtaaatttgaaagagaaaattaaagaactccatcagcaatacaaagaagcatctgaagtaaagccacccagagatattactgccgagttcttagtgaaaagcaaacacagggatctgaccgccctatgcaaggaatatgatgaattagctgaaacacaaggaaagctagaagaaaaacttcaggagttggaagcgaatcccccaagtgatgtatatctctcatcaagagacagacaaatacttgattggcattttgcaaatcttgaatttgctaatgccacacctctctcaactctctcccttaagcactgggatcaggatgatgactttgagttcactggcagccacctgacagtaaggaatggctactcgtgtgtgcctgtggctttagcagaaggcctagacattaaactgaatacagcagtgcgacaggttcgctacacggcttcaggatgtgaagtgatagctgtgaatacccgctccacgagtcaaacctttatttataaatgcgacgcagttctctgtacccttcccctgggtgtgctgaagcagcagccaccagccgttcagtttgtgccacctctccctgagtggaaaacatctgcagtccaaaggatgggatttggcaaccttaacaaggtggtgttgtgttttgatcgggtgttctgggatccaagtgtcaatttgttcgggcatgttggcagtacgactgccagcaggggtgagctcttcctcttctggaacctctataaagctccaatactgttggcactagtggcaggagaagctgctggtatcatggaaaacataagtgacgatgtgattgttggccgatgcctggccattctcaaagggatttttggtagcagtgcagtacctcagcccaaagaaactgtggtgtctcgttggcgtgctgatccctgggctcggggctcttattcctatgttgctgcaggatcatctggaaatgactatgatttaatggctcagccaatcactcctggcccctcgattccaggtgccccacagccgattccacgactcttctttgcgggagaacatacgatccgtaactacccagccacagtgcatggtgctctgctgagtgggctgcgagaagcgggaagaattgcagaccagtttttgggggccatgtatacgctgcctcgccaggccacaccaggtgttcctgcacagcagtccccaagcatgtgagacagatgcattctaagggaagaggcccatgtgcctgtttctgccatgtaaggaaggctcttctagcaatactagatcccactgagaaaatccaccctggcatctgggctcctgatcagctgatggagctcctgatttgacaaaggagcttgcctcctttgaatgacctagagcacagggaggaacttgtccattagtttggaattgtgttcttcgtaaagactgaggcaagcaagtgctgtgaaataacatcatcttagtcccttggtgtgtggggtttgttttttttttttatattttgagaataaaacttcatataaaaaaaaaa

SEQ ID NO: 65451 - DNA, 5723 bp, Homo sapiens
ttttttttttttctaaaacaacaacataggcattttatttcttttcattaagcttcttagtttcttagtatcacaatggaatgatgagaaaacaacaaaaacgtgagtcatttgcaaatctctgacaaagagcagagatctcaaggcaattggggcgggggaggcttgacagaagtgccagagcagttccaacgtcacatctctccttggctggaatggtgagaaaggtggcactgtcgtgagctgtccttggcaaattctgccccatgagccacgtgcgcctgggtctgcatgggccaccccgcgggattttcctggtggcctcctaggtacctgggccacacacccctccgcctggttccaacgccctggggagcaccgtcccagtgctcaggtgggacccagaagccagctctgctgggcagcgggcaagatgtggaggagcggcagaggcaggcagcgttgcttgcggtgggagaagccaaggagtgtgaccaaggcccatctgggagacatctgtggtggaaggtagggctggcgcaggtggcagcagcagaagtccgtgtccccaggcagtagcaggcctagagcttcacagtgccagggggcaggctgtcgttgcagagtctgtagtagcgcaggtcgttgaccagcctgtgcacattctgggtgaatgagggcaggtcctggaaggcaggggcatagctgcagccaacaacacaccaggtcacccacccaccagaccccaacagctacttccatcccagagtgtgcactgaagataggggagcactttctaaaactcaaaacttctattcactgttgcactgcgtgtcacagagactctgtgccaggcgctgtgggagaaaaagaacaagaggaatacgtccctagggcctctcgggtgccagacactgctgcaatcaacatacagacatcaactcactgagtcctcaccacaaggctgccaccaagccctaccagaaccactagtctaaggacagaaagaccaaagcgctgcaccatgaagaagctggccccagctcacactgaagagaccagcacacttgctcctgagtccggcccctcaaacgcagacatggctgtggtgacagccctcttcttcaccatggccccttgaggtgacgcgcacaccgagcaatgtctgcagaacctttacccacggggctccaggccgcccctgcccctcgagagccacccgagcagcagcaaacacagtcccaaggcctgtcccactgggcgcagcgtgggccatggaaggccctgggccagaagtgaggccctgacctccgccatcatgcacacggtgagaccctgctttttttttcagtgtaggtcccggtgaggactcaaacaggcccagcaagccccagcagagccatgagcaggaccaagttcattttcctgcccaaccactattcctcttccagaactccattcaaagcctgcctcttcccaaagtctgcacagatgcctcctatttcctggccccagcagccagctcagcgcctctgtcctgagcaatctgcttctggggagtgtgtgcaggctctggggccagaacacccaggtctgcctcctgcttcgcagctctaccacttccaagttctgtgaactgctcaccttctgagcccccaccatctgtgaaatgggggagtaacaggacccacacttcagaggcttgttagaaggcttactcgagccaagacatgtcacatgcttggcactatgtggtccacagagggtgctgtattggcctgtctaccatgaaagacttggtgaaggctgggactggtgccccagttcctggcccggggcttgagaagcagctggcttcaaacacacagtgcgtgactgaatggaaggtggtgattcttttattttaccctcaaaaaaccaactaagggatgtcttttaaatcagtggctcccaaatgccaaaccagaatttcctgggtagaacacagaagtctgtttctccatttttaataagtaccccaggtgcttctgatataactagatttttttttttgagacaaagtcccactctgccgcccaggctggagtgcagtggcacaacctccgctcactgcaacctctgcctcccgggttcaagagattcttgtgcctcagcctcccaagcagctgggattacaggcgtgtgccaccacacctgactaattttttttatttttagtagagacagggtttcgccatgttggccaggctggtctcaaaccccctaacctcaagtgatccgcccgccttggcctcccaaagtgctgagattacaggtgtgagacaccgcgcctggcctataactagattttgaaaccacagctttaaatcaaaaagttgactgatattgatgtcgttagaagctgatcattaagtattaggatctggcctctagaaaaaggaaaaaacatatccaggggctgaagtgaactggaagaggcttaggagagaacaagtcccaagaaaaggaagaccccaagacaaaggagaacaggatgagtctaagcaaaagcttccctgccacacgtggcaaatgaggaaagcaggcggccaggtttgcaccagtgagagcagtgtgtgcatctgagcactacggtggagccgtggacaagctgcttcacagaggactcaggtcaagaaccccaagaggaccagggagaaagcgatttcttttcctaatttcatcaagtataaaacggtacaaggaaaagttcccagaagttcctatcaggcaagagagaggcctggtcacctgacacaggaagaagagaacaggtgagccccatggggaaggaggtcccaggcactgtcaggctccaacaagatggcctcatggacaccaagagccagcagcacccagctcccaccgaggtgctgcacgggtggggacagcccacctgacagtccctgcacaggtggcagcagtgggacaagagggtgagtactaggagggctcctcccaggacctggcagcaactcagcccaagctgagctggggctggtctggaaagagcccaagacagccggggaacctgggtcccacctctaaccctggggacccagaagtgcagctcccaagcaccaaccatctcagcctgaatgcaagcctgggcacactccaatgctggccccaccggggctcatcacccaggagggagaacggcagggtcctgggtatgaacaaagatgccaagacaaatggaggggctgcagagccaggaactcgggacctccatggctgagactaagaacatacgtgctacagacaccaagactggggaaaaggctgtgcccctcaatcaggctacagcaccaggtcagcaggcatctcgtgagctgccgccaagctgcagggtgggcacagaccacgcccagaggcctcaatgtgccccctccttgctgcacaggtgccaggcttgcgtgcccactctgccctcctcttagcccggcctctttctctcctcacccgatccatcttgaaattccgccccagcacacttttttggttggcatccacaccatcacagctggtcaggaactctgggaggaaggcggcaaagaagccatcaaagtcgactgaggccatgttgtaagaatgccgatgcccaatctccctcctgccagaagatcatgggacttgtggacccaggaccctggagcagcacgttcacaaactggaacaaccatggcagtcccggaagatccttcttgtggtaacagcttctgcttggtgttgagagtctcccaagtaagaagagattttgtttaaaaaggtggatgtcgggctggagaaaggactgtccgaaagcctgcatgatggcactgaactggggctcattctccatctgctcctcaagcgatccccctatggacactggccagcacggtggacttgaagaagtacctccagttgtgatggagcgtccggaaaaggagctcaaacagctcggccttcacatcaggggagggacgctcggcaatgatgggatacacttgctccatgcacagggcgatgatgctggggagaaagggcttgaacacctggcgtggctcctggaccaccacctgcaggatcttcagaatcttctccaccacccggcagcctgtgctgccctcgtggaggatgctctcggctagctgctctctggtaaacatgttgaggaaagtctgtatgttttgctcagtgaaaggcacccccatctgtactctaaggcctcgaaccagagtgaggaagaagctcagcatctcatcagtcacatctggctgatggataaaagctggaaagaggcccagggagacctgaacagattccctgcaaccgaactggtaagcaaaatctgtcgaagacttggtggactccccccgagatattctcccacaatatcttcctaagacgctgaagtgtctggtggataatcagtttggtgtcatccagtggcatctttctctgtggggcaacagcactgggcttcaggttgcgatagtcccgggagagtgcagagatgaggctggcatggttgatggagcgcacgggccactgctgctcattctctggaaggtttggccacggaagcagcaagatgttagagagggctcggcacaccaacacctgggccttatcgacaagtcgcagggcagaggcatcagtgattctgttgaatactttctgcactgcagggatgctgatcagaaagacgggccgcacggtggtggccagtgagaccagtaagtggcacgcagatagcagcagcttgtcttggaccttggtgctgattaggggtgtgattgcatccatggtagtagagatgagtgtcacgaactgctgcgtgttctgccggtgaatttcactgcaatactgtgctaaccagtgagagtaagcctgcagccgccagccagggactgagcatgcgcatcaatgaggtcaggtttcaatactgatggcacagcagtttcaatgttgtacaattttatctgagatccgtacagagtgactttgaccaacctttccacgactgtgagggcatcattgaacccgtgcagcaaacacatccccgataaagtactcggccaggcggcccacggcctgcagcagggagctcaagtctctcagggagcagtgcagccgccggcagtcgttctccgccgtgatgttcaacctgtgtcctgaccctgaagtgactataaactgttgtaatcccaaataaacttcctaaattgtcctgaagaacagggaacagtgtggagaaggcgtgcgtgggcaggagctccatcactttggccaccacctccaagctgtgccgtaagtaccgctgccactccgtctgctgatcgtcatccagagtctcatcatccaactcctccagctgggcttggttgtatctgaactggattcgattcaacacctctgtgagcaggagcaccagggcatcttcgtacctgttgagaactgcttccttgtctccaagacgacttttaattttacttgtcagatagtccaaaaacagcgtccagatatccaaacaagagaagtaaccttcatgagtaggctgatgaaatgtgtacttgaacaaaagtgtcaaaaactccaccacagggaactgggagtaagactcgattcttcttaggtgaacactcacaaagagccgaagaaagtcagtaaacttctcgatatagctctcatcgagc

SEQ ID NO: 65452 - DNA, 5906 bp, Homo sapiens
cggccgcgtcgacctgtggactattctgcttggaaggtcagctctgagagagctgagtcagattgaggcagaactgaataaacattggcggcgattgttagaggggctttcttactacaaacctcccagtccaagttcagctgaaaaagtgaaagctaataaagatgtagcttcaccattgaaggaactgggtttaagaatcagcaagtttttgggtcttgatgaagaacagagtgtgcagttactccagtgttacctgcaagaggactacaggggtactcgggactcagtaaagacagtactgcaagatgagaggcagagccaggccttaatcctgaagattgcagattattattatgaagaaagaacctgtattcttcgttgtgtcttacaccttctcacttacttccaagatgaaagacacccctatagggttgaatatgcagactgtgttgataaattggagaaggaactagtttcaaaatacagacagcagttcgaagagctttataaaactgaagcaccaacttgggagacacatggaaatctcatgacagagcgccaagtgtctcgctggtttgttcagtgccttcgggaacagtccatgctgctagaaattattttcctttattatgcatactttgagatggcacccagtgacttacttgtattaaccaagatgtttaaagagcaaggatttggtagtaggcagaccaataggcacctggtggatgagactatggatccttttgtagatcggattggctacttcagtgccctcatcctggtggagggcatggatatcgagtccttgcataagtgtgctttggatgacagaagagaactgcatcagtttgcgcaggatgggcttatttgtcaggatatggactgtttaatgttgacctttggggacattccacatcatgccccagtgcttttggcctgggctctcctccgtcacactctgaacccagaagagacaagcagtgtggtccggaagataggtggcacagccatccagctgaatgtgtttcagtacttgacccgattgctccagtcccttgccagtgggggaaatgattgcaccaccagcactgcatgcatgtgtgtctatggactgctctctttcgttctgacctcgttggagctgcacaccctgggcaatcagcaggatataattgatacagcatgtgaagtattggccgacccttctcttccggaactgttctggggaacagagccaacttctggccttgggatcattctggacagtgtgtgtggaatgtttccccaccttctctccccactcctgcaactgctccgagccctggtatcagggaagtccacagccaaaaaggtgtatagcttcttggataagatgtctttctacaatgaactttataaacacaagcctcatgatgtgatctcccatgaagatggaactctttggcggagacaaacacccaaactcctttatccccttgggggtcaaaccaaccttcgcatacctcaaggcactgtgggccaagtaatgttggatgatagggcatacctggtacgctgggaatactcctatagcagctggaccctctttacctgcgagattgaaatgttgcttcatgttgtttcaactgcagatgtgattcagcactgccagcgagtcaaacccatcattgatctcgtccataaggtcatcagtacagacctgtcgatagcagactgtctcctgcccatcacatctcgcatctacatgctgctgcagcggttaacgacagtgatctccccacctgtggatgtcattgcttcttgtgtcaactgcttaactgttttggctgcccgcaatccagcaaaggtctggactgatcttcgtcacacaggttttttaccatttgtggcccatcctgtctccagcctgagtcagatgattagtgcggaagggatgaatgctggagggtacggaaacctcttgatgaacagtgaacagcctcagggcgagtatggggttactattgcctttctgcgcttgatcaccacccttgtcaaggggcaacttggtagtacccagagccaaggacttgtaccctgtgtaatgtttgtgctgaaggagatgcttcccagctaccataagtggcgctacaactctcatggagtgagggaacagattggttgcctgatcttggagctgattcatgcgatactgaacctgtgccacgagacagacctgcacagcagtcatactcccagcctgcagtttctctgcatctgcagcctggcatacacagaagcaggacagacagttatcaatatcatgggcattggcgtggacaccattgacatggtgatggctgctcagcctcgaagtgatggggcagagggccaggggcagggccagctgctgatcaagacagtgaaactggcattctccgtcaccaacaatgttattcggctgaaacctccttctaatgtggtgtcccccctggaacaggctctctcacaacatggtgctcatggaaacaacctcattgctgttctagccaaatacatctaccacaaacatgaccctgctttgccacgtcttgccattcagctgctgaaacgtctggccacggtggccccaatgtcagtgtatgcttgtctgggcaatgatgcggctgccattcgtgatgccttcctgacccgattgcagagcaaaaattgagggacatgcgcatcaaaagtcatgattctaggagttcctcactgttgcaagtagagacccagccaggcctcatcgaactgtttctgaacctggaagttaaggatggcaagtgatggctcaaaggaattcagccttgggatgtggaagctgtctccatgcagtggctgggagctgattgattcccaacagcaagatcgatactggtgcccacccctgctgcatcgtgccgccattgcctttttgcatgctctgtggcaggatcggagggacagtgccatgctggtcctccgaaccaaacccaagttttgggaaaatttaaccagtccgctgtttggaaccctttctcctccctctgaaacatcagagcccagcatcctggaaacctgtgccctaatcatgaagataatttgcttggagatatactatgtagtaaaggggtcattagaccagccattaaaggatacactgaagaaattttccatcgagaaacgctttgcctactggtcagggtatgtcaagtcattggcagttcacgtggccgaaacagaaggcagcagctgcacctccttgttagagtaccagatgctggtgtccgcctggaggatgcttctcatcattgccaccactcatgcagatataatgcacctgactgactctgtggtgcgtcgccagctctttcttgacgtgcttgatggaaccaaagcattactcctagttccagcctcagtgaactgccttcgccttggctccatgaagtgcactctgctgcttatcctcctccggcagtggaagagagagttaggttctgtggatgaaatccttggacccttgacggagatcctggagggagtgctgcaggccgaccagcaactcatggagaagaccaaggccaaggtgttctcagcattcatcacagtgttgcaaatgaaggagatgaaagtaagtgacatcccccagtactcccagctggtgctgaatgtctgtgagaccctccaagaggaagtgattgcactcttcgaccagacccgccacagtctggcattaggcagtgccacagaggacaaggacagcatggagactgacgactgttctcggtcccggcacagggaccagcgtgatggggtgtgtgtcctgggcctgcacctggccaaggagctgtgtgaggtagacgaggatggtgactcctggctgcaggtaacccgcaggctccccatcctacccaccctcctcaccactctagaggtgagccttcgcatgaagcagaacctgcatttcactgaggccacattgcatctgctcctcaccctggctcgcactcagcagggagccacagcagtggctggagctggcatcacccagagcatttgtttgccccttctgagtgtgtaccagctgagcaccaacggcacagcacagacacctagtgcctctcggaagtccctggatgccccctcttggccaggagtctaccgcctgtccatgtccctgatggagcagctgctcaaaactctgcgctacaacttcctgcctgaggccctggacttcgtgggtgtccaccaggagcggaccttacagtgcctcaacgcagtgaggacagtgcagagtctggcctgcctggaggaggcggaccacaccgtgggttttattctgcagctctctaacttcatgaaggagtggcactttcacctgcctcagctcatgcgtgatatccaggtcaacctgggttacttgtgccaggcatgtacctctttcctgcacagtcgaaagatgctgcagcattacttacagaacaaaaatggggatggcctcccctcagctgtttgcccagcgagttccagaggccaccgtctgctgcttctgctgccccctcctcctccaagcagcccgctgctgacacagaggcatcagagcagcaggccttgcacacagtccagtatggccttctcaagatcctcagcaagacgctggcagccctgcgccacttcaccccagatgtctgccagattctgctggatcagtccctggaccttgctgaatacaacttcctgtttgccctgagctttaccactcccacctttgactccgaagtggccccctccttcgggacccttctggccacagtgaatgtggccctcaacatgcttggagagctggacaagaaaaaggagcccctcacccaggcagtggggctcagcacacaggcagaagggaccaggacgttaaagtccctcctgatgtttaccatggaaaactgcttctacctgctcatctctcaggcgatgcggtaccttagggacccggctgtgcacccccgggacaaacagcggatgaagcaggagctcagctctgagttgagcacgctgctgtccagcctctcgcgctacttccgccggggagcccccagctcccctgccactggtgtcctcccctcgccgcagggcaagtccacctctctctccaaagccagccctgagagtcaggagcctctgatccagttggtgcaggcgtttgtccggcatatgcaaagatagggcagtgctgttctgcccacctacccctctccaccagcctacactgcaccctggctggcaggggtgctgctggctgctagggcctatacaatggagggcacctcctgtcacccccctcccggagtagccacgactccagccaccacccactgacgttatttttatactagatgaagaggtcaacagcaggcatggggagccgagtcttctgtgctcaggtcctcacgctgcagacgccccctaaaggaactttccttcctttccagcattccccacatgcactgccggccaggggagaggcggcagcccagcagagggctctatgcacgggtttcaaacctgttttccacactctgtctttgcagttttggtaattctgtggtctatttatacagatattaaaatcttgtttatagacagcctgtgtgatgtttaacttcaaagcccagggatgacaacgtggctctcagaacctaggaaaactcccctgggccaggcgcctgggagtggggctgcagccttcgggggaagggcaggtactgatggatgggctagttcaccagcatctcctcattcctgtccttgggctgagggtttggctgggtgggcgctgtcagatattcccttccttgggcctgcgctggtcctgtccttgaccctgctttcattggcccact

SEQ ID NO: 65453 - DNA, 967 bp, Homo sapiens
cccagagcggatgtgaggggcgccgatggcggagggaacggcggaggctcctctagagaatggtggtggtggcgactcgggagccggagctttggaacgaggagtggcgcccattaagcgtcaatacctcaccaccaaggagcagtttcaccaattcctggaagccaaagggcaggagaagacttgccgggaaaccgaggtaggagaccctgctggcaatgagctggctgagcctgaggctaagcggatccgactggaggatggacagacggcggacgggcagacggaggaggcagcagagcccggggagcagctacagactcagaagagggcccggggacaaaacaagggccggccccatgtgaagcccacgaactacgacaagaacaggctgtgtccctccctaatccaggagtcggctgctaagtgtttcttcggtgatcgctgccgctttctgcacgacgtggggcgctacctggagaccaagccggccgacctgggcccccgctgcgtgctcttcgagaccttcggccggtgcccctacggcgtgacctgccgcttcgctggggcccacctgaggcccgagggacttcaccaactacggcctggagcactggggctcggacacgcaggggcgtggagaagacccggccgctttctgctcgagtggctgtccttcctgtgccggtacgtgcccgtggggctgctggagcggctcccacaagaggatcaacgagcggccgccctactacctgggccgcgactacctggagacgctgatggccagccagaaggcagccgactggatccgcatcagcgagatgctccttgggccagtgccccccagcttcgccttcttgccgaagcacaaggccaacgcgtacaagtagcctcaggctttcccaggggcaccctggggcgaggagagtacaataaattttattcttttaaaaaaaacctcgtgccg

SEQ ID NO: 65454 - DNA, 1018 bp, Homo sapiens
agtgctctgacatgtacacatgtctgagccagggcttgcttgtgggcaagatatccgaggcgggatgtgacgtccctcaacacccaagctcaggtcttcttctcaagcgtgttgtgtgcaaagcccaggagcagccgaaactctagcatcgaggccttcgctgtctgtcagggctatgaccctcccgagggcttcatcccggacctgagcaaacccctgctggaccattcttacgacccagatttcaaccagctggatggtcccacccgcatcattgtgccttttgtgacctgtggggacctgagctcctatgattcggaccgcagttacccactggacctagagggcggcttcagagtacaagtacactccacccacacagccccccatctcgccaaccatacccaggaggcctgcacgttgaagaggaaggggcagctggcccaaggagatccgcccccaggactgccccatcagcagagtggacacgtttccccagcccctggccgcccctcagtgccacaccctgctggcccctgaggtctggaaatgtgactctcagcctgccttgaccccttccccgtgtgcctttttctgacccaaatctcatggtttctggggccaaaattccctttcctgcctcccaatagctataaaaaattggtaaagccaagcataatgaatggaaaagtttcgccaaatatgtgagtcacttttctttttcttgggtagatggaagacaatgaaatgagttgttcaccttaacccattacggtaagtttgccttgttatctaagagtttgagtaagggcaacctttatgaaaaacctcagtaaaatttcacctttgaaatttttatgtcaactgataagattttaatcaacaaacccttttctaaacatctgttgttgtatgccaggaactgctttaagcattttacatttgaggcattcagtaaacatttattgagcacatactgtatgtcaggtgttgttctaggtttggagatagagcaggg

SEQ ID NO: 65455 - DNA, 1211 bp, Homo sapiens
ccatcgattcgaattcggcacgaggaagcatgtccctgcatttaggcaatgaagtgtttgatgtgtacaaagccccactgcagggcgaccacaatcatctttttataagacaaggtactggtctacagggacaagcagtctttaaaacgaaactcaccttcagacctcactctacggacagtgccacacatagaaagatgactctgtcacttgcagataggtgttcaaagacacagaagattagaatcttgccaatggctggtcgtgatcctgaatgccaacgcacagaaatgattaagaaagaagaagaacgtttgagggcttccatacgtagggaatctcagcagcgccgaatgagagagaaacagcaccagcgggggctgagcgccagttacctggaacctgatcgatacgatgaggaggaggaaggcgaggagtccatcagcttggctgccattaaaaaccgatataaagggggcattcgagaggaacgagccagaatctattcatcagacagtgatgagggatcagaagaagataaagctcaaagattactcaaagcaaagaaacttaccagtgatgaggtaagaccaaatttattcaattctaggggtttatcctgtactcaggagccaactgctttgaatgaagagctcacagatcaggcaggcacaaattagttgtctacacacgtcactgaaatccagtgagataaatgcagtaacaagacagagtgatccagaggaggatctgatacctgtgcttagagaggtcttagaaggctgcatggaggataagacttcttgctgggtgttgaagagtgatcagaagcttgctggtcaaactgtcctgtctctggtaggtcactccggatagatggaaaggcctataatactttgcatatggagtctgcaaaaatcgtgaccatctttatgttccccatgtcacactggtccactgcattgatgacattatgctgatggtatctgatctgatgagtaggaaataactccttgctttgacttccaattttttccagatgaagagactcattgttagttctctaattgtcccttctggcatctgcatctctctctggaaactgagatttcatattccttctcttctcctctctctgactgcaatcggggatattctttgtaaaagactgacgttgccacctgcctctcctcacttccactgcactccca

SEQ ID NO: 65456 - DNA, 3029 bp, Homo sapiens
ttttttttttttaggcgccgtagctgcgtccccagaaccgggagacttaaggcatctttattgcgggatcctcacacggcctcctgggcccggcgatactcatagacgctgccgtgctcgggaaaggccagtgcttgcgggggcgaccccggcggtggggcggggtcctccgggtccccatagccaccgccgccgggcgtgtggagacagaacacatccccggggtacacggtcaccgacgtcttgccgcccagattcaccgtccggccgtttttgcggatcagcaggtttaggccgcgggcgccaggctcgcccccgtggagcccgtatggccggaaggcgcggcgctcggtcagcactgacagcagcgcctcctcacgaaaaagcagctcgcgggtgacgccgtcgccgcctcggaagcggcctctgccccccgagccccgccgcagctcgaagcggcgcaggatgaccgggtaccggctctccaggatctcagggtcggtgatgcgtgtgttggtcatgtggctgtgcacaccgctgcgcccgtgccagctgggacccgcgcccgcgccgcccgccaccgtctcgtagtagcccatgtgggcgttgcccagggtcacgttgttcatgcagccctgggaggcggcgcaggccccaaaggcccccaggatgacatccaccacgcgctgcgacgtgagcacgttgccgcccaccaccgccgcctcgggcgacgggtccaggatggagcctcggggaatgaccacgcgcactggcgccaggcagccctggttgagtgggatgtcgcggcccaccagacagcgcaggcagtagatgagggcggacagggttacggcccgcggtgcgttgagattaccaaacacctccggcccagtgccgctgaagtcaaacacagcgctgccctgactcaggctgatctgcacacggaggcggatgggggaaccgtcgtccatgtggtcttccgaggacacctccaggggcaggccccgggcctgccgggaggttccaaaggcacgcaacatgtctcgcacggccagctcagcgtttgcctgaatatggcccatgtaggcctgcaccacgtccaggccgtactggcccaagaagctcccccaccagctggatgcccttctggttggctgccacctgggcacggaggtccgacaggttgtcgtgcaggtttctggttccgctgcagttggggaccttgcctggcgcccgcagggcctccgtcaccgcctcctcctggaagacgcccccctggacaagtttgaaggacagaaagacggcaccctcctgttgcagcatggtggagtgggggggcatggagccctgtgtgatgcccccgatgtctgcgtggtgccctcggctggccacatagaacacaggccgcgtctgacccggccaaaacaccggtgtgataacagtcaggtctggcaggtggctgcccccggcactgggatggttgctcagtagcacgtcgccagggtggagatcggcccccaggtgctgaatctggaactgcaccgtctcctgcatggcacccaggtgcacagggatgtggggggcattggacaccagccccccatcgggcccaaagagggcacaggagaagtccagacgctccttgatgttggtggagatggctgtgcgctgcaggatgcggcccatctgctcagcaatgctcatgaagcggtgtgagaagatggacagctggatagggtccagctgggggcccactgtgccggggacttcggcccccacggagatgcagatgtcccctgtcttggtcacctctgcctggcaacctggctccaccaggatggtgctgttactgtcgatgatgaggcagggcccatggagcttgtgcccatagcccagctctgccagcaggtacacaggggtctcctggtagcccccctcaaagtagcactgggtcatcttgtccacccggggaggcccggtctgggctttgggggcatcctcgaggcgaagaccactgcggccggtgccccgcactcgcacatcgtccacgaccaccggccgctcaggtatgacaaagccaaactccctcatgtaccgctccacaaaggctgggggcaggacaggcgggagagcagaggtggacgtacctgcgtgagtgcacggatgggccggcacatggcctcgttggccacgcgcacgaaccccatggccacctcctccaggctcagcggggaggccgggcagggcccgttggtcaggaagctgttgacctcagtggccacagcctccagggctttgcgggaggcctcaggggaaagtggttggttctctcccggcccaaaaatgcaggggaaggaggcaggcagcaggcgacccaggaccagattagcatccgtcactgtcacagggccccctgggaggtggacagggtgtggggcttgggggctggaggcaggggagcaggagtaggcagcagggatagggctgacaggaggggctgggcctgcggcggcaagcggagggcaaggccaggccggccagatcctgactcttacctttgcggtagcaggcgggtcctgggtgggctcctgctgactcgggcccaaccacaaagaggccagacctgaagaagaggcgggaaccccctcccgctgccacggtgttgatgtccagctgcggggcctggagggtgacgccagctgtgctggcctcgaagacgtgctcgaattccccagcatagcgggctcacatccgtggacgtgcctcccatgtcaaagccgatgacaggctggccaccctcctgctggtaggtggtggctgagtagcccaccacgccgccggccgggcccgagagcacagcactggagccgctgaaggtgtccatgggcgccaggccgccatcggagcgcatgaacaacacctgcacatccttgagttggccctggaagccacggcagaagccctgcacgtagcgctggatggcgggcgtgaggtaggcgtcggcacaggccgtgtgcccccgagggacc

SEQ ID NO: 65457 - DNA, 2007 bp, Homo sapiens
agggggcctcttcggtgttggtgagacagcagccaagatcttaaaaagcaacatcgatgtgttatttgcagacgtagctgggtgcgaagaatcaaattggaaattatggaatttgtgaatttcctgaagaatcccaagcagtatcaggacttaggagcaaaaattccaaagggagccatgctcactggtcctcctggtaccggcaagacccttcttgccaaagcaactgcaggggaggccactgtgcccttcatcactgtgaacgggtctgagttcctggaaatgtttattggcgttgggccagcaaggggttcaactctgccaccaacgtcgtggtgttggctggcaccaaccgccctgacgtcctggacccggccctcatgcggcctggccggtttcatcgccagatttacactggtcccccttacattaaaggcaggtcctccatctttaaggtccacctgcgcccactgaagctggacaagagcctcaataaggacaccctggcgaggaagctggcagtgctcaccccaggcttccctgatgtctgtttacataccaaagttaaaaagctggaatgttaccaagactgctttcttctgcccatagacggggatgactcagcactacccctcaacagagatgactttgatgactctgcccctcagcagggcttactaagcactaccccttaacagggatgactccgcactgcccctcaacagggatgactcagcagggatgactcagcactgcccctcaacagggatgactcagcagggatgactcagcactgtcccttagcagtgatgacacagcaaggatgactcagcactgcccctcagcaaggatgactcagcactgccgctcaacagacatgactcagggatggcttagtactgcccctcagcagggatgactcagcaccgcccctcaacagggatgactcagcactgcccctcaacagggatgactcagcagggatgactcagcactgtcccttagcagcgatgacacagcaaggatgactcagcactgcccctcaccaaggatgactcagcactgccgctcaacagacatgactcagggatggcttagtactgcccctcagcagggatgactcagcagggatgactcagcaccacccctcaacagggatgactcagcagggatgactcagcactgcccctcaacagggatgactgcagggatgactcagcactgcccctcagcagggatgactcagcactgcccctcagcagggatgactcagcagggatgactcagcaccgcccctcaacaggcatgactctgcagagatgactcagcactgcccctcagcagggatggctcagcagggatgactcagcattgcccctcaacagggatgactcagcagactcagcagggatgactcagcactgcccctcaacagacatgactcagcagggatgactcagcaccacccctcagcaaggatgactcagcagggatgattcagcagagataactcggggatgactctgattgtccttcagcagggatgagtctgttttgctccgatggaagcatctgtagtgtccatcagcaggtgaatggccaaagtggtatatactgtagtcacattcagctataaaaaggaataaagtatcgatgcatgccacaacatgggtgaacctagaaaatactgatctaaatgcaagaagccaggcacaaaaggccacatagtatatgttcccatttatgtgaaatgtgcagaataataataaaaatgtatagaatagcaaatctgtagggacagacatgaggtgagtggttgccagaagtggaaatgggagttaactataaattgcacagggtaccttacagagatgatggaaatgtcctaaaactagattatggcaatagttgcactacgtgatcagtttattaaaaatcgttgatgtgtgtgtgtaaaatgggtggattttatggtttataaattataccttaataaaggttaacaaa

SEQ ID NO: 65458 - DNA, 1085 bp, Homo sapiens
ccagcttgttttttggatcgagcactccagataacaaagttgctgaacaagaagacttagaaacacagccaagtccatccgtagaaaaagcagtgactgtgatagatcctgaaggtacaattcccaccaattttaatgtagctgagaaaccagctgatcattcattatcagaggtaaaacttaaaactgctgatgaacccagaggtactttagtaaaatctggtgacggtcaaaacgttaaagaaaaatccatgattttatcaaatgtagaagatttacaacagccaaaattcatttctgaggtgtctagggaagattatggaaaaaaagaaatctcaggcgattcagaggaaatgaacataaactcagtagttacttctgctgatggtgagaaccttgaaattcaatcttattcactaatcggtgagaaattggttatggaagaagccaaaactattgttcctcctcatgttactgatagtaaaagagtccagaagccagcaatcgctcctccatctaaatggaatatttctatttttaaggaagagccaagaagtgatcaaaaacaaaaatcactcctttcatttgatgtagtagataaggtgccacaacagccaaaatcagcttcctccaactttgcaagtaaaaatatcacaaaggaatcagagaaaccagagtcaattattttgccagtagaagaatcaaaaggcagtttaattgatttcagtgaagacagactcaagaaagaaatgcaaaatcctacttccttgaaaatttctgaagaggaaacaaaactcaggtctgttagtccaactgagaagaaagataatttggaaaacagattcatataccttgggcagaaaagaaggtgctggcagaaaaacaaaactctgtgggccccattagagcttagagatagtaatgaaatagggaagacacaaattacacttggatctagatctactgaactgaaagaatcaaaagccgatgctatgccacaacacttctatcaaaatgaagactacaatgaaagacccaaaatcattgttggttctgaaaaggagaaagatgaaaaaaaaaaaaaa

SEQ ID NO: 65459 - DNA, 2611 bp, Homo sapiens
  misc_feature (1)...(2611): n = a,t,c or g
tctcactgggagaaatatcaagttaggggtgtggagtgttattaggaagaaataatcattatgggctaaaagttaagtgattagaaattatatatatttgcttttaaaatttctatttcaagggcttcttatgcaaattatgagcctttctagacagtatttctggtctcctggtttgagtgtgaaattatagccatcacctgacatgcattaattctggattccttttgtgtgtggtcagcaataccaggacgtgcccgatgccggaggaaaagagcaaccccaagggcgtggagtggctgtggcattccattgttataaggatgtatctgtccttgatcgccaaaagtgtccgcaactacacacaagaagcatccttaggagctctgcagaacctcacggccggaagtggaccaatgccgacatcagtggctcagacagttgtccagaaggaaagtggcctgcagcacacccgaaagatgctgcatgttggtgacccaagtgtgaaaaagacagccatctcgctgctgaggaatctgtcccggaatctttctctgcagaatgaaattgccaaagaaactctccctgatttggtttccatcattcctgacacagtcccgagtactgaccttctcattgaaactacagcctctgcctgttacacattgaacaacataatccaaaacagttaccagaatgcacgcgaccttctaaacaccgggggcatccagaaaattatggccattagtgcaggcgatgcctatgcctccaacaaagcaagtaaagctgcttccgtccttctgtattctctgtgggcacacacggaactgcatcatgcctacaagaaggctcagtttaagaagacagattttgtcaacagccggactgccaaagcctaccactcccttaaagactgaggaaaatgacaaagtattctcggctgcaaaaatccccaaaggaaaacacctatttttctactacccagcccaagaaacctcaaaagcatgccttgtttctatccttctctatttccgtggtcccctgaatccagaaaacaaatagaacataattttatgagtcttccagaagacctttgcaagtttgccaccagtagataccggccacaggctcgacaaatagtggtctttgttattagggcttatggtacatggcttcctggaatcaaaatgtgaattcatgtggaagggacattaatccaataaataaggaaagaagctgttgcattactgggattttaaaagtttgatttacatttatattccttttctggttcccatgttttgtcactcatgtgcacattgcttcgccattgggcctccagtgtattgttctgcagtgttgaaacagaatggaaatgacaagaaatatctgcagttatccagggagaaagtataatgggcaaaattattggtttctttctttactttgtgcttgtttttatccccttggggntgtttttctctggatttttaaataaacttacacttaagaaatttagattaccagagtatgcctgactgtaagaaaaagaaattgagaggaagtgatcatagcaaattaaagaagtcttttcctcccagaacttaaagtaaaataaaaaataaataaataaataaaatcttttccacagagaaaggcaactgtgatgataaaatttaacgttcccccaaacactgagtcaatgagatttttctcaggagatactttacctataacaacgccgttaaatccaaatctcttctaaacgatggcattctatgtaatgcctttcctggacttttttggccactgccctggactagtgaaagaatggactctatctttatctgcaagaggaactaaggccttctatcagactgcctggccagcctggggcactgaaaatacggctcatgttaatgagttacattatcagccagcccagccttgcccaccatttaagaaatatcacagagccactagatctcatatgatcttcttcaagccattattttaactcaagaaaactctagagaagaaaagtgaagaagtcatgttgaagaagatgtaagaatgtgtcaagaccatccagaaatgatatgagaaatactgatattttaaatggttgacatcatccagcgaaatgaatctacattaaatgttgttttaactgcgctatggattaaaaccattcatataggagttaggtctttaccaactactattctgttatttttttttttaatctggacaacatttgtccctaggtaggttagggcaaaaaaattctttcaactccttttggcgaagaaaactgtaacagaaaataaattttgaatgtgtacttaagtctttattatatttgaaacaatttttttttcaattttaaaagctgaatgaagacaacttaggttgcctaacctagttcaaaatgaaattatttagataccaatttttaaaatactggagagaatttatatgtctttttccagagttctgatgataagcatttggagtgcatttattcctccagataataaatgtgtgttcagaactttttgtgttttttaaggcattaataaagccttcgataatattaaatacaaaaaaa

SEQ ID NO: 65460 - DNA, 5891 bp, Homo sapiens
  misc_feature (1)...(5891): n = a,t,c or g
gtgaatactgctatgcatgaggcaaaacttatggaagaatgtgacgagttggtagagatcatccagcagaggaagcaaatgatcgctgtcaaaatcaaagagacaaaggttatgaaactgagaaagttggcacagcaggttgctaattgccgccagtgtcttgaacggtcaacagtcctcatcaaccaagctgagcatatcctgaaagaaaatgaccaggcacggtttctacagtctgcaaaaaatattgctgagagggtcgctatggcaactgcatcttctcaagttctgattccagacatcaattttaatgatgcctttgaaaactttgctttagatttttccagagaaaagaaactgctagaggggttagattatttaacagccccaaacccaccatctatccgagaagaactctgtactgcctcccatgacaccattacagtccactggatctcggatgatgagttcagcatcagctcctatgagcttcagtacaccatattcactggccaggctaacttcatcagcctgtataattcagtagacagctggatgattgttcccaacattaaacagaaccattacacagtgcatggactccagagcgggactcgctacatcttcatcgttaaagccataaaccaagccggcagccggaacagtgaacctacccgactaaaaacaaacagccaaccctttaaattggatcccaaaatgactcacaagaagttgaagatctccaatgatggattgcagatggagaaggatgaaagctctctaaagaagagccacaccccagagaggtttagtggcacagggtgctatggggcagcaggaaatatattcattgacagtggctgccactattgggaggtggtcatgggttcctcaacatggtatgcaattggcattgcctacaaatcagctccaaagaatgaatggattggcaagaatgcctcctcatgggtcttctctcgctgcaatagtaacttcgtggtgagacacaacaacaaggaaatgctggtggatgtgcccccacacctgaagcgtctgggtgtcctcctggattatgacaaccanatatgctgtctttctatgacccagctaactctctccaatcttcatacttttgatgtgaccttcaattcttccagtttgtccaacatttacaatctggaacaaatccctaatgatcctgtctggcttgcctgccccagattttattgattaccctgagcggcaggaatgcaactgcaggcctcaagaatccccttatgtttctgggatgaaaacctgtcattaagtttcaggagagtatataattcactggctctctagttcagcagttcttcccctcctacacctaagttagcgttcaatatacgagacacaaaataaagtttgtttgaagcatccaaaataactagatattgcagatttaatttttgtgcattaaagcttgtatttgaattaatttattgagtttttcagaacaaattatctgagtagtctgcgttcaagccattggagaaaaatttagaaaatgcctctgttgtcattggagaattaaaaattcccaatgatttaagaatataaattatattggaagcaattagggtaattctagttaaataatgtggaaaggtgccctgaataaggagctagcaagccagagcggggggtggtcagcctttctagtactggccagtttggccatgtagaattttgaacagtgtcaaattatcacatattatattttacttttgatgaaaacctatcatcaagggtttgttaggaaaccatgaatgtgtatatgtaatatataaagtgaacatatatgtactttatatatattcacttgtgtatgtatgtttatgcatattcactttatatattacatatacacaaaaaacttttttttccaaacaccacctcgaactagaacaaaaaactttttaatttgctaatttgagtgagaaatatactggaagggaaaataagttacaccatccatttttgtcccctaaaggaaacatcaaaatcaatcaacatttatttcctccctctatccatcattgccttcctccctcctgtcacgcacacatacacatgcaaccatgacacagataatgggaagagctttattggattagcagagatttacagacaagattgcacaagagatgctgttgctggatagaaaattgatcaggtagaagtgatgctacctacttgaggatggccatctgaattgttaaaaattctgtcatagactattaaaaaaaaagttttactactcccaagtacacacagttatgagaattaggcttttaaaaagttgcacagtgaaggctctttaggaacctactttacttaatcagtaaaaattgagtattattgatgcaccaactattcccatataaatgtacttgctttttcagataaaacacttctgaagtgctcaagaatgtctgaaaacagtttgttttcttaaataggataaataatcattccttttgcaatcttgtttacagtattcattctcttagccaatccctccacgcaaatggagacaaacttcatcccagtcctaaccagtatagttgaagggaatggagccttgtagtctatgatttttttttttaaatttccatcgaagggattggggatgtcagagagccagagctttcccctttccaggagctaagttggcttcggaagtcttctgggatttgtgaaaatattactgttgtaaaattacaaagtggtagccataacaactccctcagattggagacttgaaatgtcaaaactcccctcttcctttcccctagtttggtggatgctcatttattaattcattcaataaactattagatgccaggtaccaaactactgccatgggagtgcacatattaacaaaatgctctacctgctgccaaatggcttactattctgtggaagaaacaaagtatataatcctccccaataacagttatgtattgtttgttcacttaatgtggaaggcaagactgatgcagacacacaaggaaggctcaaaaatataaatctagcagcaatgtcatcttttttgattttaaataccatatgtgcttactgctaatcaggaaatgaacaacctcagtaaaattcatcagtgctggtaaatagtttgctgtagtggaaagctcataacctttggattcaaatgatcctagtttctgtaccatttattagcgttgtgacctaggacaagtacctcacttctctgagcctgtttcctcctctgtaaaataatgtctacttcacaaggctgtttcaaaggttaaaaaagatagcatatgtaaactgtcttagctcagcgcttgacatttcctaagtgtgccataaatattaatctctttccttactcccagctccaatacagcgtaacagtgctttaaaatgtatgtccttcatttctccttcatttctcagtcacctttgtctcttccctagggcatatccccaaattcttaaacaaaaaaaaatgatttttttccccttcatcaaacttttcactggctcccttagcacccagtagaaggtcccaactccttacagagtctgggttttcatgtccctgtttgcttacacagcttaatcttttgccactttccccctcacattgattaaggtagccaagtttaactatttacacaactattcacacaagttattctctgggcctgcagcagaaacatgattaacaattttaatgcccagagtaaacaacagaaatttttcttaaattaaaggaatagtgtgaaaatgctgtaagtacagaaaatgcaacctccattccagtagaacaatttcctttgccttgtccttggctctccaaaactgttcatttattgtggtgtcttttagattttagtgccctgggacaaagatctaatttccccaccctacttttgactctatcctggactacctttcctcacctctatctctctcaaccagactaactctttattccttagacttgatgatgcatccctctttagagatccaaagacaccccaagcatccccctctctcagcaataatcacattgtatagcagtgtttttcaaagtgtggtcctcacaccgcctgtgttagaatcacctttagtgtttgttaaaagaattgattttgggttcccactcctgacctaaccagaatatctgagaacataggcaggaatttacatttttgacaagctcctcatgattctgatgcaccaaaaattttaatgaataatcatcttcccctactagactgaacaccttgagaggaaggactgtgtcttttattgttgttatattgttaatacctggcacagtgcttggaacattagcttggctaatgtttattgaatgaatgtatgaatgaaaaaatgcattatgaaagtttcctcttgtactctcatgttcgtagtgatgtttgttacttcctgggcagaaaagcttggttactactccatttgagctgtattaattctattttgcagagatatcaaggctcctacataataaatgatcattgtcctcctcaaaaactctttggcagttatcttggggaaatgtctttgggagcatatgggcaccattgttttcagtaacatttcagtcttgtcaaactttgttgtttgaaggtgggattacatttcggttataggccaaaaatcactcaaaggctaaggcctacttaaaaaagtggggaattaaactgggtttggattaagcaatgaagtttgactctgaagtcccaaattctgagtcaaacagtgaaaaatgacttctaagatacaacatggtgacaaagtacttagtgggggtgcgatgggccccagatatttacttcagttaacttggcttttatagaatcctggcaatgccatggaccttaagagaagtaattggctacctctagctaaacccagctggacaaagagaataggacttgtatttaacattttcaaagaaggtgactgcataagcttttgttgttgttgctctactcaacctgttctccacaactgtttctaccagaagattattttatgtctgcaatttatgcttgtttccactttttatattgtcttattgaagaaagcacaaaaataatcaaaaataaagtaaaacctgttttgagagtatgaaagaaattttaatgccacattgaggttctggctacttgtaagtaagagtaactgcatctggatgtgtttttattatacaattctatgtgtatctttagatgcagtgaaattcagattgcagcaaaatcacttatctgttcttttcggctaaaacactctaggtgaattttctaaacttccatggtttacatatttatatatgactaccaagatggagcaatccacggatggacttttgaataaactcaaatatttgatactgctttcctccaaggaatgggagagtgtcaggccaggtaggtaaagaaaccactccctaaacttaattcctagctccctgaagccaactgccagccttggagccaaatggtcgtatttggctgtgtgttacaggttggccaaacgtgattgcccatcaggtcagacaaaagctgccttttatgggtgtagtctgccagcttcagacatatgctgtattgttgttattggctagactatttattagactattgttggactattttttatcaaatgctttaccccacgcctgtttgtattgggagctctggacccaatagtgtctctcctagtgacagaaatatgagcatctgtggattacacagcctcatccctctctacaatattccagcccatccaaaatgctatattatgaattaaataaatatatatgtattcatgaa

SEQ ID NO: 65461 - DNA, 2174 bp, Homo sapiens
ttttttttttttaagattttcctctttactctcgtccttacatgtccacagacttcatgtagagaggctgagcctttcgaccacaaagtgtgttctgtgttgaagatgttataatgatgggagagggcagttgcagcagcttctaaccaagtgtctacaacacatgtactactgtttcctacctgtgtcacctctgcaaaaaatggagctctgagcccagttctgtgagcatggtgtcagagccctccaaagtcctgagaaatcaataccagggatccaaatctcagacaccagtttgaagcaatacctggataccaagactcagagtgaggatatggattttgggagctgacagttttgctgatcctgccacactggcaggggctgaagtccagaaatggtgtgtagctctagtcattcttattcaccacagctcttatttcacagttttttcccttggtttcttctgtttcttctgttcctcatattcaagtattttctgttggaaatagcctgcaggaggattcttgctcttctcggcttcctggatgaaaagtgagaagagctgtgtcttcacaaacttcttcacaaatcggcggttggtcttggaggtcagagccttacagaaggatctttcttggaagtggccttgcccatttgcctcccgcttgatataggaagcataatggcccacaatcttgacaaagaactgcacaaaggggcctgaaacatgctcgttgatttgttctgcagtctttaactcattgatcccctgaccaagagagtctaagatgtcatcctgaagcttcggtggcaggatgtctttttcatcaccaaccgacattaagaaggttccttcacaaagattgaccagcaggacctcttccatagggctgtccatgacctcctgctggaagcgcatttgtactccaaccatgaagggggtggggcagcagacggtggccagaaggctctcagggacaacagggatgtaggtgtgcgcccagctgaaggggtagagcagtgcggcagcagcatggatgcactgagacaaggtgctgagaccttccgccaggaagatgatttttctctccagcacggcagaggcaaagatctgaagtatctgttcaaaactgagacagtgcaatagagaactaaaatccacatgttctaggtgggagtccaggggccgtgtcagtgaaatgaactcagtgcctgagtcggggatgaagctcttgagagtgacagtcttcccaggagcagggaaggctgcctctcggaggccctgcatgaacgggtagatgacagccatggagatctgatgtctcttctccacttcatccaggatcttggagaacaagccgaagcagccgatgcagctgatgatgcagtacactttgggaaggcgagggccagggccggcaggcaagaggcgcctgcagtatccaatctttctgctcccatccacattggtcagaacgaaggagaaggtctccctgggatactcggtgagtgatgcccactcattcccatctgggaagcagaacaaggggatagctttgagcagccgctcctcctcctcctgctgaccccgaagcaggttctcccgcttgggaaattggtaggtgattataggctcgtaatcatcctctgaacgcttctttttgagagaaaccacaagaaggtattcaaagaagtgctgccccccagcaaagttgggcaaagagtgctcctgggccctttctggttcctttaaagcttcccctgaattgtcctggggtggtcctgaaatcaagccagagcccatttagtataatctcattgatccattcctggagtggagtctgtgagaatccgggtgacctccacacctcaaggccgccttgccaatgctgagatacctggatactggccagaaccaccagtcactcaggatcagggccaaatgggcagtttccacacctgccctggtagacttgaaaccatggggagccaagcagaggaaagaaaccactgacacagaagccacggaaatgtgctggagaggccacatggaggccaaggccccagggtaccaccgagactgcctaacctgtcgggtgcttctggcagtcctggaacaatacggcctgagagtttagttcatactaagtgaataagaacaggctcaaagg

SEQ ID NO: 65462 - DNA, 1435 bp, Homo sapiens
ttttttttttctggttgcacatgtttgttttctttattgaaagacaatacagaaatgatgaaacaatacctcaagggtcttgaacatggatcaaatgacagaagtctttaatgcaatggcacagaagcttctggcatcagcacctgcaagccctgttcagtcatcattcatgatcgccaaatactccttctggtgttcaaccagcttcaggaatacttggtatttcttatcatagtattttttattctggtagtctcgggaacacaactttcccaactttgctcatttttgccattgcttcctgttacagaagcgaaatcccctgaggcacaggcacccagaacagcagcaccacacaagaacggactcccacctcttgcgacagggaccacaggcatgccagtaatgtccgcatgcatttgcacaaaaagggggattcttggctgaggcctccacataggaaaagagtacttgattgagtggccctgctgcctccatggcttctataatgaagcgagtccccaaagcaatggcttgaactgttgccaggtagagaatggcaagatcatcaaggtcctgagacagtttcaatccggtgaccatgccctttagtgtcagatctgctaagggagaccggttgccatggaaatctggccaaacatgtaaatcaacagtaaggaaacccacaggctgagccttcttaatcagatccaggtgactgttcaaatatgcatatatactctggcatctggctgtggcctttacttgtagttctggaaaagcagcatggccttgtaccatgtggtctatcaattttccagtaacgctctgaccaccttcattcagccagaacccaggtaccatggctgagaaataaggcccccagacgcctggtacaaaaatcgggtctttgctgatccccatgtgacaagaagacgttccacagatgacagccagccgtgacgtcactggctgcccctcacagatgaggccgtgccctctcacatctgccccaatcactcctagtcctcctgcatgggcatcaatgagtgaagctgcgaccgcaatcccagggagaaggccaaggtctcttgctgcctctggtgtgagcccatttccaagagaagctccaggaggtagcacttggtttcctattttgctgtaattatctgcaacaaagtcttccaaaccaatcattttccagaaactgtcgtcccagcctttctctgctgaatatgtccacttacacaccagggagcagagagaccttgtttataattcagattttttaaaatgtgattcagttttctttcaaaaatgtttatgttgctgaggctggtctccatctgctggcctcaagcaatcatcctgccttagttttgtgagtagctgggattacaggtgtgaggtgagtcgcagtgcctccgccatctcg

SEQ ID NO: 65463 - DNA, 1568 bp, Homo sapiens
tttttttttacaagaaaaattgttagttttattggtattacagtgtacttttaatacaagctaaatacaaacacaattcttacatattcagccacttattctgcaaaacaacatgccaagatcaacccttgaaaagtttataaaaaacccaaaaccccagaaaatatccttccctcaactctaaggactcccatatacaaatgcaaaaattgcctatttgtcaataatcacattaaggtgttgaggttattgactgaggcaggtaaaaaaccaatttctgatttttaaattaaattagctccagataaaagcatgttattttccacatacgctatctttgtattctgcacagagttccaaggcaaagattgctcctggctttatgaattaccagagatgatgacttgtgtggctgacttatcacaggtcttttactcttccttcctgatagatccttagcttctttgggaggtggcatatgaattggtttccacggaattggattataaaaggctggttctggataggaatttccactgtaaaaacctgtaagttttccattggcataaccatagctctttgcagctggacgaggtttatgtttcgcattttccaaccattcttgaaactttttttctgctatttcctttttctcctgtatttcagcttgctgttgtttttctttttccttttctttcttcttcctctcacattcttcagcattttttttctttaaccattcttgatatttttcttttgctttttcttgcaagtattctttctccagttcctttgctgctttttcctccatttctttattaattttttgttctctttcttttcttttttgctcattctttttctgaacccattccttgtgcttttcttcagcaattatctttcttttttcacgttcttccatttcttttcttttttctagttgttgatttaattcctctagagctttcagttgcagccggtcacgttcttctttttctttgccaataaaccacacctcccatggtgtcaggcggctttctggtaagcgcacctgtttctgttcttcttggttattttctgattcaacctgagtgctggcgcacccctgtaactccattcctctcaggctcgccactttggcctctgaatcatgggcatcttcatccacgtcttcctcatcatccacgtcttcctcatcctccccgtcaccgtcgtcctcgtcaaactggaagctctggtggccaaggggagacaacagcgacctggtggaattgctgcagctcagcggcagcggcggcgacggcgagcgcaccacctccagcccctgcccacgtgcgcccgtcatagggactgagcaggagtccgaggagggccgagacctgggtctgcagtcagcagagaaaccggcgtaggaagagggaaaagtaggcccccagcgccccgccggccacatctggccccgccaagttcaaactggcggaacccgcggcggggacgcgcttttccaagcgggccctgggcgccgccaggccggccaatcccgggcagcacagaccccgcgttgccat

SEQ ID NO: 65464 - DNA, 6646 bp, Homo sapiens
gcccggaaaaagatgttcaatacagtcatccagtctgtgcctcagcccacaattacggttctaaataccccactcgtcgccagtgctggcaatgtccagcatctcatccaggccgctcttccaggtcacgttgtggggcagccagagggtacaggagggggacttctggtcactcagccattgatggccaatgggttgcaagcaacaagttcccctctccccctcacggtgacatccgtccccaagcagccaggtgtggcacccattaacactgtgtgttcaaatacaacgtcagctgtgaaggtggtcaatgcggcccagtcgctcctcacggcctgccccagcataacctcccaagccttccttgatgctagcatctacaaaaataagaaatctcatgaacagctgtcagctctgaaagggagcttctgtcggaaccagttcccagggcagagcgaagttgaacatctcacaaaagtgacgggcctcagtaccagagaggtgcggaaatggttcagtgatcgtagataccactgccggaacttgaagggctccagagcgatgatacctggagatcacaggtccatcatcattgactctgtgccagaggtgtccttctccccatcgtccaaggtccctgaggtaacctgcattccgacaacagccacactagcaacccacccttctgccaaacgacaatcttggcaccagactcctgacttcacaccaaccaaatacaaggagagagcccctgagcagctcagagccctggagagcagttttgcacaaaaccctcttcctcttgatgaggaactggaccgcctgagaagtgaaaccaaaatgacccgacgagaaattgatagctggttttcagagagacggaaaaaagtgaatgctgaggagaccaagaaggctgaggagaatgcctctcaggaggaagaggaggctgctgaggatgagggtggagaagaggatttggccagtgagctaagggtctctggtgaaaatggctctctggaaatgcccagcagccatatcttggcagagcgcaaagtcagccccattaaaatcaacctgaagaacctgagggtcactgaagccaatggcaggaacgagattccagggctgggtgcctgtgaccctgaggatgatgagtcaaacaaactggcagagcagctcccaggcaaagtgagctgcaaaaagactgcccagcagcggcacttgctgcggcagctctttgtccagacacagtggccaagcaaccaggactatgactccatcatggcccagacgggtctgccacggccagaggtggtgcgctggtttggagatagcaggtacgcactgaagaacggccaactcaaatggtacgaagactataagcgaggcaacttcccaccagggctactggtcattgcccctggcaaccgggagctcctgcaggactattacatgacacacaagatgctgtatgaagaggacctgcagaacctctgtgacaagacccagatgagctcccagcaggtcaagcagtggtttgctgagaaaatgggggaggagaccagagccgtggcagacacaggcagtgaggaccagggccctggtactggtgagctcacagcagttcacaaagggatgggtgacacctattcagaggtgtctgagaacagtgagtcgtgggagccccgtgtccctgaggccagctcagagccctttgaccacatcgagtccccaggctggacgtcagctcgaaacagactgaatttgatctgattaatgtgaaggactggccagtctgggaaaccgcctgccacgtggaagagccaaacccgactctctgctgccacatgccgttcccatgcccggctgctgggcacctgggagagcttccagaatcctcgcagacagcccagagcctgccgctaccctcggcctgcccaccaccaagcaagcagcaagcaagatggggttctcatcagttcttcctcccacaatgtaggacctttcctttaccttccaatggataaaatagttcagagttcatagtcatattcatagacacagaatcaagcttttaacatatacatccacctctatatgttaaataaaacatcagattatcaacactgtcattacgtagaaactttggttagccaagcagtgcattgtcagttacgtcatctctaaaaatgacctgtgtctgttctctggggattgctgggtcacaggtgcccctcaccttccacagtcaggcagggaagttataggcacaaagctacgtctggaacccctttgtgccccctttgtgttcctcaaggaagcagtacctttgaagagatctctgctgcattaagtgatgaccggctacgtttcatgtcaggcttgctttgccttgtgggctactcagtgcagaacctgctgtaaccctcagttcaaaaaatggactggcaatgtgattagcgttggatgctttaccattctctttagttgttaccgtaattctgctttttcatgggagtttgaatcatggaccataacttttcagttatcagatcaactaaagaaacatttgttgttaagcctaatgtgctgacctatgtgcctgcattttttttttaatctagacatgtttggagtgagagaaagatggaaaaaagacatggggtagggacgtaagtggaaatctatagccacagcctgaagctttgaccactgcggttttcagagccctttctccacactcatttcagagcctcctatggtttgggaaggaataacacactggcccattagtaagggtgaaggctggagggatttgttgacttcttggaattatcagaggtagggtggtctttagcacaaagacttgcatgcagagatccctggcagaacacccagagtgcccgtggctcccaccccagggtctggccggtgtgctggatgcatgcccaagggtgctgggcatcactggtccttgtgaggatgcttttaaagttttatatttatgtccccaaacttggaaacaagaactctactttagcctaaccctcatgtccttttttgaattgagaaaattacaggaaatggtgcctttgaaaattagaaaacttgcttacagagctgttctaaatggtaaatcctcaatttccccaagaccggttgctctgagagtagctggtaaagaggggcgaactaaagacctgtccacctgtagctccgctcatttcttagaaaccacctgcttcccagagtgccaagccacaagtaccaggcttcgtgggcacagacacctcctgggctgggcagagtgacagtgctagaagaccccagagagagggcaagggctttgggcaagaagcactggtggtgttttagggaccgtccttctcccctacccagggaactggacctggcagggcaccgtgctcatgtggctccaaggacaagcatggcggtggccccttctgccttccaggagaggtcttgcttttgaaaccaaaatcatgttcttctaaagtgtcatcttctgccctccctgtcccaatagggaccacatcttatttgtctcaaacagggacttgtgagtacttggcaagttttgcagcctatttttgtattcttaatttggggagtaaagatgtttggtctcaaaaacctttgaggaattgccaagaatggcgagtgattgctttccttcagagaacagacacttggaatttctccttttagtgtttatatacgtgcagattaatttatatatatatatatacacacacacatatacagtataaatactcatttgattctcgtaaaacgcgcatctggcgtgtgcagttgagaaacttggtggcacatgggtgttgggggagtagcctgtgttggagggacaccagtgcactaggcagctggggcggcccaggctgaagccatctccgggtgtctgagaaaccacccagtgcctcacctccagatcctgctggcatcacctccagagccctgcatgcactggctgaagagttggtctgtggagaggattttcttggttacttgtattcacggttaatttacaacccaaacagcaaaacacagttggtggacaagttcatgcaggacctacagtgacccagccatgggcactagctcatctttcaggtggaaaagtacagtgctgcctgccctggtatgtttttcttatagatgttagccctgcccaacagccagggctacactacaaaaggcaagaatgcccatgtaaggagcccagcagtctggacagatccttcttcctctgctgttggatgagagtgagtgagtatggtctggaccttatccttgaaagatgatcaaaagcgatgatgagggaggcagtcatcacgcaggtgcttaaagggacattgtaggaggtactcaagggtttgggggcaaaaccctgaatccagccagtcgtgcacagagacacacccacactagcccagtggcagtgggggatgtgggatggcagcagccaggtatgtagccctgtcacaggacagctcactgtggttttgcacactgcctaagggttaaattgtgttgttgccttcagtagaaggcatttgtgggctgcagagttgagagttgggtgaggttagtctctcctgaagaaaaagcctataaaaagtggctaatcttatcccttttctctgtatgcagttggactcgtcagagatagtaaaatcatcttttagtgtttttttgttgctgatgtcttgtacccatttgttttttacatggggttgtagatcgagttctcaaaggtgaaaccagatgatcattctgataaaggaaatttaaatttgatacatatgctttgtatattttgattacttgttttcgtttttgactataaaggagctttttttcttgctcagagtttacctgggagatttcaccagtttgactcaccatttgcagatgtgcttttgtattaaatttaaattttcacatatcacatccattctcaaggtagttatatgctggagaagaaaaatcctctagacacatgaaggcccacatagtcaagtcttccagggcaaagccagcagcccacccaggtcaggtagccagcagggctcagttcccctcactccagacacggaccctcctcttcagggtctcttgacccagcttccttctctccttttacctgagagcacagacctctctcagccagcctgcccagaccacggggggctactcccatgtagtttggggagcacttgatctcagaaaagctccattgtctgagcaaatgggcagttgtggagctcaagcctttctcctgtgctcaagtcccttccccaagcaaggcttcaacctcatctacccaccatgtagttttctctggccatttaagtggggcggcagggacatggttgggccatgccacaccagggctggtgaggcaaccagttttgattttgacagagtggctggaggaaaagtggcaatcaaggtgctgcttggtttgctctgagtgcaaatggaaccaacaggtttctgctgcaatctgtgtgttcccagtgccaggtcacaccaggaggggtggggcagggctaaccaagtggtctctgaactcaccgagcgtctgcacttggttgtgaagttaatgggagtacagagagcgtctggccttggagaggggttgagagcctcctttttggttcttcattcctgagctcttgcctgcccacaaatctgacctctttgaatggggacgcagtccttcaacagagaagtttctatggcaaagaagtttctatttagctctagatccagcagagtcatccattctaactgccctgaagtctagagcaggggagggaacccagaggctggggatgagactaggcagaccctggttaccatatggacaaggacaggggaaagcacccccttcctcaatttctgaaagttctatctttgggttcgcaggactttgaggatgataaagaacatataggtactagcttgttgttgctggtccaaagcttccacagccctgagaatttggctttcgtggctgctctggcagctgagcgaagggaggaaggcagccgctctggtggggactctaggcaccttccctgctgtccacttggataggcggtgagccccagggtactgagaggagcctgagcatttacctgccattagtgcctcttccttcaggagactggcttgaaacgtgtgttcatgtgcgcgtgcacacacacacatgagcacctgtatgtgttaatgaatagtttttcttggttaatgctttttaacttctgttcctttccgtaagtggatgattcaaaattaacgtgacttggctgggcgcagtggctcacacctgtaatcccagcactttgggaggccaagggaggcggatcacctgaggtcaggagttcgagacccacctgatcggcatggtgaaaccccgtttctactaaaaatacaaaaattagccgggcgtggtggtgcgcgcctgtaatcccagctactcaggaggctgaggaaggagaatcacttgaacccgggaggtggaggttgcagtgagctgagatcgtgcccctgcactccagcctgggcgacagagcgaaactccgtctcaaaaaaaaaa

SEQ ID NO: 65465 - DNA, 2192 bp, Homo sapiens
  misc_feature (1)...(2192): n = a,t,c or g
gtccgtaggagaacccccacagcggccgcgggctagcaagctcccggagccgttttcgttttaccatgacccagncggtggtcgtacaggggggccagtgcggaaaccagatcggctgctgcttctgggacctggcactaagggagcacgccgcggtcaaccagaaaggaatttatgatgaggcaataagcagcttctttagaaatgtggacaccaggcagtcttgattgatatggaagaaggggtagtgaatgaaattctgcagggaccactgagagatgtatttgatacgaaacagctcatcactgatatttctggctcaggaaataattgggccgtgggtcacaaagttttcggcagtctttaccaagaccagattttagagaaattcagaaagtcggcagagcactgtgattgcttgcagtgtttctttataatacattccatgggaggaggaacaggatctggacttggcacatttcttttaaaggtgcttgaagacgaattcccagaagtatacagatttgtgacttccatttatccttctggtgaggatgatgtcataacctcaccttataatagcatcttggcaatgaaggaacttaatgagcatgcagactgtgtattgcccattgacaatcaatctttatttgacatcattagcaaaatcgacctcatggtgaattctggaaagttgggtacaactgtgaagccaaagagtctggttacttcaagttctggggctttaaaaaagcagcataagaagccctttgatgcaatgaataacattgtggcaaatttgctcctcaacctaacgagctctgcaagatttgaagggtcccttaatatggaccttaatgaaatcagcatgaatttagttccttttcctcaacttcattatctcgtgtcaagcctaacacctctgtatacactgacagatgttaacattcctcctagaagattggatcagatgttttcagatgcctttagtaaagatcaccagctgcttcgggcagaccccaaacacagtctttacctcgcctgtgcactcatggttagaggaaatgtacaaatttcagatcttcgtagaaatattgaaagattaaaaccatctctacaatttgtctcctggaatcaagaaggctggaagaccagcctgtgttccgtacctcctgtgggccattctcattcgttattagctttagcaaataacacatgtgtgaagcccaccttcatggaactgaaagagagattcatgaggctctacaagaaaaaggctcaccttcatcactatctacaagttgaagggatggaagaaagctgtttcacagaagctgtgtcatctttatcagcactcatacaggaatatgaccaactggacgccacaaaaaacatgcctgtgcaggatttacccagactaagcatagctatgtgaaaaagaaaccctcaaaaatactttcttaatttcacattgttttttctgacctttctgtttcaacatttttgtaatttggaaactccagttttttcatattatcgggaaatatttttgtctaaaagagtgatttctgtttaatcgcaatttgttggtaataccaatgtgtgaaattagtgaaatcttagtaccttaacttcaaacatttctcttcagaaaagttcccttttctaaaattgagataacatagttcttgaatattttgctgtatttatagcctcatatttaggcatttatgcactgatgtgtcttcaataaaaatcttgtacagatatatttttataattaatttagtaatttatattttgatattctatttaagttatcctgattctttaaaagtaggttaattgggagtaggaggaccaccaatattaaatatttccgtgtaatagccacccaactttttcaggcataggttttattaccaactgttaaggaggttttgcttcttctttagataacaacttgtttgcccaaaagaatcctaatttgtacacttaacatgtatttgtattaaactttttaaataattgctttcttatcaaaccaattgattttataataaatgtctatatttttcaacagtgctacttgttattgttctgcatgacatttatgcaaatgaacagaatgttactaagcttgatatcttccaaactttgcaataaatggctataattgttccggttactat

SEQ ID NO: 65466 - DNA, 1504 bp, Homo sapiens
ccactgatgacccttagtcagtgcggtggaattcccggccacggccactcgcacgggggtcacggccacggccacggcctccccaaggggcctcgcgttaagagcacccgccccgggagcagcgacatcaacgtggccccgggcgagcagggtcccgaccaggaggagaccaacaccctggtggccaataccagcaactccaacgggctgaaattggaccccgcagacccagaaaaccccagaagtggtgatacagtggaagtacaagtgaatggaaatcttgtcagagaacctgaccatatggaactggaagaagatagggctggacaacttaacatgcgtggagtttttctgcatgtccttggagatgccttgggttcagtgattgtagtagtaaatgccttagtcttttacttttcttggaaaggttgttctgaaggggatttttgtgtgaatccatgtttccctgacccctgcaaagcatttgtagaaataattaatagtactcatgcatcagtttatgaggctggtccttgctgggtgctatatttagatccaactctttgtgttgtaatggtttgtatacttctttacacaacctatccattacttaaggaatctgctcttattcttctacaaactgttcctaaacaaattgatatcagaaatttgataaaagaacttcgaaatgttgaaggagttgaggaagttcatgaattacatgtttggcaacttgctggaagcagaatcattgccactgctcacataaaatgtgaagatccaacatcatacatggaggtggctaaaaccattaaagacgtttttcataatcacggaattcacgctactaccattcagcctgaatttgctagtgtaggctctaaatcaagtgtagttccgtgtgaacttgcctgcagaacccagtgtgctttgaagcaatgttgtgggacactaccacaagccccttctggaaaggatgcagaaaagaccccagcagttagcatttcttgtttagaacttagtaacaatctagagaagaagcccaggaggactaaagctgaaaacatccctgctggttgtgatagagattaaaaacatgcccaaacaaaccaacctgaatcatctttgtgagtccttgaaaaagatgtggatatttgaacttttgctttaaactgcaagaggaaaaagactcccactgaaattcctaagtttgcccaagtagtgtaattgaagtccttgtctggtcacacagtttaattctatttttgtaagaacataatgggactgcataacagagttctatattacaattttgtgattattagtacagagtacagctatgctgtgactgttttggaaagccgagttttaacactatgttacatttttgtttaaagtaagttaaaccttatataacataatgacatttgatttctggatttttcccatgataaaaattagggggataaataaaattgttactggaatttctctgcaaaaaaaa

SEQ ID NO: 65467 - DNA, 1524 bp, Homo sapiens
  misc_feature (1)...(1524): n = a,t,c or g
cgttgctgtcgggcacattgtttccttctgatggacagagtatggagagagctgagagccccacaccaggaatggcccagggaatggagccagatggctacaaggtagtattcgtgcgccggagcccgctggtgctagtggcggtggctcgtacgcggcagtcggcacaagagctggcgcaggagctgctctacatctactaccagatcctaagccttcttaccggtgcgcagctgagccacatcttccagcagaagcagaactatgatttgcggcgcctactctcgggctcagagcgcatcaccgacaacctgctgcagctcatggcacgagaccccagcttcctgatgggggcggcacggtgcctgcccctggcggcggccgtgcgcgacactgtgagcgccagcctgcagcaggcgcgtgcgcgcagcctggtcttctccatcctgctggcccgcaaccagctcgtggcactcgtgcgccgaaaggaccaatttctgcaccccatcgacctgcacctgctcttcaacctcattagttcctcctcgtcctttcgcgagggcgaggcctggacgcccgtgtgcctgcccaaattcaacgcagccggcttcttccacgcacacatctcttacctagagcctgacactgacctctgcctgctgcttgtctccactgaccgtgaggacttctttgcagtctctgactgccgccgccgcttccaggagcgccttcgcaagcgcggagcccacctggccctgcgagaggcactgcgcacaccctactacagcgttgcccaagtgggcatccctgacctgcgtcacttcctctataagtcaaagagctcgggactcttcaccagccctgagattgaggccccatacaccagtgaagaggagcaggagcggctgctgggcctctaccagtactttgnacagtcgtgcccacaatgcctctcgccccactcaaaaaccatttactacacgggcccgcaacgagaacctccctggcctgggtgacaggcgcctttgagctctacatgtgttacgagccccctggggaccaaggcgtcagccgtcagtgccatccataagctgatgcgctggatccgcaaagaggaagaccgcctcttcattctcacgcccctcacctattgatgggaatgtgtgcgggctcagccttcctggacacactaggtgtgggaagccataggagcctccagatgggggctggcctctcttgcccagccagcgggcagggactgtgggttggtgaatgcattaaagtgctttgggaaaaaaaaaaaagcataacaagctaaaaaannaaaagggggcgccctattaaaaaaaacaaattaaagcccgggggggggaaaggaaatttttttttatgggggccccaaaaataaaatccgggggcggggtttaaaaacgggggggggggaaaaaccgtggggttccccaaattaatgggtttggaaacaatccccttttcgcccggtggggaaaaaaaaaaaggcccccg

SEQ ID NO: 65468 - DNA, 1445 bp, Homo sapiens
ggaattccagcagcagacagaagaagccagtctggagcttattaaactggacatttctagaacatttcctaatctctgcattttccagcaaggtggtccatatcatgacatgttgcacagtattttgggcgcttatacttgttaccggccagatgtgggttatgtccagggcatgtccttcatagcagcagtgttgatcttgaacttagatactgcagatgcctttattgccttttctaaccttctgaataaaccctgtcaaatggcgttttttagagtggaccatggccttatgttgacttattttgctgcatttgaagtattctttgaagaaaatttgccgaaattatttgcgcatttcaagaagaacaacctaactccagatatctacctaattgattggatctttaccttatatagtaaatctctgcccctcgacctggcctgtcgtatctgggacgtgttctgtcgcgatggggaagagttcctgttccgcacggccctgggcatcctgaagctgttcgaggacatcctgaccaagatggacttcattcacatggcccagttcctgacccggctgcccgaggacctgcccgccgaggagctgtttgcctccatcgccacgatccagatgcagagccgaaacaagaagtgggctcaggtactgactgcattgcagaaagacagccgggaaatgagagaagggaagtccgtccctccgacactgaggctgcagcgggaattcgcactcggcaccaatcagagccccatgccgcggcccctctgttgtttcagactgacacccgggcagccgagaagaacagacgctctttaagtttgattcctaacactggagttggccttaaacaaaacaaacacaaaaacttttaaagaattaaaccaaggcttagccttaagcagctcagtggaaggatgagctgctgcggaccacagccagccactgcatctgctgcacagttgaacgatgggcagtggctcacccccactcctttatttcagcaaaagctaattaaattgtaatgtttctatgtcaactactgggaagtatgttacagtcttagccaggatgcatgagagatgttatttgggagacttgagatgctttggctgatatttacatgttttcgataagaaagggatcgctgattgagttattgagatagtttttccagagctggaggtcacgtttctaaaactcacctacgaaagatagcattaaaggaacaggggctctctgaggatggccactgatgtgtgtttgtggatacctgggcatcgacccagcctgcaggtgagctctgggccatgttgccttgacacagtcacagtgtagaggctgcaggtgcacacgtgggctccagtgggactgcgctctgggagactgctccctggcatcggtcctgcggaggtggaaagttcgagag

SEQ ID NO: 65469 - DNA, 1610 bp, Homo sapiens
gcctcctcctcagctcgcctggcttctcacttaggcgtgtgctttcgctttgcagcaaaagctgctgcttttcgcatctaaattcttgctctgaaggtgccaagaacctggaaaccggctgggagtggggtctcaccagcctttggagaccctcctgagccgtctggcaaccagtgacgatacagagctgcacggaacgtcatgaaggaccaacgcctggttttccatagtaaagttaggtcatctggttatgcgtcagcaccacatgtaactatgttttcaccaaagaccaacatcaagagtgaggggaaaggatcttcaaggagcaggagcagctgcgcacgggaggcataccccgtggagtgcgctgtgcccaccaagcccggcccccaggtcgctgccgcccccacctgcacacgtgtatgctgcatccagtactcaggagatgggcagtggctggcctgtgggttggccaaccatctgttactcgtttttgatgccagcctgactgggacacctgctgtgttttcaggtcacgacggggcagtgaatgccgtgtgctggagccaggaccggaggtggctgctctctgcggcccgggacgggaccctgcgaatgtggtcggctcgtggggcagagctcgcactgcttctgatataaacagaagagcaagtccaagctgatttgcaggctctccacgacgggtgcagtagacatgaccagtttatcggcagtcaacgacttttattcccacatcgtactcgcagctggccggaacaggaccgtggaagtgtttgacctcaacgccggctgcagtgcagcggtgatagtggaagcccactcacggcctgtccatcaaatctgccaaaataaaggttcatcatttacaacccaacagcctcaggcttataaccttttcctgaccacggccattggcgatgggatgagactgtgggacctgagaaccctgaggtgtgagcgccactttgaagggcatccaacccgcggctatccatgtggaatcgctttcagtccttgtggacgattcgcggcttgtggggccgaggacagacacgcttacgtgtatgaaatgggctcaagcacgttttctcaccggctggctgggcacacagacactgtcactggagtggccttcaacccatcagcgccccagcttgccacagctaccttggatggtaaactccagctctttctagctgagtaaccactgacctgtgagctgggtccaggaatgctgtgaggaacaacttaaaagtaagaagtagtggttcatccatcagggggccagaagcagcaactgtttttcatattttgagacttgcctcagatttcccccgtttgcaagctcctcccctctgtgtgtgccatgtcagagttttatgtctttctgctcctcaaaagggatcccccttcattgggaaaatggaaatggcgtccagtacttctgcacagaatttggtaaagttaaaacaaaatatctttcaataaaacataatatagtatttgtttgataattagagttggaagaaaaaagagagaatttcttttgggcagtgaaaataaagcagttaacagtcaaaaaaaaaaaa

SEQ ID NO: 65470 - DNA, 803 bp, Homo sapiens
  misc_feature (1)...(803): n = a,t,c or g
cttctccgggtcgacccacgcgtccggcagaatcctatttccaggaggaggactgtatccttttcttaattacaggaagaaatttttagaactcttacagaaccattcatttttttaattgaagtatattttacatgtaatagaatgtacagatcatatggtttcagtggttttgacagttgtatgtacccgtgtaaccacctcagaaagcaaaatgtaggaaatttctgtctcttcacaaaatttcctagaaccatccaaagtttaccttcataaataggccttaattgtactaaaataagtatttgtatttattttttgaaggaaaatttgtattattttaattatttttatgtacagaacactcaacagtgtacatttaacccagtttagcggcatgttctttagcctttgcctttttgagcttggcaacgtgcgccacagacttgggacccgggacattgccgcccccgtgatggtgaatctcgtcgtatctgtcgttgtaattggtcctggactagacagcccagtcttgccttccccttggataatgcagtaagggacccccattttacgacatagggcaggcaagaagacagccagctggaagaaggcattagtggaagagtgtattttgaccaaaagcagtaaatctcaaagctagcttggtagcaagcgagagagagagaacttctgagtgatcatgaagacaaaaagctgaacagtgagtttttctcttccttttttctgggncagcatttagagcattgcccagaggaaggtaggcagttggacagtgtatt

SEQ ID NO: 65471 - DNA, 3466 bp, Homo sapiens
gagccaagggagtccaggctgccgggggctgcagacatggagggccagagcagcaggggcagcaggaggccagggacccgggctggcctgggttccctgcccatgccccagggtgttgcccaaactggggcaccctccaaggtggactcaagttttcagctcccagcaaagaagaacgcagccctaggaccctcggaaccaaggttggctctggcacctgtagggccacgggcagctatgtcagcttcctcggaaggaccgaggctggctctggcatctccccgaccaatcctggctccactgtgtacccctgaagggcagaaaacagctactgcccaccgcagctccagcctggccccaacatctgtgggccagctggtgatgtctgcctcagctggaccaaagcctcccccagcgaccacaggctcagttctggctccgacgtccctggggctggtgatgcctgcctcagcagggccaagatctcccccagtcaccctggggcccaatctggccccaacctccagagaccagaagcaggagccacctgcctccgtgggacccaagccaacactggcagcctctggcctgagcctggccctggcttctgaggagcagcccccagaactcccctccaccccttccccggtgcccagtccagttctgtctccaactcaggaacaggccctggctccagcatccacggcatcaggcgcagcctctgtgggacagacatcagctagaaagagggatgccccagcccctagacctctccctgcttctgaggggcatctccagcctccagctcagacatctggtcctacaggctccccaccctgcatccaaacctccccagaccctcggctctccccctccttccgagcccggcctgaggccctccacagcagccctgaggatcctgttttgccacggccaccccagaccttgcccttggatgtgggccagggtccttcagagcctggcactcactcccctggacttctgtcccccaccttccggcctggggccccctcaggccagactgtgcccccacctctgcccaagccaccccgatcacccagccgttccccaagccactccccgaatcgctctccctgtgttcccccagcccctgacatggccctcccaaggcttggcacacagagtacagggcctggcaggtgcctgagccccaaccttcaggcccaagaagccccagccccagtcaccacctcctcttctacatccaccctgtcatcctccccttggtcagctcagcctacctggaagagcgaccccggcttccggatcactgtggtcacatggaacgtgggcactgccatgcccccagacgatgtcacatccctcctccacctgggcggtggtgacgacagcgacggcgcagacatgatcgccatagggttgcaggaagtgaactccatgctcaacaagcgactcaaggacgccctcttcacggaccagtggagtgagctgttcatggatgcgctagggcccttcaacttcgtgctggtaacgcacccctcaccccctggacagccagagaccctgctgaattcctggctccagctgtaccctggctcactgtggggcccgctgggcctctgtggctgggtgagttcggtgaggatgcagggtgtcatcctgctgctgttcgccaagtactaccacctgcccttcctgcgagacgtgcagaccgactgcacgcgcactggcctgggcggctactggggtaacaagggtggcgtgagcgtgcgcctggcggccttcgggcacatgctctgcttcctgaactgccacttgcctgcgcatatggacaaggcggagcagcgcaaagacaacttccagaccatcctcagcctccagcagttccaagggccgggcgcacagggcatcctggatcatgagtatgggctgggcctcgtgttctggttcggggacctgaacttccgcattgagagctatgacctgcgctttgtcaagtttgccatcgacagtgaccagctccatcagctctgggagaaggaccagctcaacatggccaagaacacctggcccattctgaagggctttcaggaggggcccctcaacttcgctcccaccttcaagtttgatgtgggtaccaacaaatacgataccagtgccaagaaacggaagccagcttggacagaccgtatcctatggaaggtcaaggctccaggtgggggtcccagcccctcaggacggaagagccaccgactccaggtgacgcagcacagctaccgcagccacatggaatacacagtcagcgaccacaagcctgtggctgcccagttcctcctgcagtttgccttcagggacgacatgccactggtgcggctggaggtggcagatgagtgggtgcggcccgagcaggcggtggtgaggtaccgcatggaaacagtgttcgcccgcagctcctgggactggatcggcttataccgggtgggtttccgccattgcaaggactatgtggcttatgtctgggccaaacatgaagatgtggatgggaatacctaccaggtaacattcagtgaggaatcactgcccaagggccatggagacttcatcctgggctactatagtcacaaccacagcatcctcatcggcatcactgaacccttccagatctcgctgccttcctcggagttggccagcagcagcacagacagctcaggcaccagctcagagggagaggatgacagcacactggagctccttgcacccaagtcccgcagccccagtcctggcaagtccaagcgacaccgcagccgcagcccgggactggccaggttccctgggcttgccctacggccctcatcccgtgaacgccgtggtgccagccgtagcccctcaccccagagccgccgcctgtcccgagtggctcctgacaggagcagtaatggcagcagccggggcagtagtgaagaggggccctctgggttgcctggcccctgggccttcccaccagctgtgcctcgaagcctgggcctgttgcccgccttgcgcctagagactgtagaccctggtggtggtggctcctggggacctgaatcgggaggccctggcgcccaacagcctgtctcctagtcccccagggcccatcgggggctggaggaagggggcctggggccctgagggtggggtaggcagatgggccaaggtgaccaccattctgcctcaatcttttgcaagcccacctgcctctctcctgctgctcctccagctgtatctgcacctgcctctctgtcctggccaggggtggacaactggggtcccccaaaactcagtcctggcacctcaactgtgacaatcagcaaagccccacccaggcccccatctgggatgatgggagagctctggcagatgtcccaatcctaaaggaggtcatccattaggaaaaaaattctaccagacctcaaaaaaaaaa

SEQ ID NO: 65472 - DNA, 1900 bp, Homo sapiens
ttttttttttttgtgattatacgttttattagactcgggaggggtatggcagggcttcatcagtgttccttcaaattaaaaaaaaaatacaaaagctacgtagaaaacgtcagatcagacgactaaactttcccgactcagggccaagttcttcttgagcctgcgctctcgggacgcctgcgagtcggtctccgagtacgggggcggcgcgggcgggtagtaggcctcttcctcctcctccttgtggggtctcctcctctcctccgaccccttcttcctcacagcctcctccagtagccgcccatcataggggaggtccccggacctggagccgttgtcccgagggtcccgggtacggtggtggtgggacctggggtcggcaggagggcgctcccgagacctgaagtcgtcgtagtgggggtcccgggagcgtgggaagtccctcgagtcgtcttggtcatagaggtcgtcccggctgcggctccgcgggggcatgtaggcccggcttctcctcccaccattactcgtgggagacctgctccctgactcggcggtgcctcgggcggggtgaggtcgtccagggcgtccacgggagcgggcccggggccgcctggcccgccagccccccgcttgcctgctccctggcgggctcctggtcccatcccctgggactccggggggagtggccaccccactcctcatcccggatcggggtgagggcagggccccgggaaggccgagatcgccagtcgtcctcgtggagggaggtgacttcactcatggcccgctccacacggccactgggggggccaggtcgagaagggtcgaagttggccagctccttctccatgtagtacaggacccgcatggagtcgtcctgctggctggcctgaatcctgtagccactgcggacacctgagctactcctgtcaacgtctccagggtatcctccagggtacccgttgtaggcagggcccatgggaatcatagctggtgggggtggggtcttggcgggagacaggtgggcataggtgctgggggcataaatgctgggaacacctgaggtggctgctttgccggcggcatacagggcctcggggcagcagcacttgtctgggcagcaggggcacctgacgtagcagcagcaagtgtgcgggcagcactggcaccagcagatgcccaggaggaggaagatgaggaaggcagccaggcataccacaaccacgaagagccagtcttctatgggccccgcctgaaaaccaggtaagagctcagccacccctgaggtcctcccaaggacgatgagctctgcgtaggcctcattgttcccctggaggtcctgggctgagaccacggagcagtaatacacaccactgtccccccacgccgtctggtcaaaggtcaggtcagcatttccggtgatggtaatcctccggccctggtagtaatctcccagggtcacagcgttgccctgcttggtggccacgaccctgacggtgcgcacgctgtcctggcactcaacgtaggggttgtagcctgggttcccggctgccagctgggcattgagctggttgtcgacgctggccggggagaaggcatcggcgatgcggtcccggcagaaagacttgtacttccagatgacgatgggttgcgtgggggtcgaggtcatctggtaggtacagggcagggtcacaggctggaagaggatcaccacgtggtaggggttggacacggtcacctggatggccagcgccatcgcggccgtctgggcgcgtctggcccgcgcgtcccttccaaagtaccttagggggcgcggcgcgcaccaaggccaggaggggtgcacgctcctccccttcccacttccgttccttgtccctactccaagtccgtcctgttgcat

SEQ ID NO: 65473 - DNA, 1610 bp, Homo sapiens
ccactatccatgtggtggaattcttctggcgccaggggccgaccccacgtctacctgcagcgcatccagctcaacaaccccacggagcgcgtggccgcgctgcagactgtggggcccactgccggcccagcccccaaggccttcaccagtaccctggagaaggtcggagaccatcagttcctcctctactcaggccggtccccgcctacgcccactgggttggtgcacctggtggtggtggccgccaagaagctggtgaaccgcctccaagtggctcccaagacgcagctggatgagacggtgctgtgggtggtgcacgtctctggccccattaacccccaggtgctcaaaagcaaagcagccaaggagctcaaggcgctgcaggacttggcacggaaggaaatgctggagctcttggacatgccagcggcggagctgcttcaagaccaccagctcctctgggctcagctcttcagcccaggagtggaaatgaagaagatcactgacacccacacgccgtctggcctcaccgtgaacctgacgctctattacatgctctcctgctcgccagccccactgctcagcccctccctgagccacagggagcgagaccagatggagtcgacgctcaactatgaagatcactgcttcagcgggcacgccaccatgcacgccgagaacctgtggccggggcggctgtcctccgtccagcagatcctgcagctctctgacctgtggaggctgaccctccagaagcgtggctgcaaggggctggtgaaggtgggtgccccaggcatcctgcaggggatggtgctcagcttcggggggctgcagttcacagagaaccacctccagttccaggccgaccccgacgtgctgcacaacagctatgcattgcatggcatccgctacaagaacgaccatatcaacctggccgtgctggcggatgccgagggcaagccctacctacacgtgtccgtggagtcccgtggccagcctgtcaagatctatgcctgcaaggcaggctgcctggacgagccagtggagctgacctcggcgcccacgggccacaccttctcggtcatggtgacacagcccatcacgccactgctctacatctccaccgacctcacacacctgcaggacctgcggcacacgctgcacctcaaggccatcctggcccatgatgagcacatggcccagcaggaccccgggctgcccttcctcttctggttcagcgtggcctccctaatcaccctcttccacctcttcctcttcaagctcatctacaacgagtactgtgggcctggagccaagcccctcttcaggagtaaggaagatcccagtgtctgagtgaactaacagtcctgctttcagccaccatttgcacaagacacccagcactgaaagtcccgctgccaggagcaagggatcctttggaagcacccgccctttgtgccttgttgggggaaaccggtgacgcagaagtgagtgtggatacaccagagtttgcattggaaggaatgagtgtcacgtggggagggaaggggccagtggaccttttgtaagctttccactcaataaaatgaacctgtatggcaaaaaaaaaa

SEQ ID NO: 65474 - DNA, 767 bp, Homo sapiens
acagacacgccaagcttggcacgagggggtggtgggggtgtgcaaaaagggccccctgcctctcccacactggctcatgaggctgcacccctgcccgccgggcgggcccgccccaccaccaacctcttcaccaagctgacctccaaactgacccgaagggttaccctcgatccctctaaacggcagaactctaaccgctgtgtttcgggcgcctctctgccccagggatccaagatcaggtcgcagacgaacctgagagaatcgggggacctgaggtcacaagttgccatctaccttgggatcaaacggaaaccgccccccggctgctccgattcccctggagtgtgaagctgaccagctcgcgccctcctgaggccctgatggcagctctgcgccaggccacagcagccgcccgctgccgctgccgccagccacagccgttcctgctggcctgcctgcacgggggtgcgggcgggcccgagcccctgtcccacttcgaagtggaggtctgccagctgccccggccaggcttgcggggagttctcttccgccgtgtggcgggcaccgccctggccttccgcaccctcgtcacccgcatctccaacgacctcgagctctgagccaccacggtcccagggcccttactcttcctctcccttgtcgccttcacttctacaggaggggaaggggccagggaggggattctccctttatcatcacctcagtttccctgaattatatttgggggcaaagattgaaaaaaaaaa

SEQ ID NO: 65475 - DNA, 2349 bp, Homo sapiens
ttttttttttttcaaatgcagcatattttaatttgtttcaaataaagcaatatatgtatatatattttttcagaaaaacaccagatgttaaattctacaaaagcgcatgtgtcctcagcagatcatgtttgtctgattattaagaattcttttttgtaacattaactctctaaagacaatcaatggactgacatcactgctacaacacaggttgctaactgagcctctgatcttcagccacatcttgattttcctaataatgagtaaatactgcctggctaaaatgctgcaaagtcttgatgagagaaagcatcaacagatcaagcaaagccatgaaaattatgaagcaagctagagctgattattagaattagtaaaaatgattaagagaggatgacacaaccatacgggatttgtatattctgattgacactcttttggcagcgaattgggtcagcacctcgggcagggaaccaaaactgagtgaaaactgctctttttcctcctagctcaggccaccaacgtcacagccgggactgagagaactgctgcatctgtggaaacttctattctcgtggggcagagattgcactgtgaaaccctaccgacactaccccggaagggcctggcctccgaggtgtctgcagcgtgctgccttcgccggggcttttcagaatgggccggggcctcgggggtcttcatccccaaggaagcctcttgatttttggcaccgcctttgtttttgggccggaagccgttgtgcggctgtcttctgtgttcgtggcggctgttgccctttcccagtggctcggcttcattcccactgccctgcgacttggcaggcccatttagcctgttgttatgatactgtggattaaatctccgtctttggttagaagatccattctgcttgttggccggcatggtctggtgagaggggtcggcggtgctggggagactgctcaccattttggggtttgccgctttgccttcagagggcttattgtgagtggatgattttcgggaaaagttactctgtttcccagaggttgctgcgtgcgcattcagcagaggcagcagggagctgcagggagttcttgaggaatagttgttctttggatgtgtaatttctccgcagagcatgatttgggccttcagctgttcgatgtcacaggaaaaccgggcagctttcccgagctcctcgtcatatttacgctcgctgacaaagtgcttaatttctgccctgagttcggccagctgcatctctgccatctgactggcaaggtcagtgagtctctttagttcttctgctttcttctgacgagcagtcaggatttccatggcttcttctttaactttatccatttctgccattaatgaaacttctttgtcaatgatgcagttgtgtaattcagcaaaggcagctttgatcttcttcacggaactatccacttcttccttaatcatgacgcgatatctagttagagaaacggtgcagcgttgcaaatccttcactgatttctcaatatttgggcctcttttctttgccaactcatctggctttatttcaagatgagctgcaggggtattggacttaacaggagatgtttttgccttaggcttgcttgggttacaaggctgctcagctgaccactgtaggccatctgacctctctgttgttccatgtataggtttggggttcccatctaaggatagtttctgttgcagtagtctgttgccttctgtgacccccacgaagtgcctttgaaggttcctcaagtatcgagatctttttctcacgagggataagggctggtttttccgttagcagaatctgtggacgagctgtccttctcgcagccattcatggggccgttttgaatctgtggtggctgcggctgcaggggccctgcctcaggcctctccaccttgtctttagcatctttgttgccttgatgctgcttggacttgcttctttttcttttattgttcttcttttttcctgtcatattccattcttttagaacttgaattgcactgccatccacaaaggcttgcacggctttatccacattaaaatcaaactgttggagcaccaggactatttcattattgcttttgttgggaacaactgatctaactgcatagatcttttccttgacattcacatgagtattgagttcagccatcttgcttctagtggaataggccctgggaatccacagcaatgttcctgaaagcagcctggtttctgaagagctctgaaaaatcaggcgcggaaaaagtgctggagctcgggtcagcccttggaaacccgaccaacccggggtgttccgccgcctcctctgc

SEQ ID NO: 65476 - DNA, 3775 bp, Homo sapiens
atgagctgcggccgcccccctcccgacgtggacggcatgatcaccctcaaggtggaacaacctgacctaccgcacctctcccgacagcttgaggcgcgtgttcgagaagtacgggcgcgtgggcgacgtgtacatcccgcgggagccccacaccaaggcgccccggggcttcgctttcgtccgctttcacgaccggcgcgacgcccaagacgccgaggccgccatggacggggcggagctggacggacgcgagctgcgggtgcaggtggcgcgctatggccgccgggacctgccccgcagccgccagggacgacgccacgcggcaggtccagaggcggcggctacggacggcggagccgcagctacgggcggcggagccgcagccccaggcggcgacaccgcagccgatcccggggtcccagctgctccaggtcccgcagccgatctcgctataggggttctcgctatagccggtctccctacagccgatctccttacagccggtcgcgctacagccgctctccctacagcagatctcgctacagggaatctcgctacggcggatctcactacagctcatctggttacagtaactctcgctacagccgatatcacagcagccggtctcactcgaagtctgggtcctccactagctctcgctctgcatcaacctccaaatcgagctctgcgcgacgatccaagtcctcctcggtctccaggtctcgctcgcggtccaggtcttcatctatgaccaggagtcctccccgggtatccaagaggaaatccaagtcaaggtcgcgatccaagaggccccccaagtctcctgaagaggaaggacagatgtcctcttaagaaaatgatgcatcaggaagcaacgtgatggaggacttgggggaaaaggatcacatactcagtctatggaagcaacgtccctggaagaagaggctgcctattgaaaaggttgtgtcacacttttctacctttttgccagtttgaagctttgcatcaggtggcaaaattcattctatgtgccgttttgttgttattcacattttattgtaacttaggaggtgaacgacctaagattacgttattgggtttggatatttgaggcaaaaatttatttttatttctatagtgatgactgttttggtttgaaatgaacagattggtaacctaatttgtggcctcctgacttttaaggaaacgtgtgcagccattacacacagcctaacgctgtcaagacattgcttcaacattgccttcattccttaaaaacctacaaaaggtggtgtaaattaatatggataattttatttacctccaggtctaaaaggtagtgtgacccaaatttgtataaagatttttcatgtgaaaggactggggttttagcaaacacaggtctaatctcttttgtgtttttgtgcaccaggcccggctgcgtagcagttgagtgatgctggttagctattaaggtggcctgttgcagtgcagagtgctgagctgcttcctgttttcttctgattgctcctggggaaaacacgccttgtcctgaagaacaaatggctgtccagtttattaaaatgcctgtcaactgcacttccagtcacccaggccttgcagataaataatggagcatgcagtgagcacatctagctgacgataatcacaccttttcccccgtcttttctgaaaaattgtaaatctgatcatatcaacatgtatgaacttaaaatatggagaatgttatggaagaaatagtttataagtttgttaagtacttataacatggtttatctttttgattattaattttttacgctaaccattgtttctgtagttaaaattgttttcttggtgttatcttttctcagaataaaattagaaacttttgatggaaagtaggttgttttattttctgtatgacttttggatatttgtacttttgagaaaattattagcaccaagtgtttctcaaaatataatttttaaaaaatccttaataggcttttagctatgtgctttattgttttatcacaatgcagtttatttgtagtttctctcttttttcctcacacctatggtttttttacttccaaaattattttcaaataatccatttttggctttcatcattatccctactagatgttatgtgttcttttgcaattgtttctgcttatacctttactagcaaagggaaaaataacaatttggtgtcaatgatctggtgacaataggattacattggagccaattgaataaatttattctttcaatcatatggatcttcattaatatttttgactgaattatcaattaaaaatatttcattccctttgtgcagaaactgctaaatccagggttcgattcttgaatgaactggcaaggtggctgtggtctgtagatatacatcccacattttgttgttataacagttagtagttagtattgctttcatatatagactccagaatctaaattttacgataatgacatttcttctggtcatgacaaatgtaatattttacaaatataaatctacgtagaatccaaagacacacacagagcagtcctgtctgagaaataaaaaatcaggacacccatggcatcgtagtagcccctcgcgtccagcaggtggcgaagggaggtgaggtatatttattaaatgggaccgagtgggacggggacggggcagccctaagggtagggaagcattgtcaatttctggggatagaatgagacccaggcatagctggagtttgaagctttgaagcaaaaatatctgtagaacatcttaaacgtgaccaaaatatgatgttaaaatcagcaactctttatacgttaaaaactttgaaacctgtggccgggcatggtggctcacgcctgtaatcccagcactttgggaggccaaggcaggtggatcacctgaggtcaggagtttgagaccagcctgaccaacatggagaaaccccatctctactaaaaatacaaaattagctgggcatggtggcacatgcctgtaatcccagctacttgggaggctgaggcaggagaatcacttgaacccgggaggcggaggttgcagtgagccgagatcacgccattgcactccagcctgggcaacaagagtgaaactccatctctcaaaaaaaaaagttcatcccaactttcaagtctacaaaaacataatccaaatctaataacatagttgtaaatgagagcaacaataaaaagtagacatgggctgggtgcagtggctcactcctgtagtcccaggactttgggaggccgaggtgggaagatcccttgagcccaggagttcgagacaagcctgggtaacacggggagacccgtctttagtaaataaaaataaatttattaataaaactaaaaatttaataataaaaagtggacattgttttttaaaatgtgtatagtatgcattttaaagatagtgtccctgctgtggaaaacctgaacagacagtatgatccagaatgtcaggtgtggagttgggcggacaagagtctgctgatgaggacaacctaaaagagcactggatttggaatcagaagacctacctttgattcctggctttcccttaatggccatgtgatgttattaagtcacctctaaagctttagtttcctgtcagtcaaatgttgacatgatacctacctcacagggttgttgtgagggttaagtgaaaggatctttgtgaaagtactttttgaaatcattcagttgtcaataaagttggataaaaaaaaaa

SEQ ID NO: 65477 - DNA, 4460 bp, Homo sapiens
attgacccgcctgcaggattcggcacgaggccgcttgaagatgccattgaagatgaggaagaagaatgtccatcagaggaaacagacatcatctccaaaggagactttccattggaggaaagcttttccacagaatttgggcctgaaaatctgagctgcgaagaagtggaatacttttgtaacaaaggtgatgatgaaggaatccaggagacagcagaatcagatggggacacacagtcagagaaaccggggcaacctggagttgagacagacgactgggatggaccaggagagctggaggtgtttcagaaagatggggaacgaaaaattcagagtcgacagcaacttccagtgggaacaacctgggggccgtttcctgggaagatggacttgaataataattctttgaagacaaaggctcaggtcccaatggtgctgactgctggtcccaagtggttgctggatgtgacttggcaaggagtggaagacaacaaaaacaactgcattgtgtacagcaaagggggtcagctttggtgtacaactacgaaggccatctctgagggtgaagagctaattgcccttgtggtggattttgactcaaggctacaagctgccagtcagatgactctcacagaagggatgtaccctgcacgcctgctggactcaattcagctgcttcactcagcaagactgccatggcttctattttgcccacagctattgtcaataaggatatattcccttgcaagtcctgtggcatctggtatcggagtgagcggaatctgcaggcccatttgatgtactactgacagtgggaagcaaagagaagctgctccggatatacagaggaaaatgaagacagtgcccatcagatttccagcctgtgccacttaccacagtgcaccaagagcttttcaaatgctcgagctctagatatgcacctgaattcacacagtggagtgaaaatggaagaattcctgccccctggtgctagtctaaaatgcaccgtctgtagctacactgctgattccgtgatcaactttcaccaacacctgttctcccatctcactcaagctgccttccgatgtaatcactgccatttcggcttccagactcagagggagttattgcagcaccaggagctccatgtccctagcggcaaacttcccagagaaagtgacatggaacactctccaagtgcaactgaagacagcttacagccagccacagacttattgaccagaagcgaacttccccagagccaaaaggccatgcagactaaagatgcgagctctgacacagagctggacaagtgtgagaaaaagactcagctctttctcacgaaccagagaccagagatacagcctacaacaaataaacaaagcttttcttacacaaaaataaagtctgagccctctagcccaagacttgcctcatctccagttcagcctaatattgggccttctttccctgtgggccctttcctatctcagttttctttcccccaagatatcaccatggtccctcaagcttcagagatcttagctaagatgtctgaactggtgcatcggcgactgaggcatggcagtagtagctaccctcccgtcatttacagccctttgatgcccaagggggctacttggttttgagtgtaacataacattcaataatttggataattatctagtgcacaaaaagcattattgcagcagccgatggcagcagatggctaagtccccagagttccctagtgtgtcagaaaagatgcctgaagctttgagtcccaacactggccaaacctccataaaccttctcaacccagctgctcattctgctgatcctgagaatccacttcttcaaacatcttgcatcaattcttccactgtcttagatttaattgggccaaatgggaagggccatgacaaggacttttccactcaaactaagaagctctccacctccagtaacaatgatgacaaaattaatggaaaacctgttgatgtgaaaaatcccagtgtccccttagtggatggggaaagtgacccaaataagactacctgtgaagcttgcaacattaccttcagccggcacgaaacatacatggtccacaaacagtattactgtgctacacgccacgaccctccactgaagaggtctgcttccaacaaagtgcctgccatgcagagaaccatgcgcacacgcaagcgcagaaagatgtatgagatgtgcctacctgagcaggaacaaaggcctccactggttcagcagagatttcttgacgtagccaacctcaataatccttgtacctccactcaagaacccacagaagggctaggagagtgctaccacccaagatgtgatatctttccaggaattgtctctaaacacttggaaacttctctgacgatcaacaagtgtgttccagtttccaaatgtgatactactcattccagtgtttcctgcctagagatggacgtgcccatagatctcagcaaaaagtgtttatctcagtctgagcggacgaccacgtctcccaaaaggctgctggactatcacgagtgcactgtgtgcaagatcagtttcaataaggtagaaaactatctggcccacaagcagaatttctgcccggttactgcacatcagcgtaatgacctgggtcaactggacggcaaagtgtttccgaatccagaaagcgaacgaaacagccctgatgtcagctacgaaagaagcataataaaatgtgagaaaaatgggaatttgaagcagccttcccccaatggaaacttattttcatcccacctagcaaccctgcaaggcttgaaggtctttagtgaagctgctcagctcattgctacaaaagaagaaaacagacatttgtttcttccacaatgcctttaccctggagcaataaagaaagcaaaaggagccgaccagctttctccatattatggaatcaagccaagtgattatatttctggttctcttgtcatccataacactgacatcgagcaaagcagaaatgcagaaaatgaatctcctaaaggccaggcttcctcaaatgggtgtgctgcgctgaagaaagattctctgccattgttgcccaaaaatcgaggaatggtaatagtgaatggtggactgaaacaagatgagagacctgctgccaacccacagcaagagaacatttcccagaatcctcagcacgaagacgaccacaaatctccctcgtggatctctgagaacccattagctgccaatgagaatgtctcaccaggaattccctcagcagaggaacagttgtctagtatagcaaaaggtgtgaatggttccagccaggctccaaccagtgggaaatattgccggctatgtgatatccagttcaacaacctttcaaactttataactcacaagaagttttattgctcatcacatgcagcagaacatgtcaaatgaactaactaaacatcagtcacctttggtatcagtgtttagtatgttgttctaaccagtccagaaaaaaaaataagctgtttgaattacatctgggcaatcaggagataattcattatggctgagttgaagacttaaggtgtaatttcattacagtccattagtaaagtgtattattggtgccattttcaaaaaaattaatttattttaccagcagtattcatagctgtggttatgttattttttatttaaaaactttatattaaagtcatttgtaatgttattgtatagttattgtgtagcacatatggtttgcactgtatagtagcttttaaagaaaatagtcacaatacagaaaagcattttagaaatagcttcaaaagcacttgtgtatcttgattttttcttatatgctgttgcagatatatgtatatgctaaaatataacttgcaaagatgttctaaatacacatgctataagttcgccttaagatttcaattcttggataatcaggctctgtttgcactttatattttagcagatacagtctcttagtcactaggctttgcatttgtatgtagctgtatgtttccgtccattttcttaatcctgaacctgtatgttaaatgaagatggcaatttttttcttgtatagtacttgtattttctttcgctgatgcagctctgtctcaatttttaaacctttgctgttaaatgcaatactttataaagaatgaacaaaattactggaagcagtattgtaagtaatgaggtagtattaatcagttttatcttttgaaaggcacagtctaaatcgaaaccctaaactcaatgctgcaagtatgaatttaattcatatataagatctatttaaatataagagtagcaatactgcacctggtgatcacaaagataatgttctacttctgatagaaataatttctcaacaaatgttgttactatgcactgtatatggatggaataaaattccagattgttggagaaaaaaaaaa

SEQ ID NO: 65478 - DNA, 1157 bp, Homo sapiens
ccacgcttggcacgaggtggtcggctacccggacttcctgctgaaacccgatgctgtggacaaggagtatgagtttgaggtccatgagaagacctacttcaagaacatcttgaacagcatccgcttcagcatccagctctcagttaagaagattcggcaggaggtggacaagtccacgtggctgctccccccacaggcgctcaatgcctactatctacccaacaagaaccagatggtgttccccgcgggcatcctgcagcccaccctgtacgaccctgacttcccacagtctctcaactacgggggcatcggcaccatcattggacatgagctgacccacggctacgacgactgggggggccagtatgaccgctcagggaacctgctgcactggtggacggaggcctcctacagccgcctcctgcgaaaggctgagtgcatcgtccgtctctatgacaacttcactgtctacaaccagcgggtgaacgggaaacacacgcttggggagaacatcgcagatatgggcggcctcaagctggcctaccacgcctatcagaagtgggtgcgggagcacggcccagagcacccacttccccggctcaaagtacacacatgaccagctcttcttcattgcctttgcccagaactggtgcatcaagcggcggtcgcagtccatctacctgcaggtgctgactgacaagcatgcccctgagcactacagggtgctgggcagtgtgtcccagtttgaggagtttggccgggctttccactgtcccaaggactcacccatgaaccctgcccacaagtgttccgtgtggtgagcctggctgcccgcctgcacgcccccactgcccccgcacgaatcacctcctgctggctaccggggcaggcatgcacccggtgccagccccgctctgggcaccacctgccttccagcccctccaggacccggtccccctgctgcccctcacttcaggaggggcctggagcagggtgaggctggactttggggggctgtgagggaaatatactggggtccccagattctgctctaagggggccagaccctctgccaggctggattgtacgggcccccccttccctgtgttcttgctgcaaagtttggtcaataaatccctgccctgttaaaaaaaaaa

SEQ ID NO: 65479 - DNA, 2708 bp, Homo sapiens
aaaaccatgttggcatcaatgagatatgatgtgccattctaaaagctttctctcctgattgctttagaaattaggatctggaaggactttaacatgaattagttttttcgcatgtttataggccagagacctgcccaggcaatgaactgatagatttaaataaatattcccctcctaactttttcctttagctacagaccagacagtccaaacacaaagctcagaattccagctccaacttatttactcagtgaatttattgtaaaaataaagaaactcaattattccagttaatggatttcacgttaaatagtttaactttcaatgggctttctgaagagctgttcataggatgatatttggaagagtcctttccttaaggaaaaaaagggtcgaacaataaataaagcagttacttgcgttaacggtcacgttatttcattaaaagagaggaggagcagaaatctatgacatagttgcccaacatggcatttatctgctgcaacagaaagctgtaacactggcgggcatttcacagtatttgcgcatagtaaacttctgccattgttaaagtctgagttagaattatcaatgaattcttttttttttgtctttttaaattttcttgattttaaaaaatgtatttgtgttttgcaggttggaacgcaaacccagtctggccacgtcccgtgaagttgtggacaaaatgtttcagtttctgttcacctctgtgcgtgtgtgtgtatgtgttgtgtgcatgtgtgtgtgtgtgtgggggtgggggatggggtaggtatgtgcttttggctcatgtttgtgatgataactgaagtcttttgtgggtccgacctgttgtagggtgtgggggaaagtgaaggaagagaatgaaggtgagtccccgccgttgcaaaccttcaccaaaccacgcggcccagttttcgtgagtacccctgtgtcccagagaggaggacccagcgtcctcggctctgccgcaggccttcttggtctggtgggtactcgaggcagttgagaaccttgctgagctgagcgggcacctcgccttgcctgctggttcgacacctgaccccctccccctgggattatgtacacgcatcattgggcttcatggatgtggaaaggggagcaaaggatggtttggggggtacgtccggctttagcgagggcgtacgcttcagccccgaccttgtcagtgagttgtaggcgttgaggctgggctgcctcgagacagtcacggcctggccagatggctgggagctgtgcacctggatggagtccaccctctgcggggcgggcggcgggttgtctcccctgccaaagctctggtttctggagaggtgagaggaattggaggagttagtgttgtttcttttgagagtggtggcctggtggcttctcgtgagcgagttcgtggggtagctcctcttatagtcaaccccgtaggaagaggagtggtgcatttccagccgcttgcttagaccggtctgagacagggaggctcccgggggacccagggaggcctcccgctgtggaactttggggggcaggctgtccaggttctccacaaggttcaccccatggttgggactcttgctgctgagatgttccttgatggtcttatactccagtgtggcggcctggtcctccagcgccatctgggccacctcgctcattttgggctggtccacgtactcatgctggtagccctgctgcgtgatgggcaggaccaccacgctggggatgtggctgggggaggcccgcaggggcaggtcccgtgggaatcacagggggagcccatggggggcatgtcctttgtgcaggcattgatgaggttctggttcctctcccactcgcggctgccgcggctgggcttccgcttctgctgcagcgttggggttgactctggggtggggagggccgtcaggtccaggtggtgctggtctgctttaatgagcatcttggccgtgttgccgggagtggcgagcttgccgttgtgcatgagtggcgtgaggatggcctccggctttgggtctttggattgagtgtccccaaagaggccgctgagcttggtgacgctgctcatggagccccggcgcgagtgggtgagctccttctccttgcgctgcaccacagccacgtctttgcgccgatgatcacagacgcagtagacggtgatgcccgagaagacggcccccatgacgaaagccaggatgactgcaatggccaagagggtgacgggaaccagctggtcgtggcctttgaggtaactttcccgaatcactccattcttgtcttggtgattatgggaagacactgcccccaaagggtctgtgctgtcaggtgagtcaagcagatgcttccagtccagcattcctcccctagactcatacccctcttgagccgtcgaatctgatgtggttgtgctgggcaagagggaactggaatgcccattcagtgccacaaaggaattgtgacagtcccccagaccatctgtattgccacgctctatgtcctgctcaaaagtcagtctgctgttgggtgataaatggctgcaggcaccaccttcctttatccatccacaatatgggtctctggaggcaatacaggtttttttacacttcccatgtcgttcacaccggccaaggggaacctttatcacacaggtagagaacgcctcgtgccgagattct

SEQ ID NO: 65480 - DNA, 1754 bp, Homo sapiens
ctgttcctatcacatctcactcccagtaggtgttgcatttttggatgaatctaatagttttcctttattttcacttttcacgaggtgagattagatgtctgtgtgaaatgaatgttttactatggtcctacacataatgttaaaattacaaagtaaaataatgaggtacaagatatttattgacaccaaaatacatacaagtatttccgaacaagatgaaaatatctcctggtttctcacacagagacccatactactcggaaggcaggatatgccagttttcctttgtggaaaagtgtatccaggcagcaaacttaatgaggagtgggcagttttgtccttaaaaaactgcagggaagggttctttccagggagtggtagtttggtgctccagggtgctggcagggacaggacagctgattgatagaagtgagggctctaacaaagttcactatttacatcaaaatgacttgatgcgggctctggggcctctgggcctttgtttaaaagatgatgctggaaccatgtctttgaaaccccaccagcattagggcttaggtactaagcaagtccgggactgtatcccgggcttcagtgactgacccaatcacaacacgtgcccagttgaatagtgactgtaacagatcacccacttttaaaggctccccagaagaaatgagcacacaaaatctagctgcagaaaagccctttcccacatcctcctctgcctatgtgggcactgaggcaactgccctgactgtgaaagttcaccccttgtgaataccactctttaaatccaaattgcttcattgagatcttaaaaggaatcttgaaatccagatgattgggtagaaaatgtgacatggaattttactctagcgtcaaaacaacttttaaaatagtcctgcttattcaagttagtttctcctccagaaatctgaaattagatttgataagttaaagattatacaaacagggtggctttcaataatttaattagactcatgccaaaaaaatgagcttccaggaaatattaaatattattcttaaagcaatttggacacagacaatcacacatacataaggaatggagacaaaaagtttctcccaaaagtgccagtgttttgttttgtttggaaaaatgacaacacaattagaggtaaacaatattttctttggctccatctccagtttccccatcttgtctggtcattgtccttgtcggtagatttagctttgcttctgttataaacgcctgcagttgagggcggtgtgaatttgagtcatggggggttggggactcagtgtgggaggtgtccaaatcatttttacaagaatccttgctgctttcatggaaaggaagtatctgatggccggaaccagcggctgtccacagtttgtgactgacattcgaaggctgagaagggtccaccttgaggtctacttgatgttcactagtcctcaccaagtcagaatgagattgagttgtagggtaagtggcatcctgatggataactgatggattcagtttgttgaaagtgttaaatgacatttgtactaaagcttcattgatgaagaatgagttttcatgacataaactctcagatcgattaagttccattacctcggggccacccggaaggagcaccgcgggcaggctcctctgccggccgtgcttccagtggcccagcaggctctgctgggcccgcatcctcgcctgctccctctccaccaggcgcaggccctcgctcata

SEQ ID NO: 65481 - DNA, 2018 bp, Homo sapiens
attgcccgcctgagaattcggacgcgctccggctcgtagcccacagcccactgccggcggctgggcgctgccgaggctcggggcgcgcgcagttggcgtctgccagtgccaagactgtgccgcccccacagccgaggcgcgaaagggggacgcccggcctctgggccgctgccttcgctttctcttcgttgttgcgaacgccgtccgctcaggaggcgccccgcgaccggcgcgatgagtgccaacgaggaccaggagatggaactagaagcattacgctctatttatgaaggagatgaaagtttccgggaattaagtccagtttcttttcaatataggataggtgaaaatggtgatcccaaagccttcttaatagagatttcctggacagaaacatatccccaaacacctccaattctatctatgaacgctttttttaacaacaccatatcatcagctgtaaagcagagtatattagccaagctacaggaagcagtagaagctaatcttggaaccgctatgacctatacattgtttgaatatgccaaagacaataaagagcagttcatggagaatcacaatcccatcaattccgcaacatcgataagcaatatcatctcaattgaaactcctaatacagccccatcaagtaagaaaaaagacaaaaaagaacaactttcaaaagcccagaagcgtaagctggcagacaaaacagatcacaaaggagaacttcctcgaggctggaactgggttgatgttgtgaagcatttaagcaaaactggctctaaggatgatgagtagcacttggaatttgagacaaggaaagagcattctttaaagagtaaaactgggttcaaaatctttcattactattttctggtattgaggcgactttttataaaacacaattttttgtatgtttcttacattaaaaaggttgtaagttgaaagttcatgaagagatcttgttgtattaaattattttcacaaacttgccttaataaaaggtgaaaatgttactgtttagtatactttatgaagccccttgagctttataaatggacaggcatggggaataagaatcagtgttaatttaaatgatcttatcctggtggatgtgctattttcttaaaggagtatgaagcccttttcaaactatcatcccagtggagcggagtactcagtgaacagttactccatagtgcaatccatattaataggcttcttctcttaagtcttcatctcttcttttgcttaattactgaaccgtaaattacttcagagaaatttaaatgctggtatttgaactttatacatgatactttttgtagtttcttttaatttttgaaagatgaactgcttccttttaataaattaatatctatttatacttttctcttgatttgggtcaagatgtttgatcatgagtgctttgagtggtatgtggaataggagaatataaaaacaaatctgccaaatacactagaaagcattttagtaagaaatgctggccctttcttaaaacatttctcttgcatataccaggatgggagtaaaagatgccttaatatttagtttttgtattgttggagacattgattttaataaaatcctatttatctgctgttgtgtgcttttagttgttggataactgaggtctcctaaatggttcaacataaaaccacatttcaagtcttgtttctttttggagtgtcttttcaagtattcaaatgtatttctcaacctgagcatctttttaatcatatacatgggagtcttttaaatgctgaactgttacacatgcttgatttaaaaataataataatagaggaaactattggtctagttgtgccaagaaaagtttctgatgtttatgtgtgatgtacagtgattttgtatatgcgcccagctttaagaacacataaaactattacgtctggtaggaagattgttagtgcctcaagttacacctgtgcagcttgggtctgagttttgatagaacagtaaacatttaaagc

SEQ ID NO: 65482 - DNA, 1490 bp, Homo sapiens
ttttttttttttaaggatgagaagagattttagttattcagtgttttcatgagtttcaacatagggatatagatacaatcagcttcttacatagtttactatctggggagagaacatgaaagacactgtttaacagtgcaaataattccagggaataaatatacatgaatgtgttttttccaaaatacagggttctttatacaaatgtataacctaaatactgatccccatagtgggggtgggttgtaactgaaaggggctttgaggaaaagggctttggaataaaactaggtcatccaccctagcccaaagatccctttcccagccaggcacaaaagggaatttgttaagggaggaacagaggtttaactgttcaggtatctttcctaattctggtaaatttttccccaagttttgaaaaatacccatggaagaatccttaggaatgcccagtaacccagggaatggggatatttggcatatccacaacatcctacaggctataatacactccgaatgccttctcaatgtggggaagtatgagaagttagataattctcctagtgtctggcttcctttttctttgccgttccctctcatacgttcaatcaccctgtgttacaggacacacagtaagtagtgggaaggtgttaagactttgacagcaaagcaaggtcagaggtagaggggaatgtttaaccaatcawtgttcaaatataagctactcaatgaagagttttaggtttaaagagcgagratattcaccattactgagaaatctsragtttctcattcaatttcgcattgcactttgctaccacaaactaaatgggtgtacatttttgagtgctgatttattactcaaaggtttgaatttggagactgaaacaaaccatgctttatctgtgtactttgagaaaatccatccacaagaaaggagccaagcgtcagtttccaatggggggaacattctcatggaggtactgtaaggctaagtctgtccacttcatttcttgttctttgacagattctgtggtgccaccattgtcttgttcaggttcaggaagctcattcagtggtattgcgacatcctcataaggcagcttgtcttctcgccaagcatcatcaatcaaatccaagatccttccacctctctgaacctcactgtccattttcctgcagctttgatcttgtcaaatcgtacgacaggccgtccctcagctgcggcttcctgcctycaggcaggatgtaccaaacgtggaagcggagacggggaggtctgggggtgccacgcaagtccctttcctcccgacacgagtgcagtaaagaaaaacggttatgagcgtaaagtgacagcctcggccgatgggaatagggggraagtccgacactgagcaacgaacgcattcccgcgcctccaaaacctaggccgggggcgctggaaacccttaccggcacccggccaccgcggcagacgcttgctcctgcca

SEQ ID NO: 65483 - DNA, 2177 bp, Homo sapiens
cggcttcgtggaagcgggcgaggagtgttactgcgtttcctggccaggagtgccgcgacctctgctgctttgctcacaactgctcgctgcgcccgggggcccagtgcgcccacggggactgctgcgtgcgctgcctgctgaagccggctggagcgctgtgccgccaggccatgggtgactgtgacctccctgagttttgcacgggcacctcctcccactgtcccccagacgtttacctactggacggctcaccctgtgccaggggcagtggctactgctgggatggcgcatgtcccacgctggagcagcagtgccagcagctctgggggcctggctcccacccagctcccgaggcctgtttccaggtggtgaactctgcgggagatgctcatggaaactgcggccaggacagcgagggccacttcctgccctgtgcagggagggatgccctgtgtgggaagctgcagtgccagggtggaaagcccagcctgctcgcaccgcacatggtgccagtggactctaccgttcacctagatggccaggaagtgacttgtcggggagccttggcactccccagtgcccagctggacctgcttggcctgggcctggtagagccaggcacccagtgtggacctagaatggtgtgccagagcaggcgctgcaggaagaatgccttccaggagcttcagcgctgcctgactgcctgccacagccacggggtttgcaatagcaaccataactgccactgtgctccaggctgggctccacccttctgtgacaagccaggctttggtggcagcatggacagtggccctgtgcaggctgaaaaccatgacaccttcctgctggccatgctcctcagcgtcctgctgcctctgctcccaggggccggcctggcctggtgttgctaccgactcccaggagcccatctgcagcgatgcagctggggctgcagaagggaccctgcgtgcagtggccccaaagatggcccacacagggaccaccccctgggcggcgttcaccccatggagttgggccccacagccactggacagccctggcccctggaccctgagaactctcatgagcccagcagccaccctgagaagcctctgccagcagtctcgcctgacccccaagcagatcaagtccagatgccaagatcctgcctctggtgagaggtagctcctaaaatgaacagatttaaagacaggtggccactgacagccactccaggaacttgaactgcaggggcagagccagtgaatcaccggacctccagcacctgcaggcagcttggaagtttcttccccgagtggagcttcgacccacccactccaggaacccagagccacattagaagttcctgagggctggagaacactgctgggcacactctccagctcaataaaccatcagtcccagaagcaaaggtcacacagcccctgacctccctcaccagtggaggctgggtagtgctggccatcccaaaagggctctgtcctgggagtctggtgtgtctcctacatgcaatttccacggacccagctctgtggagggcatgactgctggccagaagctagtggtcctggggccctatggttcgactgagtccacactcccctggagcctggctggcctctgcaagcaaacataattttggggaccttccttcctgtttcttcccaccctgtcttctcccctaggtggttcctgagcccccacccccaatcccagtgctacacctgaggttctggagctcagaatctgacagcctctcccccattctgtgtgtgtcggggggacagagggaaccatttaagaaaagataccaaagtagaagtcaaaagaaagacatgttggctataggcgtggtggctcatgcctataatcccagcactttgggaagccggggtaggaggatcaccagaggccaggaggtccacaccagcctgggcaacacagcaagacaccgcatctacagaaaaattttaaaattagctgggcgtggtggtgtgtacctgtaggcctagctgctcaggaggctgaagcaggaggatcacttgagcctgagttcaacactgcagtgagctatggtggcaccactgcactccagcctgggtgacagagcaagacccctgtctctaaaataaattttaaaaagacatattacactt

SEQ ID NO: 65484 - DNA, 489 bp, Homo sapiens
ttttttttttttacagattttggcttttattctggccatcacacatctacttctaagacaacacagaccggcagtaccccatcccccatgaccactgtcacaaccccaatttcctcagccccctcctcccaccccaccccttctgccaagctccccgtatgggggctctgcctacacctcaccccgggcatgcagcatgaagtgcccgtgcagctcccccaggttgtcgaaggaatcctcacattccgtacagtggtaggttccctcctcctcctcttcctcctcctcctcccgcccagctggtcggccctccccagcccgaggtggttcctcctcttcctccccgagggccctgccttcaggggctggtgcttcctggggggctgtagcagggcagcagaacctgcagggtggggttcccggtggggcctccccaaggggtgagcggccacagagctggcaaggctgggccgggggctgggctgcacg

SEQ ID NO: 65485 - DNA, 933 bp, Homo sapiens
ttttttttttttaacgggaaaggatgagttacgtttattgccccatcccttcactgaatgtttacattaacaaacaccaaagagcaaactgggcttcctacactgggccatgcagaggacaggccaagaaactccacatcataacagcctcctgatgcctgggcttggctggagctcacatgaggtgctttgatttcttctgcagactctcggtgatggatgctacaactgacttatcatctttgtcatagacggtgagcgtgcagctgctgcggctccttgcccagctcgttctccaccagcacgctgtaatcgccgctgtccttgagcgcgcaggtggggatgacgagggtgcacacgccgctggtggagttgtaccagaacttggagttggccgtgatgttgacgtcgcccttgtagagggtcactgtgggccgcgggttcccaaggaaggcgcaggtcatggtgcagtcctggccgcggagcaccgtgtgtggcttgaggggcgtcacgaagcgcggcgcgtggcgccagtccttcttctcgtagggcttgagcttggcgctcaggtcctggatctggtccttattgatgagccaggtgtccctggagtcaagtggctcactgtcaccgatttcattccgagccaccactctgaagtagtacttcctgcctgggagcagccccgtcactgtgtacttgttgctgaagacacgctcggctgccgtgtaccaggtggctgtgcttgcatcccgcttcatgatgatgtagtgagcctcaccgtcctcctgcacatctgggctgtggttccaggtcagagtcactgtgttggggacttcctcaaacaaccgtaggtttgtggggggccgagggaaatctggaagagttggaagatctgtcagcgaccttggggcacctgaagtattatgtccc

SEQ ID NO: 65486 - DNA, 1779 bp, Homo sapiens
tttcgtcttcactatggcgacggtgggggctccgcggcacttctgccgctgcgcctgcttctgcaccgataacttgtacgtggcgcgctatgggctgcacgtgcgcttccgaggcgagcagcagctgcgccgggactacggcccgatcctgcgcagccgaggctgtgttagcgccaaggacttccagcagctgttagcagagcttgagcaggaggtggagcggcggcagcggctggggcaggagtcagcagctaggaaagccctcatcgcgagttcctaccacccggcacggcctgaggtctacgactcactgcaggatgcagctctggcccccgagttcctggccgtgactgagtacagcgtgtccccagacgcagacctcaagggccttctccagcggctggagacagtatcggaggagaagcgcatctaccgggtgcctgttttcacagcgcccttctgccaggccctgctggaagagctggagcacttcgagcaatcggacatgcctaaggggaggcccaacaccatgaacaactacggggtgctgctgcacgagctcgggctggacgagccgctgatgacaccactgcgggagcgcttcctgcagccgctgatggccctgctgtaccctgactgtgggcgggggccggctcgacagccaccgggcctttgtggtcaaatacgcaccgggccaggacctggagctgggctgcccactatgataatgccgagctcaccctcaatgtggccttgggcaaggtcttcacagggggcgccctgtattttgggggcctcttccaggcacccacagccctgacggagcccctggaggtggagcacgtggtgggccagggtgtcctccaccgtggcggccagctgcatggagcccggcccttgggcactggtgagcgttggaaccttgtcgtctggctccgagcctctgctgtgcgcaacagcctctgtcccatgtgctgccgtgagcccgacctggtggacgatgagggcttcggtgatggcttcacccgagaggagcccgccacggtggatgtatgtgcgctcacctgagcttgcttgggcccagtgtgggggtggcaggcaggtgagggctccgttgccttggtctgggggcagaaataaaatccccgcagcctactgcacttcttggctcaacggtgtgccagcttctgggtcattctatggggcaaagatgctgccttagttcaggtttgtcagaagcagggtctggaatggggcttcagcgagggagtcagggaagcaggggaggggagggagcagctgggcaaggaagtggcttcagaggacgtccagcctcagctggccccacggagagctccaggcagagcccacagtaccacagtgtgcccacaccaccggttactggctcctggatgagggggccagagaggagtgaataacttcccagacacttacctccagggcagggtgccttccagtagccaagggaagcctccagagagcacagatgtgaaccctcagcagcaggcatcaccccccagtggactcgggtgggccaccagtagcatcttctagatggcagaggggtgaatggcagggccaggaaccaggctgcccgggttcccattctgcttttgccacttccagctgtgtggctttaggtgagccttcaccttttggtgccttcgtttcctcatttagcccctacctcctagagctgttttgggagtcaaatgcgctgacgtatataaagtgctttgcaagatcaaaaaaaaaaaa

SEQ ID NO: 65487 - DNA, 819 bp, Homo sapiens
attttcacattgccaggtaccagaaacacagaagactgacacccgccacttaagtggggccagggctggtgtctgcccatgttgccatcctgatgggctgcttgccacaatgagggatcttcttcaatacatcgcttgcttctttgcctttttctctgctgggtttttgattgtggccacctggactgactgttggatggtgaatgctgatgactctctggaggtgagcacaaaatgccgaggcctctggtgggaatgcgtcacaaatgcttttgatgggattcgcacctgtgatgagtacgattccatacttgcggagcatcccttgaagctggtggtaactcgagcgttgatgattactgcagatattctagctgggtttggatttctcaccctgctccttggtcttgactgcgtgaaattcctccctgatgagccgtacattaaagtccgcatctgctttgttgctggagccacgttactaatagcaggtaccccaggaatcattggctctgtgtggtatgctgttgatgtgtatgtggaacgttctactttggttttgcacaatatatttcttggtatccaatataaatttggttggtcctgttggctcggaatggctgggtctctgggttgctttttggctggagctgttctcacctgctgcttatatctttttaaagatgttggacctgagagaaactatccttattccttggagggaaagcctattcagccgcggggtgttttccatgggccaagtcatactcagcccctcgcacagagacggccaaaatgtatgctgtagacacaagggtg

SEQ ID NO: 65488 - DNA, 1843 bp, Homo sapiens
ctggtattcatacagtgacagagggagtgtttttagaaatttatagctgtttctaggtgaaaacactggttgatttagctcccttggtaagagcactgagcagaaagaagttccctatcaaatgggtgtgtggagcagccctgttctccccatcccgtagagctccaggaagttaaccagggacttcagctgcgacctgcagatttctaagcccccctgttatttctctgtcttttacgggcctgtgtatttcagacttggtggtggcagtcaacggggtctggatcctcgtggagacatttatgctgaaaggtgggaacttcttctccaagcacgtgccctggagttacctcgtctttctaactatctatggggtggagctgttcctgaaggttgccggcctgggccctgtggagtacttgtcttccggatggaacttgtttgacttctccgtgacagtgttcgccttcctgggactgctggcgctggccctcaacatggagcccttctatttcatcgtggtcctgcgccccctccagctgctgaggttgtttaagttgaaggagcgctaccgcaacgtgctggacaccatgttcgagctgctgccccggatggccagcctgggcctcaccctgctcatcttttactactccttcgccatcgtgggcatggagttcttctgcgggatcgtcttccccaactgctgcaacacgagtacagtggcagatgcctaccgctggcgcaaccacaccgtgggcaacaggaccgtggtggaggaaggctactattatctcaataattttgacaacatcctcaacagctttgtgaccctgtttgagctcacagttgtcaacaactggtacatcatcatggaaggcgtcacctctcagacctcccactggagccgcctctacttcatgaccttttacattgtgaccatggtggtgatgacgatcattgtcgcctttatcctcgaggccttcgtcttccgaatgaactacagccgcaagaaccaggactcggaagttgatggtggcatcacccttgagaaggaaatctccaaagaagagctggttgccgtcctggagctctaccgggaggcacggggggcctcctcggatgtcaccaggctgctggagaccctctcccagatggagagataccagcaacattccatggtgtttctgggacggcgatcaaggaccaagagcgacctgagcctgaagatgtaccaggaggagatccaggagtggtatgaggagcatgccagggagcaagagcagcagcgacaactcagcagcagtgcagcccccgccgcccagcagcccccaggcagccgccagcgctcccagaccgttacctagcccagcgcccgaaagccgtctcttctatgcaataacacaatagtattactctactgcgatgtacggaactgcggtgtgtgtacacatactcacgtatatgcacatatttatatacaggaagaaaaaagacagacaagatggggcttggtttataaccaccttgccctgtcttccttaactccagaagccagtttggtgaggggtgggggtgcggccaccaggtctgagctcttcctactgtggaaggctccagaaggcccttcacaaggagacccctcacctggatccagtcgactgcggggcttgcccctcatgtgggctggcctccatcggccacgtccaaagctgtcactgctactgcttcaggctcacatccccccgacctgatggcgtgcccgccccctctccctgcgggccatgccacaggtttctgtgttttgctttagggacagaaccacttaggaaggaaagaactcccg

SEQ ID NO: 65489 - DNA, 4917 bp, Homo sapiens
aggactacatcgagaagcactgcccgagcgccgtggtgccggtggagctgcagaagctggcccggggcagcctggtgggcggcgggcggcagcggcccccgcagaccccgctgcgcctgctggtggacgccgacaactgcctgcaccgcctctacggcggcttctacaccgactgggtcagcggcggccagtggaaccacatgcttggctacctggcggcgctggccaaggcctgcttcggcggcaacatcgagctcttcgtcttcttcaacggcgcgctcgagaaggcccggctgcacgagtgggtcaagcggcagggcaacgagcgccagacggcacagcagatcgtcagccatgtccagaacaagggcaccccgccgccaaaggtctggttcctgccgcccgtctgcatggcccactgcatccgcctggcgctcatccgcttccacgtcaaggttgcacagagcattgaggatcaccatcaggaagtgattggtttctgcagagagaatggtttccatggcttggttgcgtatgactctgattatgcactgtgcaacatcccctactatttcagtgcccatgccctaaaactgagccggaacgggaaaagttctcaccacaagccaatatctgatgcatgaagttgccaagcaactggacctgaatccaaatcgttctcctatttttgctgctctcttaggaaatcacattctgcctgatgaagatctggcttcctttcactggagtttacttggtccagaacatccactagcctcactaaaggtccgggcccaccagctggtcttgccaccttgcgacgtagtgatcaaagccgttgctgactatgtacgcaacattcaggacacctctgacttggatgccatagctaaagatgttttccagcattcacagtctagaacagatgacaaagttattcgatttaagagagcaattggatattattcagcgactagtaagcctatgtcatttcatccaccacattacttagcagccagacccggtccgtttggaatgcctgggatggtgccgccgcatgttcctcctcagatgctcaacattccgcagacctctctgcaagcaaagcccgtggccccacaggtgcccagcccagggggcgccccgggccagggtccatacccgtacagcctctctgagccagcacctctcactttggacacgagcgggaagaatctgacggagcagaacagctacagcaacattcctcacgaagggaagcacacgccgctgtatgagcggtcctcgcccatcaacccggcccagagcggcagccccaaccacgtggattccgcctacttccctggctcttctacatcgtcatcttccgacaacgacgagggcagcggaggggcgacaaaccatatcagcgggaacaagattggctgggagaagacgggaagccactcagagcctcaggcacgaggagacccaggagaccaaacaaaggcagaaggctcgtccactgcctcttcaggaagccaactagccgaaggcaagggaagccagatgggcactgtccagccaatcccgtgcctcctgtcgatgcccaccaggaaccacatggacatcaccacacctcccctgccccccgtcgcacctgaggtgctgagagtggccgagcacaggcacaagaaggggctgatgtacccctacatcttccatgtcctgacgaagggtgaaatcaaaattgctgtttctattgaagatgaagccaacaaggacctgcctccggccgctctgctctataggccagttcgtcagtatgtttacggagtcctgtttagtttggcagaaagcagaaagaaaactgagagacttgcttttagaaagaacagacttccaccagaattttcaccagtgatcattaaagaatgggcagcttacaaaggaaagtctcctcaaaccccggaactggttgaagctcttgccttcagggagtggacctgccccaacctgaagaggctgtggttgggtaaggcggtagaggacaagaaccgcaggatgagggccttcctggcctgcatgaggtcggacaccccagccatgctcaaccctgccaacgtgcccactcacctcatggtgctctgctgcgtcttacggtacatggtgcagtggccgggagcacgcatccttcggcgtcaggagctagatgccttcctggctcaggcgctgtcccccaaactctacgagcctgatcagctccaggagctcaagattgagaacctagatccccgaggaattcagctatcagctctcttcatgagtggagtagacatggccttgtttgcaaatgatgcatgcggacagccaatcccctgggaacactgttgtccttggatgtattttgatgggaagctcttccaatccaaactcctcaaagccagccgggaaaagaccccactcattgacctctgtgatggtcaggctgatcaggctgccaaggtagagaagatgcgccagagcgtcctcgaggggctcagcttctccaggcagagccacacgctccctttcccgccgccacctgccctgcccttctaccctgcctctgcgtacccccggcactttgggcctgtcccaccctctcagggcaggggcagaggctttgcaggcgtctgtggctttggaggcccctatggggaaacggtagcaacaggcccttaccgtgccttccgtgtggcggcagcatcgggacactgcggagccttctcaggcagtgacagcagcaggactagcaagtcccagggcggagtccaacctataccttctcagggaggcaaactaaaaatagctggcactgtggttggccattgggctgggagcaggcggggccgtgggggccgggggcctttccccctgcaggtggtttctgtcggaggaccagctagagggcgtccaagaggagttatttccaccccagtgattagaacatttggaagaggtggaaggtactatggcagaggttacaaaaaccaggcagcaattcagggcagacctccttatgctgcttcagcagaagaagtggccaaagaacttaagtcaaaatctggggaatcgaagtcctctgctatgtcttcagacgggtccctggctgaaaacggagtgatggccgaggagaagccggctccccagatgaacgggagcacgggtgacgccagggcccccagccactctgaaagtgccttgaataatgactctaaaacgtgcaatacaaatcctcatttaaatgcactaagtacagacagcgcttgccgcagagaagctgctctggaggcagctgtcttaaataaagaagagtaaacttattttttatagagggtgaaggatgctggaagggtaaggatttaggaatatctggagagaaagagagcctgcagttatgtacattttgtcctttccgtaagagaaaaatgaggactttggaaattcagatccctctttgatatcagagatttaaacaacacatttttagttttaaccagttgtagtcaaaatgctacaataaaacaaaaaagagaaagaaaatgaagagcatttgactcccgcacttaaaatgaagtacacataaagtttaaactggttatgacaaaagcctatagttgtgtttcttgaactataaagaaaacaaattttggcagtctttaagtatatatagcttaaaatataatttttagcatttggcaccatatgtatgccattatatttgattttgcattactgtttcacaatgaagctttctttaaggctttgatttttatgattatgaaagaaataaggcacaaccacagtttttctttcttaaatttcatcactgttgatgtggttcttttgtgttaaaaaaaaaaagtgcaactatcaaaactaaaaaattatagagtaatattgccgttctgctgattttaaatatacaatacatcatacatactttacaagcaagttaaatggagataaagttgaaatcatagaagatgcaaatgacctttcaaaatcaacacaatgtgttctgaaactttcgtgactaataccatgcatctgtgatcaatgaactatgtggttttgaatcggatgtagaccattagtactactacttgagctaaacttctgcatggttcataatttttaaagtgtgtagttaatatgcatgttatcgtcctttcttccattcttaacagtatgtgcccatttgcaaaacaaaaatgctaataatcagtaatagtcctataaaagatgttaactctgtttagtcattgactgatcttgctctaaccttaaaattttgtgattattgacctctgttgcatttattctaaagccccccaaaaattatctagccgtttcgaatatcaacattaccctggtgtattcactgctgtatgcattattgttctttgttgctgttttatgccttcatattagcaaatatgaaattctgtgaaaaaaaaccctttgatcttaaaaaaaaaaaaccaccccccccttctgtagcaggaaacaaattgcttgttcttgagaactttcccatcaagaatttagtagaagcaggtatacttctatcattttgatgtttttgttaatgtttccaaacaatgtactttgaaatcagaatcacttcttatcgttttcatatacttctgatgctcttcatcacattagtgatcagaaatgaggtgtaattccccaacccctgcccgcaagagctaagtaggatcttactgtaagttgaagggagttttgccctaactcatggattgtgcaagaatgaactgctgttgggtttgattgactgtcgatggattgtggtgtggtgtatctgaaggctattgaatgcaacttacaatgcttaataaaaatctttattcttttagtataaaaaaaaaa

SEQ ID NO: 65490 - DNA, 2401 bp, Homo sapiens
cagcttcccggtcaggtacctgggtcacgtggaggtagaggagtcccggggaatgcacgtgtgtgaagatgcggtgaagaagctgaaggcgatgggccgaaagtccgtgaagtctgtcctgtgggtgtcagccgatgggctccgagtggtggacgacaaaaccaaggatcttctggtcgaccagaccatcgaaaaggtctccttttgtgctcctgaccgcaacctggacaaggctttctcctatatctgccgtgacgggactacccgccgctggatctgccactgttttctggcactgaaggactccggcgagaggctgagccacgctgtgggctgtgcttttgccgcctgcctggagcgaaaacagcgacgggagaaggaatgtggggtcacggccgccttcgatgccagccgcaccagcttcgcccgcgagggctccttccgcctgtctgggggtgggcggcctgctgagcgagaggccccggacaagaagaaagcagaggcagcagctgcccccactgtggcttcctggccctgcccagcctgggcacgtgtccccgacaccagccaccacatcccctgtgtgagaagggtgaggcaggcacccctgtggctgcaggcaccactgcggccgccatcccccggcgccatgcacccctggagcagctggttcgccagggctccttccgtgggttcccagcactcagccagaagaactcgcctttcaaacggcagctgagcctacggctgaatgagctgccatccacgctgcagcgccgcactgacttccaggtgaagggcacagtgcctgagatggagcctcctggtgccggcgacagtgacagcatcaacgctctgtgcacacagatcagttcatcttttgcccagtgctggagcgccagcacccagggccaccacctgccacaacagggacttctgcctggggtgagccctcccgtgccccctgcagctgccttccagcctgggcacaagcggacaccttcagaggctgagcgatggctggaggaggtgtcacaggtggccaaggcccagcagcagcagcagcagcagcagcagcaacaacagcagcagcagcagcaacagcaacagcagcaagcagcctcagtggccccagtgcccaccatgcctcctgccctgcagcctttccccgcccccgtggggccctttgacgctgcacctgcccaagtggccgtgttcctgccacccccacacatgcagcccccttttgtgcccgcctacccgggcttgggctacccaccgatgccccgggtgcccgtgggtgggcatcacaccctcacagatggtggcaaacgccttctgctcagccgcccagctccagcctcagcctgccactctgcttgggaaagctggggccttcccgccccctgccatacccagtgcccctgggagccaggcccgccctcgccccaatggggccccctggccccctgagccagcgcctgccccagctccagagttggacccctttgaggcccagtgggcggcattagaaggcaaagccactgtagagaaaccctccaaccccttttctggcgacctgcaaaagacattcgagattgaactgtagcccgagccgccccacccactccatcatctccaggtgccccacgcctgggggtggaggcacaacctctcccctaaccctgctccctggggctgcgcccctcaacaccctctcaacacccccctccctcaaccaccccgacaaccactacagaaccaacattgtgacgcccaggttgcaacaggatggaattcagggacggacccagcctggctaagggaaccatttcactgccggacttaggctggcaatgcccccttccccaaccccagacacaggggttggccacaatcccactgaatgcccttggttcacactccatttcccagtttctgttgacccccaccttccagtgttggacaggatggaggggggacacttgcttaggggctctcctgggccccacaccagtgcccaccccaaatctggtcgtctcctccccccatgcacagcacaagctaagggctgccctctgcccacacgctgcgttcactgccaatgctgtactcacctccatcaccctccaactttggggcccatgtcttccttgggccaaggtctcatgggggctagggccaagttgggggcccaggaggcggggagggaggaggaggagaagatgcgcagttacctcatgtcggtgcccgctggggaggggtccgggaagaaggggaaggggtgcctggcgggtacttttctatcttttatttccagattttttttgtatctaaacttgaagatttgtattatacaaggacagccaataaaggaagaatataatggtgaaaaaaaaaa

SEQ ID NO: 65491 - DNA, 1033 bp, Homo sapiens
ttttttttttttagtgcaagaaatgctgcatcattgaagcacttgagaattaccatgaaatctaacaaaaaatgtcatcaactcaggagtaataataaaaaagagaaacaaccagagaggcacacagattgttgtttttttaaaaggatttttatactatattaaaaaaccacaaaataaaaaagggatcaatcaacatatatcttagaagtccttccaagagtcttggtatgcaacagccatggaggctgtgacctttttccttcttttctcagcctgcagttcatttaaggatcaccggagatgactcgtgctctagttcttaaaatcaaacttgttctgccaaatccaagaccctgaatttgtccaaattgtagaaacatgcttttaccacccgtccaccaaaatacctcccattcaagtcaacaaccgctttaattgctgattcaactctctcaaattctaaaaatatccgtactgcttcatcatcaggggcaccaggaatttcaaatatcacacattttccaactttgccatatttttcacattcttccttggtttcaacttccaagtcttcatccacctctcccgcaccaaccatgttccttagtaagaccactttagtaggacacttaagtatttcagtcagcggatttgaatctgacttcttggatgcatctttctctgtggcgtcgcccacgatgatcttgccgccacgcttgctggtcttctccactgacaaggcagtgctcaggccctgctcatgcttccccagaccctggccctcccggaagccgtacttctgcatgatcttgtgcgccaccgtgccccccatgttagcgaggaaggagttgcgctgggccgggttggagatctcggtctgtcttgttcctcgtacactgggggaggaatggcagttttggaagactgtgatcgaggtcttgagtcctcttcataaggaaaatctcggggtaactgtcttttactgccagagaagtgggtgaggcaatggcagctccgcccatacttgttt

SEQ ID NO: 65492 - DNA, 2008 bp, Homo sapiens
ccttttttttttttttaggttttagcagcacttttacttccacatccaaactccctgggtcctcacaacagccctgtgaggtaggtagggtaggaaggtttcagagatccccatttatagatgaggatgctgaggcacagagaggtgaagtgacttgtccaaggtcatacaaccagcagtgtagagggctcaaagccagcattcctccacttgaactcctgcgctccggccctctggcagttcccacatcctctctattctctctgtgtcccccaccctctcaactctcctgggtctgcagggaccctaaaggcagcctggcagctgagatttttcaggaatggcaactggggtaggcctggtcaactccagataggaactgaccctgaagagcatgaggccagctttgcttctccccatttcccagttggatggaaggcctagtaggtcccagggcaaggatggagctaggcatgattcatgaacgaatggtgataaaggtaggtgtaagcatatgtgtgtcctgcactaaagacaaaggctcccctaacccaaggccccaaggcagtgtttcaagtgctcacccccatgcctctctcatcccacagagccacagtgagtgtcctcagcagcaaaaggagccatagaaatagctgcctctggcaatgagctgctccagtggacagctcccaccaagccttcagaccccatcacgcagacacagtgcctccacggcttgactggggccctgggccacacccccaataacaaacagccggggcccagcctgcagactagagcaggagcagcgggcagtgggcatggcaggcaatgcctcccagcgccgccgtgcaaggctaaagctctccacagagcccaaaggacatggctggtttccaaggcccccaatggccacaatgtggcccccaagggacccaaccacaaagtctgccctcttatccctcatgcgcaggctgcggggcaatttggtccaggacccatgctccaggtcaaacatctccacagtgttgacaaagtgtgggcgagagtagaagttgtggggcccaggctgctgcaggccacccaggctaaagacgctgccttcagccatggcgcagccagcaaaggcccgacggctgggtaggcttggatgccgggtccatgtacgggcctccagatcaaaggcttcaaaagcagtcaccgggagcttgccctggcggccccccaggacatagatcttgttcccgtgcaggaaggtggaggccccatagcagggtgtgggcatggagggtagcgaaagccagcagtcccgacggggctcatacacacgtacctgggcctggggggccgtgtcagggcccattccccccagagcatacaccataccatctctctccacagttgcaacccccatggctgcttgagggagggtggcccgacgctcccagcggccctcatccatcaggaaggcctctacagcagctaccgggctctggacctcatccacaccacccaccactagcacctgcttgcccagaactaccgcagctgcaccagcccgggcagtgggcaggggtgccagtgccagccatgtgtgcgaggccatgtccagtgtctcagcagtgtccaggggcagtccagcccggccacaaccccccaacaccagcaggtgcccatcttggtgtgccactgtgccatagacccggcaagtgggcatgggggggaacacttgccaagcaaaggcccggccacctcctgcagacatggtgttcactgccagtggcaggccatgctgtctgctcagactgtaggcctcactggggaggcatgacagggcctcatcttgattctgccagggccacaagaggtatatgaccagtccagggaccttgccttcacccgccggtgctccgatgctgccagggtacggggtccgccgttccgcctccgttgacgcgggatctggctggggctgaagtcgggctctggcggggctccggcactgctc

SEQ ID NO: 65493 - DNA, 1280 bp, Homo sapiens
  misc_feature (1)...(1280): n = a,t,c or g
ggcccccaaaaaaaaattttaccccgccaagcccggggacttaaacttggtccccttaaaagggcccccccttttttttttttttgaggcacctgtgggactttattagataaacacacaccagctccagccacaggcttggaccggccagctgacagggcggcctcagacacccctgccgggttccgtggcccctggccatggctggaagcagggttcaggccgccccacttctgtctagtcctggcaggccccccctcacctggctctgctgtgggagccgagaacaaagaccccgcctgccccactccttctgccccaggggctcagccagcacccaccctcacagtggcctgggcaggggctggggtacaaagcctcaccctccccctgtgagccagacggaaaatgcatctcccaagagtgtctcgaggggcaggaaggaggcctgcccctccctagccagtgcctacaacagggggtgccctggggggcagaacggccgaccgccaccacaagacatcctgggggacagaggccctgggcacagcccagtccccatccaggagcatatcctaaatgtgcaggggccggcaaggcaggggtaggaggggtccgtggccaggctccatgaggtgagggtctcgccttggactccggatagggggtgctcgacnccgcgcccaggcccctccgccttcagccagcgcatcttctgtcggtactgctggacagcatcttgcacacaggcgtccatcatggcctcagtgaggaccccgtccttggaggcatatgccgtggcctgccaggacacggccagctgagcgatctcccggcccgacatgccctccgtcagccgagcgacctccgagcacttcctcccgtagtcaaactgggccagcttcaggcgccgttttccttctgtggccggcttaagaacacagttgtcaaaatgcagtctcaccaggcgctcccgctcctcctgctgcggcaggtcgaagtggaccatcacgtcaatgcggctgttgatggcacagtcgaactgctcaggcagattgctggccaggaccagcatgaatttgttgctgtgttggcccatgtggtacaggaaggcgttcagtgtggctctgaggtccttgcttatctcctcagtggctcgcttccgaaggaaggcgtctgcttcatccatgaagagcaggaggccgcgccggctggtattggcccagtcaaagagcttgtgcatgcggtcacgcctttcnccccantggggccacgtcccc

SEQ ID NO: 65494 - DNA, 949 bp, Homo sapiens
agccccatcagtaagaagcggaaacgaaagggatcttgccagagacgaagaagcgcaagaaacgcaagtcagaggatgccacgccagcggaggatggcacacctgcagccaccgcgggagccagccccccagcatgggcaggaagaagaggaacaggacaaaggctaaggtcccagcccaggcaaacgggacgccaaccaccaagagtccagcccctggcgcccccacccggagccccagcacccctgccaaatccccaaaactgcagaagaaaaaccagaagccacccccggttctgggctgggaccctggctccagggccatgtccagggctctggtgtttgcctgggttggtgcaggttgatgtgctggctgcaggcaggtgtgaccatctctcgtgcctgccacctctttgcccccaggcttttttgctgtgagggagccaccagggggtgatttaaataggtttatttcttcatttacaagaggaatatatttggcttctctcttaagactctgagattcacaatcagcagctctaaaaaataaaggagcagtttggcttccggaaggaagaggaggcaacactcggacctggttcttgtacaacaagaaaacatcgctggggccccgctgaggctggagtgggggtggaggctggtctttggaggatgccacccccaccccatcctcttgtcaggccctcggggtaccccagagcttggtgggtgagtattccacctgcttacacaccactgaaggccacagccaggccagttacttaggggggcaagaaagagcattgtccaagctggctcttggggggggtcccccattggccacaaaggcctcaccccccaccccatccccgtaaccagaaaccaccttgattgcagcagaaattcaggcagatgggtagcgcaggggggctaacccccccacaagcggg

SEQ ID NO: 65495 - DNA, 1459 bp, Homo sapiens
ctggcgggcgtgggaacccaggccccgccgaggcggccaggaggtgagatggcagctgggcaaaatgggcacgaagagtgggtgggcagcgcatacctgtttgtggagtcctcgctggacaaggtggtcctgtcggatgcctacgcgcacccccagcagaaggtggcagtgtacagggctctgcaggctgccttggcagagagcggcgggagcccggacgtgctgcagatgctgaagatccaccgcagcgacccgcagctgatcgtgcagctgcgattctgcgggcggcagccctgtggccgcttcctccgcgcctaccgcgagggggcgctgcgcgccgcgctgcagaggagcctggcggccgcgctcgcccagcactcggtgccgctgcaactggtatctgcgcgccggcgccgagcggctggaggctttgctggcggacgaggagcgctgtttgagttgcatcctagcccagcagcccgaccggctccgggatgaagaactggctgagctggaggatgcgctgcgaaatctgaagtgcggctcgggggcccggggtggcgacggggaggtcgcttcggcccccttgcagcccccggtgccctctctgtcggaggtgaagccgccgccgccgccgccacctgcccagacttttctgttccagggtcagcctgtagtgaatcggccgctgagcctgaaggaccaacagacgttcgcgcgctctgtgggtctcaaatggcgcaaggtggggcgctcactgcagcgaggctgccgggcgctgcgggacccggcgctggactcgctggcctacgagtacgagcgcgagggactgtacgagcaggccttccagctgctgcggcgcttcgtgcaggccgagggccgccgcgccacgctgcagcgcctggtggaggcactcgaggagaacgagctcaccagcctggcagaggacttgctgggcctgaccgatcccaatggcggcctggcctagaccaggggtgcagccagcttttggagaacctggatggccttagggttccttctgcggctattgctgaacccctgtccatccacgggaccctgaaactccacttggcctatctgctggacctgctggggcagagttgattgccttccccaggagccagaccactgggggtgcatcattggggattctgcctcaggtactttgatagagtgtggggtgggggggacctgctttggagatcagcctcaccttctcccatcccagaagcggggcttacagccagcccttacagtttcactcatgaagcaccttgatctttggtgtcctggacttcatcctgggtgctgcagatactgcagtgaagtaaaacaggaatcaatcttgcctgcccccagctcacactcagcgtgggaccccgaatgttaagcaatgataataaagtataacacggattttgatgtgagaaaaaaaaaa

SEQ ID NO: 65496 - DNA, 2416 bp, Homo sapiens; identical to SEQ ID NO: 65215
  misc_feature (1)...(2416): n = a,t,c or g

SEQ ID NO: 65497 - DNA, 1190 bp, Homo sapiens
gcggccgccgtggccgagctgccggtgctggacgcccgcgggcagcgggtacccgttcggcgcgctgttccgggagcgccgcgccgtggtggtgttcgtgcggcatttcctgtgttacatctgcaaggaatacgtagaggatctggccaaaatccccaggagtttcttacaagaagcaaatgtcacccttatagtgattggacagtcatcctaccatcatattgagcctttttgcaagctgactggatattctcatgaaatctatgtcgatcctgagagagaaatttataaaagattgggaatgaaaagaggtgaagaaattgcttcctcaggacagagcccccacataaaatcaaatctactctcaggaagccttcagagcctgtggcgggcagtgactggccctctctttgattttcaaggagacccagctcagcaaggtggaaccctcattttaggtccaggtaacaacatccattttatacaccgcgataggaataggttggatcacaaacctatcaactctgttttacagcttgtaggagttcagcatgtgaactttacaaacagaccttcagttatccatgtgtgacttaaaatgcactcagtcactttcaactggaccttctggaatgtgaccttcaatgcctgggtgtaatatcctcgtgcagtgtctaacctgctgtcccttcccagcctttgaggagttagggaagcataaagggggcttgaacctgttgaattgcatgctgggaagcatcagttgtcaaaatatgttatatacttccattttataacttttaacattttatacaaaaaaaatgaatatacaaaatataactttaaaagctataaaatcataaatactctaaattattttacattatggtatattcagtcaatgaaagagttttttggcaatataaattctgacagtatataaggggacaggagaacaacacaagaccattatattcagtgaagaaggcaaaatatcaaatctgtcaacaatgtaactgcatttttatatgtatatatttgtatttttgtatgctttggaaaaagacaggaaataaacaccaaaatgttgccagtaggtatctctgtgttaagattagcgctattattttcttttctgtacttttctgtatttcccaactgttatataatgagcatgattaatattgtag

SEQ ID NO: 65498 - DNA, 449 bp, Homo sapiens
aaaacttttgttttttttttttgaaagctgcacagcctgaaattacctttattcaattaatgcaaaaacaaaaggggagatgttggaggccgaaggaatgagggtcgtgaccaactcagtataccactggaggctctgtgagcaaacagcaaactgttctcatgaaagcaggatgttggcgaactgacaaactctgtctgccgccagaaggaatgctgggggcagtcatgtcccaggtcccgtgctccttgaggttatccacaggaacatccagaacctccataaaggcaggccatgcttatcatcattgcagtatccaatctgcagtggtgctggctgcctgttgtgggtgctcagtatttatctccaagtcccgcctttcgcgcatcgcctgctgctctcccactcagcgccacctcagtcccacaaaggccgggctgggatcctgc

SEQ ID NO: 65499 - DNA, 4197 bp, Homo sapiens
ttttttttttttctggtcagtgggggcactgggtcagatttattgcacttgcaacagagtttaaataagtcctgggtgtctggtgccaaggtgagggaagggttgggcagagagatgaggggcagcatcagtgcagctggcaggcagaacccaaattctgcaggcccaggacagtgggctcccctttctctggggaacagggagggcctgtgtctggccaggctgaggttccagatctgttgccatcatggccccttcagggtcctgggaaattcctggcttctcctaaatcagggtgaactgggcctccaggatcaggtctggagcaggcccaaatatagtcctggatctgcctggattaggtgccaatgtctgagtctgggttccagatcaactccagaccccaggctggaatctggccccatttgagttctgattccccttggagctgggctctggggcggccctgggccagcatctatccttgtgtggcatctgtcctgagctggtcctggggcaccatgcatagttagtgttctttgttggcccaccagggtggggctgtccagagctgccaggtcttaactccccaagttccaggttcttagctgggggcttcttttggatctctggcaaggctgaggacagatctttgcaggttggagctggacaggaagtccttgtggcatgtctggcccaaagaactgtgaatggatttcctagttatctttccaagttgtttcaggaaactctccaaaatgcaaaggcttcagggaggctggggcctctgtccctggatctgagttcccccatccatgaagagggtatgtgtaaacaagggtccttcacagtgcatgggggggagggatccccagctcctcacccccctggctctggcccttcaagtatgtctctgggctggggagaggagcttctccctggccgtcagcaccttcaagaagtacccagacccctccttttcagtagaatgagggtggggggactggttcttcaggaatgggagtctgaaattgggaggactcaggcatcagaggtggctggaggcttgagctgagctttttccatggcggtgccatatgggagggagcgtttgaagaatccaagcttgtagaggatgtagatgagtagacctaggagcaggaggccaaacaggatggctcaggatgatgatccccagtgggacgccatagctgccttctcgccttggtcccattgcacagctgtggcccaccctgacgctctttttgggggcagctgccgaggcaggattcggtagggcatcttcagggctttgtacacagcctcacactgcaggctaaatggctggtgctcccgctgcaagaaagtcttggcccagactcggaaatgcaactgcagactttggctctcttgttggtgcaggggcccgagctcacagcgcagcctgaaacactcagcctccgggcatttcaggatctgaggtcccgaggaagcagagctgcggcttggagcttcccgtttttgctggtggtgcagggaaccctcgggatccaactccaggccctttgggttaatggggtgattggtggtgcagttgagtcccgtaactctggtcacatataggagctgctgaccttccagagcctggggacagctgagttccagcacaccctggctaatggagctggggccttggttgatgagctcatagacatggtggacagcaggtcccaggtcctcctccttctgaggctggtctcggggatgccagtcgcttactgggaatagcactgcctcaggcttggagacaccgttcagggtgacctgggcctgagcctccacggagagccgaaaggaaaccacgtcgctttgcgagttgttgagattcttgctgaggatctggaagtcaaactggatggttttcttagtgtcccggagatgagggactgtaaaccgaaggccaccccacagactggctcctgccttcatggggttgcccaggtcacacaccagcaggcggctctggttcacggcaaagtagtcacagctcaggctggagaagttccctgggtgtctgacgagtcctgagtactcagcctctggaggggcggtgacccgaagctcagcctcataggcgccaccctcacccacattctgggcatggaaagtgaggttcagggcattcttgtcacccaggtacacatggttctgctccccaaacacttccagctgcaggtcaggcacacagatgttgtcttctccacagtccagcaagatctgagccttgtcctctatccggctcttgctctgataatgtagggctggcctgaggccgtggctgtccactggggcttgggggtccaaggagaagttgagagcgatgtgaatcggcgagagtttgtctcgaaattctgactcgttcctgaggtagatcttcatctctctgcaatcctctcgagccccattctggatgagcagggtctgggtcagggttgcctgcctggaggccaggaacagtgcccgccgtacccctcccttctgcttctgccagtccagctgaagttccactgtgaaaccaatggagtcagcaacgtgttttccagaagcattgaggcagaagctaaggttgatgcaggccacagggttcccctctaagctgcagctccgctcctctgggttgaacatggcggggaagatggtgagggaggcactagcggacacgatggggcggcccctgtataccacagccttgtccacaccaaaggaccccacaatcagatcaggatatccattgccatccaggtctcggcctcctcgaagggcagagccaaagaagtctggggtgtggctggctgcccacaggggctgcagaacctgggaaggcttagagcccagccctcctgggcccccaggaaatacaaacactactccctgctgggtctccccaccaaagggagccccgatggccacatcattgtagccatcctggtccaggtcccccaggggggtcaaggagctgccaaatcggccaaactcatcatggccagtgagggtaagggtgggcgtgggctctatgccggctgggtgctgcaggtagacgtagaccctgcccacctcctgaggccgcccgtcaggggtccgatccatgagcaggggtgcccccaccagcaagtcatccagcccgtccccattgacgtctgtggcggccactgcatagccaaagtaggaggccatctgttcccctgagaagttgtagagggatcgaatgtctgagccattaaggatggtgacatagccgtaagtgaggttccctttgggcacaccagcaacaaagtcttctgtgtcatcaccactgaattcaccaacagccacagagtatcctaggtagctgtcatcatagatggaactggcctggcgagtctgcagctgcccctgaaccaggttgatcaggtactcggggtaataagattctgcaatctgctcctgagtggcagacaggatctggccttgccagaaatagcttcctggtccacctaaaaccacacggccagtcttggtgaactcggcactgaagcctccttggcagtaaccctgtcctgctgcccagctgaaatctgagcggcagggtgcatactccagaattcgggtgaagttatctgtggagaggtagcaggtgcccacggggtcgctcagtggctccttctctgtgcgccagctgtacagtggagcgcatgccaagatggaggagccatgggctcgaactgttgccccgaaccactgcaaggacttgtactccacaggctcctctccctctgagctggacagtgaggactccaggagccgagagcctttgctgtcaaattcaatgggggtgcactgtgtggggctggcaccccaaggacagaggtagacagcaccaccctgcagcactcctggctggctggtattagccttgggtgctcccaccagcacactgaccccgtctgttcccggccggtaaaactccactgagaatccgaagaaggagcccgggggccccgagagtactgctggggcctccgcgtctaagttgaagcccccgaccctgggtggcggcggcacgagcagcaacagcagcggcacgagcgggggtcggcgccgggggccccagcgcagctgcacggcgtggagaggggactctggcgtccggctccccat

SEQ ID NO: 65500 - DNA, 2344 bp, Homo sapiens
acaactgtctgctgcgcccgaaaaacaagtcggtgcgctggggacccggggccggggccgccttactccggcctagccccgcggccctcggtgcgggctccagggcatgctcggtaccccccgcggctccagcccagacgccccggcctcaggtctcggcccccgcttggggccccggccgtgcggcgcgagggagcggccggatggagcggaggatgaaagccggatacttggaccagcaagtgccctacaccttcagcagcaaatcgcccggaaatgggagacttgcgcgaagcgctgatcggcccgctggggaagctcatggacccgggctccctgccgcccctcgactctgaagatctcttccaggatctaagtcacttccaggagacgtggctcgctgaagctcaggtaccagacagtgatgagcagtttgttcctgatttccattcagaaaacctagctttccacagccccaccaccaggatcaagaaggagccccagagtccccgcacagacccggccctgtcctgcagcaggaagccgccactcccctaccaccatggcgagcagtgcctttactccagtgcctatgacccccccagacaaatcgccaatcaagtcccctgcccctggtgcccttggacagtcgcccctacagccctttccccgggcagagcaacggaatttcctgagatcctctggcacctcccagccccaccctggccatgggtacctcggggaacatagctccgtcttccagcagcccctggacatttgccactccttcacatctcagggagggggccgggaacccctcccaggccccctaccaacaccagctgtcggagccctgcccaccctatccccagcagagctttaagcaagaataccatgatcccctgtatgaacaggcgggccagccagccgtggaccagggtggggtcaatgggcacagggtacccaggggcgggggtggtgatcaaacaggaacagacggacttcgcctacgactcagatgtcaccgggtgcgcatcaatgtacctccacacagagggcttctctgggccctctccaggtgacggggccatgggctatggctatgagaaacctctgcgaccattcccagatgatgtctgcgttgtccctgagaaatttgaaggagacatcaagcaggaaggggtcggtgcatttcgagaggggccgccctaccagcgccggggtgccctgcagctgtggcaatttctggtggccttgctggatgacccaacaaatgcccatttcattgcctggacgggccggggaatggagttcaagctcattgagcctgaggaggtcgccaggctctggggcatccagaagaaccggccagccatgaattacgacaagctgagccgctcgctccgatactattatgagaaaggcatcatgcagaaggtggctggtgagcgttacgtgtacaagtttgtgtgtgagcccgaggccctcttctctttggccttcccggacaatcagcgtccagctctcaaggctgagtttgaccggcctgtcagtgaggaggacacagtccctttgtcccacttggatgagagccccgcctacctcccagagctggctggccccgcccagccatttggccccaagggtggctactcttactagcccccagcggctgttccccctgccgcaggtgggtgctgccctgtgtacatataaatgaatctggtgttggggaaaccttcatctgaaacccacagatgtctctggggcagatccccactgtcctaccagttgccctagcccagactctgagctgctcaccggagtcattgggaaggaaaagtggagaaatggcaagtctagagtctcagaaactcccctgggggtttcacctgggccctggaggaattcagctcagcttcttcctaggtccaagccccccacaccttttccccaaccacagagaacaagagtttgttctgttctgggggacagagaaggcgcttcccaacttcatactggcaggagggtgaggaggttcactgagctccccagatctcccactgcggggagacagaagcctggactctgccccacgctgtggccctggagggtcccggtttgtcagttcttggtgctctgtgttcccagaggcaggcggaggttgaagaaaggaacctgggatgaggggtgctgggtataagcagagagggatgggttcctgctccaagggaccctttgcctttcttctgccctttcctaggcccaggcctgggtttgtacttccacctccaccacatctgccagaccttaataaaggcccccacttctcccaaaaaaaaaa

SEQ ID NO: 65501 - DNA, 2673 bp, Homo sapiens
atggaccgcggcacgctccctctggctgttgccctgctgctggccagctgcagcctcagctcccacaagtcttgcagaaacagtccattgtgacctttcagcctgtggggcccgagcaggggcgaggtgacatataccactatgccaggtctcgaaagggctccgtggcttcaggcccccaaatgccatccttgaaagtccatgtcctcttccctggagttcccaacgggcccgtcaacagctggagctgactctcccaggcatccaaagcaaaaatgcaccctggccccgaaaaggtgcttctggtcctcagtgtaaacagcagtgtcttcctgcatctcccaggccctgggaatcccactgcacttggcctacaattccagccctggtcaccttccaagaagcccccgggggtcaacaccacagagctgccatccttccccaagacccagatccttgagtgggcagctgagaggggccccatcacctctgctgctgagctgaatgacccccagagcatcctcctcctgactgggccaagcccaggggtcactgtccttctgcaatgctggaagccagccagggacatgggccgcacgctcgagtggcgcgcgttacttccagcctttggtccggggctgccacttggaaggcgtggccggccacaaggaggcgcacatcctgagggtcctgccgggccactcggccgggccccggacggtgacggtgaaggtggaactgagctgcgcacccggggatctcgatgccgtcctcatcctgcagggtcccccctacgtgtcctggctcatcgacgccaaccacaacatgcagatctggaccactggagaatactccttcaagatctttccagagaaaaacattcgtggcttcaagctcccagacacacctcaaggcctcctgggggaggcccggatgctcaatgccagcattgtggcatccttcgtggagctaccgctggccagcattgtctcacttcatgcctccagctgcggtggtaggctgcagacctcacccgcaccgatccagaccactcctcccaaggacacttgtagcccggagctgctcatgtccttgatccagacaaagtgtgccgacgacgccatgaccctggtactaaagaaagagcttgttgcgcatttgaagtgcaccatcacgggcctgaccttctgggaccccagctgtgaggcagaggacaggggtgacaagtttgtcttgcgcagtgcttactccagctgtggcatgcaggtgtcagcaagtatgatcagcaatgaggcggtggtcaatatcctgtcgagctcatcaccacagcggaaaaaggtgcactgcctcaacatggacagcctctctttccagctgggcctctacctcagcccacacttcctccaggcctccaacaccatcgagccggggcagcagagctttgtgcaggtcagagtgtccccatccgtctccgagttcctgctccagttagacagctgccacctggacttggggcctgagggaggcaccgtggaactcatccagggccgggcggccaagggcaactgtgtgagcctgctgtccccaagccccgagggtgacccgcgcttcagcttcctcctccacttctacacagtacccatacccaaaaccggcaccctcagctgcacggtagccctgcgtcccaagaccgggtctcaagaccaggaagtccataggactgtcttcatgcgcttgaacatcatcagccctgacctgtctggttgcacaagcaaaggcctcgtcctgcccgccgtgctgggcatcacctttggtgccttcctcatcggggccctgctcactgctgcactctggtacatctactcgcacacgcgttcccccagcaagcgggagcccgtggtggcggtggctgccccggcctcctcggagagcagcagcaccaaccacagcatcgggagcacccagagcaccccctgctccaccagcagcatggcatagccccggccccccgcgctcgcccagcaggagagactgagcagccgccagctgggagcactggtgtgaactcaccctgggagccagtcctccactcgacccagaatggagcctgctctccgcgcctacccttcccgcctccctctcagaggcctgctgccagtgcagccactggcttggaacaccttggggtccctccaccccacagaaccttcaacccagtgggtctgggatatggctgcccaggagacagaccacttgccacgctgttgtaaaaacccaagtccctgtcatttgaacctggatccagcactggtgaactgagctgggcaggaagggagaacttgaaacagattcaggccagcccagccaggccaacagcacctccccgctgggaagagaagagggcccagcccagagccacctggatctatccctgcggcctccacacctgaacttgcctaactaactggcaggggagacaggagcctagcggagcccagcctgggagcccagagggtggcaagaacagtgggcgttgggagcctagctcctgccacatggagccccctctgccggtcgggcagccagcagagggggagtagccaagctgcttgtcctgggcctgcccctgtgtattcaccaccaataaatcagaccatgaaaccaaaaaaaaaa

SEQ ID NO: 65502 - DNA, 843 bp, Homo sapiens
  misc_feature (1)...(843): n = a,t,c or g
gaatccttattatattccacattctaagttaagtgctttacatggaatatctcatttaacccacaggataatcaagggcgggggacttctcaagtacagcaaccttcttgtgcgggacttcaggcccacagaccaggaagaaatcaaaactctagagcgctacatgtgctccaggttcttcatcgacttcccggacatccttgaacagcagaggaagttggagacttaccttcaaaaccacttcgctgaagaagagagaagcaagtacgactacctcatgatccttcgcagggtggtgaacgagagcaccgtgtgtctcatggggcatgaacgcaggcagactctgaacctcatctccctcctggccttgcgtgtgctggcggaacaaaacatcatccccagtgccaccaacgtcacctgttactaccagccggccccttacgtcagtgatggcaacttcagcaactactacgttgcccatcctccagtcacctacagccagccttaccctacctggctgccctgtaactaaccttgagacctgagggtttccacagtgggaaccccaatagggctagggctctcaggtaggggagcctccttctagatgtaggcatttggcttttaaaggggaactcagctctgattctgcnnnnnnnnnnnnnnnnctttggggcccccatggaaaggggtcaacggggaatcaggacccacccctaaagggccccgttttacaggcccttgtggaaaacccctccgggaggcgggccctatccacttttttccaaaataaacactaccttgtttggccccaaacttaagcaggggggggtggggctttgg

SEQ ID NO: 65503 - DNA, 3965 bp, Homo sapiens
  misc_feature (1)...(3965): n = a,t,c or g
gacgggctggggaggtggtgccaggctggttgctagctgccgccgctgctcaccccggccgtccggccgcttcattgtcaccgggcctcggggcagtgttgggggtggcggggcgccaggtcgccgacccgaggtttcggcgcgactggttccgcatcccctccccgccggccgaatctgcaggccccgcgcgccaggcaggcttcgcggctgcgcccccggcccgcgcaggacctgccttgtccaccatgaaaggcacccgggccatcggcagcgtcccggagcgcagcccagcaggtgtggacctgagtctgacaggtctccctccgcctgtgtcccggcgtcctggcagtgccgccaccaccaagcccatcgtccgctctgtctccgtggtcacaggcagcgagcagaagaggaaggtgctggaggccacagggcctgggggctcccaggccatcaacaaccttagaagatccaacagcaccacgcaggtcagccagcctcggagcggctcccccaggccaacggagcccacagacttcctgatgctcttcgagggcagccccagtgggaaaaagaggcctgccagcctgagcacagcccccagcgagaagggagccacctggaacgtcctggatgaccagccccggggcttcaccttgccatccaatgcccggagttccagtgcccttgactcaccagcgggcccgcggaggaaagaatgcaccgtggccctggcccccaacttcactgctaacaacaggagcaacaagggagcagtgggcaactgcgtcaccaccatggtgcacaaccgctacaccccctcggagagggcgcctccgctcaagagctccaaccagactgccccctccctcaacaacatcatcaaggcagccacctgtgagggcagtgagagcagcggctttgggaagctgccgaagaatgtctccagtgccacccactcagcccggaacaatactgggggcagcacgggcttgcccaggcggaaggaggtgacggaggaggaggctgagaggtttatccaccaggtgaaccaggccgctgtcaccatccagcgctggtaccggcaccaggtgcagcggcgcggagcaggagctgcccgcctggagcacttgcttcaggccaagcgggaggagcagcggcagcggtcaggcgaggggaccctcttggacctgcaccagcagaaagaggcagccaggaggaaggcccgggaggagaaggcacgccaagccaggcgagcagccattcaggagctgcaacagaaacgagccctgagagcccagaaggcgagcactgccgagcgtgggccacctgagaatcccagggagaccagagtgccaggaatgcggcagcctgctcaggagctgtcccccacgccaggcggcactgcccaccaggccctcaaggccaacaatgctggtggtggcctccctgctgcaggccccggagaccgctgcctgcccacctccgactcatccccagaaccacagcagcctccagaggacaggacgcaggacgttacttgcccaggatgcagctggggacaacctggagatgatggccccgagcagggggagcgccaagtccagggggccactggaggagctgctgcacacactgcagctgctggagaaggagccggacgcgctgccccgccccaggacccatcacaggggcagatacgcctgggccagcgaggtgaccacggaggatgacgccagctctctgacagctgacaacttggagaaatttggaaaactcagtgcgttccccgaacctcctgaggatgggacgctgctatcggaggccaagctacaaagcatcatgagcttcttggacgagatggagaagtctgggcaggaccagctggactcccagcaggaggggtgggtgccggaggcggggccggggcccctggagctggggtccgaggtgagcacgtctgtgatgcggctgaagctggaggtggaggagaagaagcaggccatgctgctgctgcagagagcgctggcgcagcagcgagacctcacggcccggcgggtcaaggagacagagaaggcactgagccggcagctgcaacggcagaaggaggccctacgaggccaccatccagcggcacttggccttcattgaccagctgattgaggacaagaaggtcctgagtgaaaagtgcgaggctgtggtggccgagctgaagcaggaggaccagagatgcaccgagcgtgtggcccaggcacaggcgcagcacgagctggagattaaaaaactcaaagaattaatgagcgccaccgagaaagcccgccgggagaagtggatcagtgagaaaaccaagaagatcaaggaggtcactgtccgaggtctggagcccgagatccagaagctgattgcaaggcacaagcaggaagtgcggaggctcaagagcctgcacgaggcggagctgctgcagtcggatgagcgggcctcgcagcgctgcctgcgccaggccgaggagctgcgggagcagctggagcgggagaaggaggcgctgggccagcaggagcgcgaacgtgctcggcagcggttccagcagcacctggagcaggagcagtgggcgctgcagcagcaacggcagcggctgtacagtgaggtggctgaggagagggagcggctgggccagcaggcagccaggcagcgggcggagctggaagagctgaggcagcagctggaggagagcagctctgcactgacccgagccctgagggctgagtttgagaagggcagggaggagcaggagcgccggcaccagatggagctgaataccctgaagcagcagctggagctggagaggcaggcgtgggaggccggccgcaccaggaaggaggaggcgtggctgctgaaccgggaacaggagctgagggaagaaatccggaaaggccgggacaaggagattgagctggtcattcaccggctggaggccgacatggcgctggccaaggaggagagtgagaaggctgccgagagccgcatcaagcgcttacgggacaagtacgaggccgagctctccgagctggagcagtcggagcggaagcttcaggagcggtgctcggagctgaagggccagcttggggaggccgagggcgagaatctgcgtctgcagggccttgtgcggcagaaggagcgggcgctggaggatgcgcaggcggtgaacgagcagctttctagcgagcgcagcaacctggcccaggtgatccgccaggagttcgaggaccgggctggcagcctctgaggaggagacgcggcaggccaaggccgagctggccacgctgcaggcccgccagcagctggagctggaggaggtgcaccggagggtgaagacagccctcgcgaggaaggaggaggccgtgagcagcctccggacacaacataagggttcgggtgaagcgggccgaccacctggaggagctgctgaagcagcacaggaggcccacgccaagtaccaagtgtccagggatgccgggaacactgtttaagaacggaaggcaaaggacaaaggctggacgtgggcccagaggcccacagggacgcccacctgccccccacagaggctggtggttgagatgcccacggctaagcacctgtggctgcattttaacagtaaaggaggccgttgttttcagcaaaaaaaaaaaaaagggggcgcccttttaaaagaatcaatttttattcccgggggcgggaaaggaaaaattttttttttggggccccaaaattaaattccggggccggttttttaaaacggtggggggggaaaaacccgggggttccccaatttaaaccgtttgggaaaaangnnnnnnnnnnngnnnnaannangnntncttnntgagatatttttttgtcttgcctacacgggtggggttttgattttagttaaaaccattggggggtttggaaaatactcaaag

SEQ ID NO: 65504 - DNA, 1539 bp, Homo sapiens
cccacgcgtccgcaaggccagggacctgtgaccatggaagcagagagaagcaaggccacagccgtggccctgggcagtttcccggcaggtggcccggccgagctgtcgctgagactcggggagccattgaccatcgtctctgaggatggagactggtggacggtgctgtctgaagtctcaggcagagagtataacatccccagcgtccacgtggccaaagtctcccatgggtggctgtatgagggcctgagcagggagaaagcagaggaactgctgttgttacctgggaaccctggaggggccttcctcatccgggagagccagaccaggagaggctcttactctctgtcagtccgcctcagccgccctgcatcctgggaccggatcagacactacaggatccactgccttgacaatggctggctgtacatctcaccgcgcctcaccttcccctcactccaggccctgggggaccattactctgagggctggcccgctccctggcaaggatatacccctacctgtgactgtgcagaggacaccactcaactggaaagagctggacagctccctcctgttttctgaagctgccacaggggaggagtctcttctcagtgagggtctccgggagtccctcagcttctacatcagcctgaatgacgaggctgtctctttggatgatgcctaggcccaaaggagaggccaaaagggaaaccaaggctgcacacctagaaccccaattcagcctcctgggcaccccagaggcaaggctgtgcactcagggagggagggtgggacacagaggtgcatctagggtcccacctgtacccttgctctttcctctcttagcccttagaagtcacctacttccttccagtgccatgatcccacctgcgacctctagtgcgagtgcagagaaggtgggaccagggccagggttccaaaaagagaataagcctcctggggggtctgacctagttagttcttgagtttggggtttccagtaccatctggatgccctgcctgttgagccccattctacatccccaccattaaccaggccccacccacaaggtagaaacaacccctagagtcaacgagaaagtcattttcagaaaatctacaagtctcgttgagaccaccaccatacctcagaaggtaggactgtggcctagaagggaaaggaaagctgagatgatgtcttaccgtagcagcagatcttggatggtccaggctctatgtgacctccagagcaaagagaaagacttcggacagtctaggtcctcaaatgtcccccattgaggacaacagccccagctctttttcttttttttgagacggagtcttgccctgttgcccatgctggagtgcaatggcacgatctcagctcactgcaacctccatctcctggattcaaacaattctcctgcctcagcctccagaatagctgggattacaggcgtacaccaccatgcctggctaatttttttgtatttttagtagacatggggtttcaccacattggccaggctggtgtcg

SEQ ID NO: 65505 - DNA, 2977 bp, Homo sapiens
ctctgctgaagtttctgatcaaaaggcaaagagaggcattgctcacattttctatgtatactttgcaacatatcttttaaactgacccaaactggaagaacaaacatatatacccgttactgaataccagaaatattgaattaaatgtcaaactcagtctgatttgctttaaacaagtgataccatatactatctttagaaatttcaagaaaacatgaacttatcttgaccattttccagaaagtagtctataccaacaagatttgtacagatgtttctgtttggagacaggcagaaccaatttagggcttaccaaattgtgttcataacaaactgaaaaaaatctctagtacacagtacacaactaaaaaatataatagaaatataaagatatctaggggaagaaataaagcttttcactttctccatcagaaccaaggttcttcatgggagtaagactatagaaaaggcaaaatcacaggttactgacagccctcagttattaagagacacatgacaacatgaatcattatagaaatcagcagcaatgaattctatgattatacaaagcaaaaaagtcaaaaaattctggacacagatttgactgtaggcctgaaaaaagaacctcatccagatatttggtgcacagaaagcacatgccccatgtgcattcaacttttgtgcttttcttttgtgcacaaaacctgatacaacagaggatcttaggccggaccatagtaaattaaaaattctgaaaaagtatccaaaaattaaagcatcaattcctagttgtgattcaaagttgatttttttttctcttctaggagcaagcaaataaaaatatagccatatacatgtaattttacatgtatttatagttatatgctgagcaaggagatctagcaagagatagctagtgttagatgttcagctttgctattgcaatattttgtcatttttgtacacaaggccaaggtcttgggccacagacaaggctatagatcctacgttccagcttagagcattcagcttttttttttctttttttctcccacatggaatgtcacacaggccttgcttcagtcactgttaatactagaacaaaataggctttcctgcagttttttcttggacgtaagaagtaaaacgttttagaaatttaggatactctcgctttgccactgcccttaacactgaggctgggtgcccatcctccagggttcacattagctacatatgtaatcttgcatagaatggttgtccctgctaatttccttggtttcccctctggtggggcttaccaagggtttggacaaatcatagcaacatttattttggcacggacacatcggttgtttagaggagcactgtcatgatccacagaaaaattacaaactatccaagtttcagggtcattttcagtcaaggctggtatctttcgaatgacagaaagatataatacgtctcgctgagaagcaggccacaccctcttgtgtgtttgataaatgatgattgcattatcagctaatgtttccaccacatgaaagttttctatagttgtttcccagtcattgcgaacgtcaacattccagaaataattgcagacttcatgtcctgtgacgcctttaactgcatgggtagcttttaaaggatccagaacaatcccattttcttctacttctcttctgtataccttcatttctccttcttctacaaccaactgccaattggcatctccgcctacatcctgtaatgagtaagtcatgtggttctgcaccatctcttcaacctgggagctgaatctgtgaacatcatcagaggccctggctagatcaatggaagacatggaggaagagcgactatagggcttttggacaaatctatgtgtccccacagaagaaaaggcatctccagagggcaaggatgtaggccaatgtaatctcaccttttcactctgtgactgttcttctattttatcttgtctgtcaagagcagcttcaacagcatcaaagaactcttcttcattaatcagactgttagggccttcttcataatctggtcctccaaagtgggattttttcttaagttctgtcattgcatttttatatgcttcctctgttcttcttttcttctcagtttccttatccagtctcttctgccagctgtcctcacgtttaaccattagttcaatacaatgagaaagtgttgcaaggattccagcagtagttgctttaaaagttatcgcttcccctttaaagtctataccattaattccttttggtgtcacatgtggaaataacttttctttattgccgttggtactatgcaagaagtcaccatcagaacgcgttgtaggaaagtcatcttcatcatcttctaccactttatccctttgaagttcatccttagagacagcatcagcacaggcatcaaagtacttctgtagcgtgtcaacttgtctacataagatgtctctaaatgtttccatttcagccaacttctcacgtaaactgtggcctttcttgaatgaagaggtggatgttgcagagtagccacttgctccagacaccagggacaccattgagccatgtcgacgcaagctggattcagatccatatccagattcagtcttgtgctgttcaatggcatctatccattgctgtctatgatctggatcctgagcacgaagataccaaacactatcatttacactaatatcaaatcgacattcatcaaaatcgtgaggtgtgatgacagccttgctaagacagatggatcctctgcagccatactctgtttcatcttcagatttgtagtaactcagagcattatttttcaaaactacccaacgatcctgccacccatgaatgtagtttgtccacttactgaggaccccgcagcgctccacaggcggcccagactccgtctctggatcctcctccgagcccgacgagttccagctctgattatccgacat

SEQ ID NO: 65506 - DNA, 2204 bp, Homo sapiens
ttggggaacccccagggttttcccatccccccggtgtaaaaccgcggcccaggaaatggattttgggggccccataaaaaaacttttgcgttgccagcccccggacgttaacctggatcctttaaaacggcccccccttttttttttttttctttaacaaaatttttatttaataaatggttaaaatcgcagtgccaaaaatacattgacatttagcaatttcactgaaaggaagaaactacagaatgcacggtttcagaaagctattttaagttatttacaaataaagtatctaaaactcaaaaacaggctctgtatgctatatctagtttatcccttcccgaacaaaatttctgttatttgggcaaattcttaaaccatggtttaaaccgtaatggttacaaaccacaaacacatccatccagagactgaaaccgtttctatccggtcagtggcaaaactgttgaaagggcaatagttgaagctgttgggttttatatagtgtgaactctgataaatattcctaccaggactaaaacacagcacgctttgcgggcatggctgactcacaaaggttgtaacaaacaagaactactcttcactcgacaccatggctcagaggccaccgagaagcacgagtgactgacagctcctctgcttacaaacgaatgaaacccaaagtggatgtcgttctcacagcactgaaagtgcttcaggactcacactgatccaatactaactttcttccctattttacacatatttttctactgtccagtggaaatcattttctgttttggctaaacaacaaatactagtttataacaggaatggtaaaatctgtgagaattctgctcaatttaatacaagatcactactttctttagaatggtttctgcgtgtttctacgtcaccctctgtatttttagcttccagtttcctggtaaggaataagttctccttcccagtcacactcggggtcatttacacgtttctgggatgcccttgctcgtccatggaggccaggtgcgtgcagtgactcactctgcctcttccctcttctcaggaccagtccccgaaccttctgccttgcagatcctcctgtttccgccacactctcgcgctcggaagcgagctcctggatcatacagctgcaaggctggccggtccttgtttgccagtcgctcttttctgggtgctggactgtcgtcacacctctgcgctcttcccagtctctccatggcctcccccggagccccgctgtcctggctccccttcttccctctgtcttggccaggtcctttcccccatctctgctcatcctcactccttctggaaagccgttcaggctcgtggtgagctctgtgcctcctgccgtcatccacatggtatctttgtgcttcagattcttgttcttgagatctctccacatccctgtgctctttatcactgccgctgtgtgacgtctcctggggctcctccagcgagccttccatgggcctggcttttacgactgcaccgggggcacaggattcctgcttgccacctccagtatcaatctcctctcctctttcttttggtttctctgtggttggttcctctcccttttctggtttcttaagaagcttaatccttacttctttctctgcaattttcttctgtttatctgtctctttttttttgcatctttcttcttctcttcttcttcttttttcctcttcccgcaaacgtttcttttctaactctctcctcctccgttcttctcgcttctcttctcgaattctctgcttttctaattttctatttttaatatattccaaaagaggtgtggttcttctagcaatgagctctcttgtcttcgcctccatctcccccagcagagtctcagggttggcactggtcttctcttcctccacacagtaggtttctaaaaacttcttatattctggatctttgctgtcaaggaagatatatccatcaaaacgatctctaaaaagaaggatgtcatcaggattcctaaaattaatgtatgctcttgagtagagatgaggataaagactcaggtcggcggcgaagaactcgaagtagtcgtgtgctggcagcgggcgcagctgctcctccagctgctccttggtgaggcccggaggcaggcggcggatgaccacctgcggggagcgcgcggccgttcccaccggggcacgaaa

SEQ ID NO: 65507 - DNA, 823 bp, Homo sapiens
ttttttttttttcaccggcagcttccactctttatttccaaagaatcagtgtcacacatgcagatcacaaagcgggtctccctgtgctgcttccttctgtgttttctagtctctcccccaggggctgcccagggccctcaggaactgagtgtgggcaagacactgctgggccagagggcacgacgcccacgtgggcccgtattgcccaggccatttggcagtgcagagcccccccagcctccagcaggagccccctggcatgagctctcccctcaggggtcctgagcaacgtccctgccagggctggtgggtggcagcgggggggcagacacctcgctgaggtcctgcagcagagcttgcagccgctgcaggctggggtgcacgttttcctccagccactcctccacggcatccgggtagaaagccagctgcagggcagcctccagctcctgcacgagggtgctccactgtgccaggaggctgagcgctgcgggctggatgtgctgaaccatgaccgggtggatgagcttccgctggcggtggtaggggctgaaccagccagtgacatacctgttgccctccagcagcgcatccacagagctgcgcagatggaggctgacttgtgtgacaagggcaaggatgttgctgccagggaaggagccggccccctccctgcggagagccctgctgagaacagctgtctccacgggcgggggaaggggaggggaagaaggggacagggagggctgcagggtgcttgcctaacagggtccgttttttccaggctggaaatcccgagaaggttctccactttcgctttaac

SEQ ID NO: 65508 - DNA, 4033 bp, Homo sapiens
accgacggcgcggcagtggccggcaacccgggctcggattacttcccaggagggactgctcctggggccccaggacccggaggcccgtccgggaccagtagcagcggctccaaagcctcggggccgcccaaccctccagcccagggggacggcaccagcctctcccccaactacaccctggaatccacgtcggggaatgacggcaagccggtctccgggggcggcggccggggacggggtcgcagaaaaagggacagtggtcacgtgagccctggcaccttctttgacaagtactcggcggctccggacagcgggggcgcacctggggtgagcccagggcagcagcaagcgtcaggcgcagccgtcgggggaagctccgcaggcgagacgcgcggggcaccgacgccccacgaaaaggcgctcacgtcgccatcctgggggaagggggctgagttgctcctgggggatcagccggacctcattgggtccctggacggcggggccaagtcggacagtagttcgccaaacgtgggtgagttcgcctcggacgaggtgagcacgagctacgccaatgaggacgaggtgtcgtccagctctgacaacccccaggcactagttaaagcgagcaggagtcccctggtgaccggctcgcccaaactccctccccgtggggtaggcgccggggaacacggaccgaaggcgcccccgcccgccctcggcctgggcatcatgtctaactctacctcgacccctgacagctacggcggcggtgggggcccgggccatccgggcactccgggcctggagcaggtccgcaccccgacgagcagcagcggcgccccgccacccgacgagatccaccccctggagatccttcaggcgcagatccagctacagaggcagcagttcagcatctccgaggaccagcctctggggctgaagggtggcaagaagggtgagtgcgccgtcggggcctcaggggcgcagaatggcgacagcgagctgggcagctgctgctccgaggcggtcaagagcgccatgagcaccattgacctggactcgctgatggcagagcacagcgctgcctggtacatgcccgctgacaaggccctggtggacagcgcggacgacgacaagacgttggcgccctgggagaaggccaaaccccagaaccccaacagcaaagaagcccacgacctccctgcaaacaaggcctcagcatcccagcctggcagccacttgcagtgcctgtctgtccactgcacagacgacgtgggtgacgccaaggctcgagcctccgtgcccacctggcggtccctgcattctgacatctccaacagatttgggacattcgtggctgccctaacttgaatgacaagaaagatcccctcctctaccaggcccttcctctccccctgtctgtttccttccccctcaaccttaccccacccctctgttaatttgaaagggccactattgctgagtggatgagttttttttttttcctctaggttggtacctgcttagtggcatatggaccggaaagggttaatttaaagggggggaacctcaaaagtttttttaaaaaagaaacttgtctgccacagtatgttaccagtgttaacccttctgccagttagcaaacttttgccttaagcctttttcctctaggatactccccatgtttcggtaatcttgggcatacattttttaagatggacctctttgccttgttttgttttcatgctgctgtatgtccaagtattgttaatttcataataagacaagagttgctttcttttttattctttttccttttcttaccccctccccttttattttctttttgctttgttcactgcttattaaaatggaaatcctggagaatagtagttctggaatattgccgggtgaaagtccaattgtcatcacaatgttatatattgacaccccagtgtcatcagtcaggcaggagccaaacaatgaatgcccctcttaggtattccgcctgggattttgttttgtctgttccctaagaaaatatattttcattcctgcaaacacagtgctcagccttcagttcccttccacttgagttctctcttctcctgctggaagccgcccctctctgcgatggacgtgaggacgtgtccagctctgctctgtgggaaggagttggaatgttcgacagcagtgttttctctccttttctgggcctcctcgcaaatgcccaggccctgcattttcacgctgtgctaaagcagcctttggtctgcatgggggatggtgtgctcccagcctgcagtctttgggagcaaggctgcttgcccgtggccttgggtgctggagttggagggggctattctcagccctttcccttttctgaaagctgttcctggccgggcatcccagggaagaaggaggggactgcgtgtatctcctccacctctcccattccatccccagtccagcctgggcaaccccacccctgggagggatgaggcaccctcttgctcagcctgctcagccttctctgagcctttgcagggatctgcagactcctgagggctagaggacagagaaagagaatagaatgaaatgactttgattcctgcgccttttagttttgaactctggaattcctctgccccctccccaacatttttttggaatctcaccctattgcaaaactagagccatgtcccaagcatctcacaaaggaataactgctctgagcagagatgagtggtggttggcaggggcaggcaactttgggtgctgctgatgcctgcaaaagccatttatggcttgtggtggggggcacataaattccccggtgggttagacaggaagtaactgatatcacttcacccaaatatataaccgtgatggttatctatttaatttcagtttttgttaacgagcgtgtcttactaaaacgctccactttgagctcccccaccccctccaggtcctcagagtttgcagatctgggctttctaaagcaagtgacctgaaggctctgggctcaccatacaacacccacgttgtttatttcaaagaacttttcagcgaagggagaggagctttcagaaaaacctcactctttcccctcccttctcccctctttccttctgccggtccttttggctggggtctgagtctgcggttctcgcctgggcagtcttgacgaggagcaaaccccgccttcagagggcagacaaagcaggtggcatgaattgatcagcgagaaaggtgtgagccgaggcagttcctgcgttctgctacaaaaggaatggaaagggaagggaatttccccccaccatgggctgtgggagagttgaccgtattctgggcaagactccatgacccctctgattctgcagtgtacagctgtttgagagcctcatcattttacttttgaaacaggaatgatttctccttaattgcttaaggccggggagcaaagtgtcttaacttctgtctttgactttcccagcgttgagtcatcaacactttgccaattagctcatggtcctggcaacctcagaaacccctgaagttttaaaaactttctcgctccccacgaccccagaatgaaacagctttaaaaatagccttaagcaaaaggatgttatttcattaaatttggtttaatggaaagaataaaagtaaatgaaaaacacaccctacacactagactccgaacactggtaatcagtactgcatagcaaactctttgggaaagaaaacgaaaatgttattgcacatgtaaaatatgaaaacttaactctgctgtgtgttaggcaatcctgtaatcttttttgactcttaaaagaaattcatttctgaaatgcttggttggaagactgtgacaatagctcatgaaattgagtgttatttttttctttcttttttaaaaaaatatgtaaagtgcagtcttctgtattcctgcatattgtatatacctgtatatgttttcctgagcagttaaataacaataaatatgacgttaatggtgaaaaaaaaaaaa

SEQ ID NO: 65509 - DNA, 2259 bp, Homo sapiens
cggagctaaaaccagattctgaggacttatcctcccagtcctcagcttcaaaggcatctcaggaggatgccaatgaaatcaagtctaaacgggatgaagaagaacgagaacgagaaaggagggagaaggagagggaacgagaaagagaacgggagaaggagaaggagagagaacgagagaagcagaagctaaaagagtcagaaaaagagagagattctgctaaggataaagagaaaggcaaacatgatgatggacggaaaaaggaagcagaaattatcaaacaattgaagattgaactcaagaaggcacaggagagccaaaaggagatgaaactattgctggatatgtaccgttctgccccaaaggaacagagagacaaagttcagctgatggcagctgagaagaagtctaaggcagagttggaagatctaaggcaaagactcaaggatctggaagataaagagaagaaagagaacaagaaaatggctgatgaggatgccttgaggaagatccgggcagtggaggagcagatagaatacctacagaagaagctagccatggccaagcaggaagaagaagcactcctctctgaaatggatgtcacaggccaggcctttgaagacatgcaggagcaaaatatccgtttgatgcagcaattgcgggagaaggatgatgcaaatttcaagctcatgtcagagcgtatcaagtccaatcagatccataagttgcttaaagaagagaaggaggagctggcagaccaggtgttgactctgaagactcaggttgatgcccagctacaggtagtaaggaaactggaagagaaggagcatctgttacagagcaacattggcacaggggagaaagagctgggtcttaggacccaagccttagagatgaataaacgcaaggcaatggaggcagcccagcttgcagatgacctcaaagcacaactggagttggctcagaagaagctacatgattttcaggatgagatcgtggagaacagtgttaccaaagaaaaggacatgttcaatttcaaacgagcccaggaggacatctctagacttcgcaggaagctggagaccacaaagaaaccagacaatgtacccaagtgtgatgagattctgatggaagagattaaggattacaaggcacgcttgacctgtccgtgctgtaacatgcgtaaaaaggatgctgttcttactaagtgttttcatgtcttctgctttgagtgtgtgaagacacgctatgacacccgccagcgcaaatgtcccaagtgtaatgctgcttttggtgccaatgattttcatcgcatctacattggttgatctaagtcaagagaagaagaggagctggctagtcaggaacttattcattaaccaccaaacctctacctcttctctccttgactgtcacctgtaggacagtttatcagtcaactacctttcctccagactttacttccaggctctcctcttcagtagctggatgactttagcagaaaggactggtaaatacaagccttgggtttcagaatgaattagaaacaaataactcttactgtcttccctcccagctttgtttattttgtgcttttagacttttcagtgttttctttttccagcccactgtataaacttggattgtccattcctcctgaagaaatcaagttggtatttttgatgtggaaaagggaacaaaagtggaaacatggctacttttggggagtgatattttaaaaaataagttgtctatgggcacaaagttttcttcatttgtgtagcaaacttcttgtgaatgtggattacaaaatggtataattgtgctactctcccctgggtggtttgcagccctaatgaaattatgtctaggatgattcagtctatttcccatttactagcagagtaacttgttaagatcagctggctttcttgttaaagttatttaagttttgaatgctctactacttcaagtctttaaatttcttgagactagaataattttaaataatatgaccctttgtcttctaatgaaataaagattgaagaggttgagtcaggactgagctggtgaagaaatcttgtgggtattctggaaatttgatacggagagaacttggtgagctatgaattactctcagtctcctttttacagggttgttgtgatccctcttttccagaaaattctgtggaatgtttctgtaggactttgttctccacaagcttgaattaaagcaggattcagtttgcaaaaaaaaaa

SEQ ID NO: 65510 - DNA, 1203 bp, Homo sapiens
ggaattcgttcctcctggtctccagaacctccagcctcactctctccattgccggcatttttaaggaagtctgcactttgctgttggcagctcatctgctgggcgatcagatcagcctcctgaactggctgggcttcgccctctgcctctcgggaatatccctccacgttgccctcaaagccctgcattccagaggtaacccagagtcccttccagaagcctctgttttctgttcttctccctgtgactcttagtgattctgatgcaggaagtgtgcccggtggctctgctgccgtcactcctctaggaagatgtgggggtcatctccagagtgggtgggtggggcctgggtgactcagcacacatgcaaatcagagcaaaccaagaaaaccacgactgggcctgtaactgtggtctctctctatcccaaggtgatggtggccccaaggccttgaaggggctgggctccagccccgacctggagctgctgctccggagcagccagcgggaggaaggtgacaatgaggaggaggagtactttgtggcccaggggcagcagtgaccagccagggcaaatggcttagaagcaggccactccccagcctgctgccagcactcactgtgctcaagccgccagggctcatcatggtagctgggagctgtggacgggagtcaccaggtggtggggccaagccagggactcatgacttttgcccctcccttcagagcctggtcacacaaggggcgagcaccaggccagcctgggactggccagagctgggcccaagctgcgctggaatcgcagcaggagaggggagtgggctggttcttcccaccacttcccaggctctgacagccgagactcatttccaaggcacagcagctttctaaagggactgagtttggactgggttttggacctccaggggctggagcttcatcacctgggcagtgtcttttctcagagagcaggtttctttatagtttggaaataaatggttcacggtccactggccgccttgtgttgctggagacgtgggggcagggaggggacagtgtgggcctggcctctcctttcctttccctgcctggagccttcttcaaatgtctggtcttaagccaggcctccttcattttctcgctcctgttagaacaccagtcccctccccaggggggccccactgcacctgctggcaggaaata

SEQ ID NO: 65511 - DNA, 4826 bp, Homo sapiens
ttttttttttttatggtttgctttataaaagttactataatacaatggtacatagtattgaattcacaaaaatatgaacaaatatttacatcaagacacacaacggaaacacttctcttcaaaacaagttacatatggatgatggagtctacccgcacaaacatccctaaaactcattggttctcatctttgcagggggagggagagaaagcaaaaaatagcagaaacccccaactcttgaaaagcagagatttgttcaatgaaaaatgagggagttgaaagaaaaatgactcgacacatatcttgattattgcaaacccactctggggctggggctcctggggagagggaggtctagtccccttagtgaaggccagccgaggttaacactgggcacgatggctgggagcaaggtgaggccagggggaggggtgaggcaagggtcccttccctggtcttctcgaacacccccacttcttttatgggaaggggacagaatggagacagccctttggaggctgtacatgtaacttgaatcagccgtctctacaagctacgcatttcctcatgtgaaaaataaattatttcctcagttgcacaattaggcagaaaaccgcaaacggaagagaagttcgccgctgtgcccaggtaccccatctgtgtcttgttgccaccaatttccttgatcttgaaaccggcgggcacagtctcaaatagagagggcctgggggaaaggaataaaaaaaaaaacaacaaaaaacacacaacaaaaccaccaacaacaaaaaagagaaaaataacaattctttgtacagaatttacatgataacaagcttgacacaagctgagataccagaggctccggccgcctgcgtccgcagggtgggagcagctccctcatggagcgcgctcatcttgatgaggactccgggtcacaacagtcactttccagaaattatttacacgcctcctctgctttctggggtacggggggacttgcttttgtcttttttttccttttttttttggaagtacaaagaaatgagcaaaaaatgtcttcccgcatgtttctacaagaaacaatgttcccaagagaaagtcctttgcggcagcctctatatacagaagttggttctgaacttcaaaaacctttttccccttccttttgattttatacacgcacaagaaaaaaaaaagccatgggaataaattctgaagagatgggaagggggtccaaaagggaaaaaaaaaccgtcaaggcttagatttgtggttttaaaatcttttccaagattttcctttctctgggagaagtaatctgctccctccgaaaataaatatgctctggccttcttaggttgaggggctgccggtaagggggatgtggggtgtgggttgggggtgagtgggtgaagcttataagccaaaaaatgccacacgcagacggtctgacaacccgtaatggcgggactgggggacccgcctgcccttgggagccctgtcccacccagggcgaaggcaagggcagaagagagtggctgcccgcgttctcagcgcccctcacctgcactggggcctccgagaggctcccgcgttgctggcatccgaatgagaaagtaaacattgaacccaaggtttagggggtgctggggtgtgaggtggcagggaaagcccagagcggagacccctgcctgggacagcttagctccatcagggtccaccgggtcagtggtgccccaggcctctggggaaggaacaggctgcagctcgggtggggaaaggtgtggggtctcctcactgtgcccacgggcagtgaggggcgctttcagggcgtagtgttctgaggtcaaggccgtgggggcctccatccttcccacagcacctggccctgcgtccaggtccgggtggcttccaggacacgggccacgcacagccacactgaggcctctgcagacccccgcggggcccctctctgattccaccttcacatttcaacggttaaatgtcttttctcacaacgaggaaaaaaatagagaagacaaaacaacgtagcagcattcacaggaagaggccgagggtgatggtgggagagagaagagacagagaagagagagaggggaggagagacggagagagagaagctgatgctggagttaaacagaaatcctgaaaggggcgtttgttaaaatgagagagacgtgggctgaacgacagagaagccctttcccgcggaggggccggagccaggggctccagggggtagtgtggggcgccaggccctgaatggccgctgggtagaggacagcacctgaaatgggggcgggcgcggggggccgggccccggggccaggggctccacgctcgggagtcccagggctacggctgacatcctttgagtctggtgccggggcctagttgagggtcccccggcagttctcggagccacagaggcaggggatcttgacgtcctcgatggggaacttatagtcataggtaatctcctcattgacgttaatgtgctgcttcgagtagatgactatcttcttctgtgactccaccgtgatcaccttggcatagcagttggggttgcagctgtggttgatgaagcgcgcgaagttgccgcacttggtggcgtcgatgatggtgtcatggtccacccggaacatgtagctgctcccgatgccctcgtcctcataacgcttctcccgcatgtctgcgatcacctgacggatattctggcccacgtactcgatgaccatctcgtcagccgcgatgggctccatggcgaacaagccccagtcgtgaatgtggctcttgcagaacttgagctttttcttccggaacttgagctggttgaacttgagcaggtcactgtcacagctgccagtgaaggaggacagcaggcggcgctgcttccgaacgccgctccgagcctgcccgggtggaggcgtggggctgtgctgggatgctcatgccctgggtgtctgcggggggctcatcggtgctggcacggctgctgttgaggtatctgagcttgtccttcttgtcgatggtgtagaagccctcactgcgggcacagcccgtcacgtgctcgcggatgccatcgtcccgtttcttcttcttagctgaagagaggctggtggagggatggtagacccagagcgtgtcgttaagccagtccatgccattgtcctgctgtagcagtcgctcgtaggtgacacacaggaagcggatgtcctcctcatcgatgccaccgttccagatgtcatacaggatggtcatctcctcaaactccgagcggggccggaagaggggctggggtggcgagagttcgggcgagcctgcaggtggcaccaggtcctcatggcgcttcttaggtggccggcgccacggcccccggctcttggccaactccatgtattcctcagtgacctcatcgcgcccacgggggcccggaggaatggcctcggagggccactggttgtctagctccttaaagggcagcttggtgggctctacaggtgggggaggtgggggtgggggtggctgggggggaaggggtggtggaggggctgggatccccgcgttccggaagtccagggtcaccgtccgggggtcatgggtgctggggaagacgggggtctgtggctggcccggcaggagcaggagttcccttccaagggcggcccctgctggtggtcggaccaagggcccatccaaggagagcatagatggtggggatcgccggggccggcccggcttcctcttcattgggggagggcaagaggccaggggggcgggcagcaggggtggcagcggggtgggcgcacgagcctgggcccgcaagacggcgggcaatgccaagggcaagggcaggggaggggtagagggaggggcaggcccgtctccaggagcaccggggaggccaggggcccggagcgttcatcgcgtcggccagtggggagtgggcagacgggcaggagcaagggcccgctgggctcggagaaggtgggtgtgaagctgaagtcccggccaggtgtccgagggaggcccccactgctcaagctaggggacggggctgggtaggagaaggggctgccgggcacttgcggagagctcagggacaggccactgctgccccctgatagcgggggctccccgcctggtgtggctggcaccgtctctgtgctctgcgacttggccaggctgccacagaggcctggagtatgcggggggtggtcctcggcaaggggctccggagggacagatgggtgtgaggcatctgtggtctcaggctccggcggtgggctgggtggccggggtggtcgtgggggcggcaatggtggttgcagcggcaaggggagcatcatagggggctccggctccacttccaggtcatgttctggagctcgctcaggggacaatgggggtcgagcctccacctccttggcagggggctctggagacagcaacatggccccttcctggctcaggcctggttcctcaggcggctccctggagtccgctggctcttcaacacccacaggcaaggggggctcgtccagcatggagggccgctcctcaggggccacagcctcagtctcgatgtccacctcctcttccatgcccaacgagtccactgcaggtgcccccggggccagagccgcttcctccccgtcctgctcaaagtcctcagggcctgcagaagccatgctttcctcggccaccatctcctcctcctcctcttcttcctcctcttccctggccactacctcctcctcatcctccgaggatgagggcgaggactcggagcttgactcaaactc

SEQ ID NO: 65512 - DNA, 818 bp, Homo sapiens
ctgatcggacatggtacattcttgagagccactaacaatatggaacaggatcacacatctgctcccttattgttaaagatgagaaaaccctaggagagaaacctttcaaatgtgatgagtgcggaaaggccttcaggcacacctccagcctctgcatgcatcaaagagtccacacaggagagaaaccctataaatgttatgagtgtgggaaggcgttcagtcagagttcgagcctctgcatccaccagagagtccacactggagagaaaccctatagatgttgtggatgtgggaaggccttcagtcagagttcgagcctgtgcatccaccagagagtccacacaggagagaaacctttcaaatgtgatgagtgcggaaaggccttcagtcagagtacgagcctctgcatccaccagagagtccacacaaaggagagaaaccatctcaaaatatcagttatataaaacgttttgctaagagtttaaaatcttaaaacccataagtgccactaggaaggaaaccctgtatatacctacattgacccaagaaatatttacgcaatccctagcagaacattgtttctgaggaggcatatgtgagattgatttgttggttcatgccaagtgtgttccacaggttgactttgaatgtggacctctgagcatccacgcaggatggctctcaggtcccagtcacagacgtcgttttctgggatttcagcacgatgcctccatagttgaaagactacacaaaaagccacaatcattgcccggcctcctgagtcaccttctatctatactttgcttaaaagctattcc

SEQ ID NO: 65513 - DNA, 4364 bp, Homo sapiens
gcgcagttagagccgatctcccgcgccccgaggttgctcctctccgaggtctcccgcggcccaagttctccgcgccccgaggtctccgcgccccgaggtctccgcggcccgaggtctccgcccgcaccatgcggctgggcagtcctggactgctcttcctgctcttcagcagccttcgagctgatactcaggagaaggaagtcagagcgatggtaggcagcgacgtggagctcagctgcgcttgccctgaaggaagccgttttgatttaaatgatgtttacgtatattggcaaaccagtgagtcgaaaaccgtggtgacctaccacatcccacagaacagctccttggaaaacgtggacagccgctaccggaaccgagccctgatgtcaccggccggcatgctgcggggcgacttctccctgcgcttgttcaacgtcaccccccaggacgagcagaagtttcactgcctggtgttgagccaatccctgggattccaggaggttttgagcattgaggttacactgcatgtggcagcaaacttcagcgtgcccgtcgtcagcgccccccacagcccctcccaggatgagctcaccttcacgtgtacatccataaacggctaccccaggcccaacgtgtactggatcaataagacggacaacagcctgctggaccaggctctgcagaatgacaccgtcttcttgaacatgcggggcttgtatgacgtggtcagcgtgctgaggatcgcacggacccccagcgtgaacattggctgctgcatagagaacgtgcttctgcagcagaacctgactgtcggcagccagacaggaaatgacatcggagagagagacaagatcacagagaatccagtcagtaccggcgagaaaaacgcggccacgtgggagcatcctgggctgtcctgtgcctgcttgtggtcgtgggcggtggccataggctgggtgtgcagggaccgatgcctccaacacagctatgcaggtgcctgggctgtgagtccggagacagagctcactggtgagtttgccgtgggaagcagcaggttctggggggcccaggggaggcttggctgccagctgtctttcagagtttcaaaaaactttcagaaggcaaaagtcccttgccttgaacaactgttgttcctggagacgcagcgaagccctcgatggtgcgcacggcatttcctgcagcctccccttggcatgggatggcatcctggtgtgcactttgtcacactgcgatgggattttcccaacatgcacagaagcagagagacgagtgctagacccccgcgctccccagtgcccagccccgaccagggtgtccagggcgggtccaggcaccggcgcccagcccccatggggtgtccggagtgggtccaggcaccggcgcccagcccccgtggggtgtccagggcgggtccaggcaccggcgcccagcccccgtggggtgtccagggcgggtccaggcaccggcgcccagcccccatggggtgtccggagtgggtccaggcaccggcgcccagcccccgtggggtgtccagggcgggtccaggcaccggcgcccagcccctgtggggtgtctggagcgggtccgggcaccgccagcttctctctgtggcagccactcctgcagctctcgtttgcccctcagttccaggagcaacatagatgtggattcctgtccaatttgggaaaaatgtccacacacggtcacccacctggcaggtgcctctggctgcaaggggcgctgggcttcgcaggcaggccagccgggctccccgccatgggccaggatcccctccgagccctgtttgccgcccaggagaaggggttccccggggacagtgggctcagggtgtgcgcagccaccacgctgtggtgtcacctgtggacccaggcgagctgatggccgaccgcagaaacgcacttccaaggccaggtcggcccatccagatgatgcaggaacacagcttgctaaaaacacggccggcctgttcccgtcggagccagtcgaagttccctgaacaggccgctgtttccgaagctttaaaccctgtgtttccaccaagctgagtcctgagaaaaccggcgtctgcctgcagaagggaaaggggtgcttcatgttcctctctctccttcatctcccttccaaggccacgtttgaccggagctcaccgcccagagcgtggacagggcttccgtgagacgccaccgtgagaggccaggtggcagcttgagcatggactcccagactgcaggggagcacttggggcagcccccagaaggaccactgctggatcccagggagaacctgctggcgttggctgtgatcctggaatgaggccctttcaaaagcgtcatccacaccaaaggcaaatgtccccaagtgagtgggctccccgctgtcactgccagtcacccacaggaagggactggtgatgggctgtctctacccggagcgtgcgggattcagcaccaggctcttcccagtaccccagacccactgtgggtcttcccgtgggatgcgggatcctgagaccgaagggtgtttggtttaaaaagaagactgggcgtccgctcttccaggacggcgtctgtgctgctggggtcacgcgaggctgtttgcaggggacacggtcacaggagctcttctgccctgaacgctcccaacctgcctcccgcccggaagccacaggacccactcatgtgtgtgcccacaagtgtagttagccgtccacaccgaggagcccccagaagtccccactgggcttcagtgtcctctgccacattccctgggaggaacaatgtccctcggctgttccggtgaaaagttgagccacctttggaagacgcacgggtggagtttgccagaagaaaggctgtgccagggccgtgtttggctacaggggctgccggggctcttggctctgcagcgagaaagacacagcccagcagggctggagacgcccatgtccagcaggcgcaggcctggcaacacggtccccagagtcctgagcagcagttaggtgcatggagagggtatcacctggtggccacagtcccccttctcacctcagcaatgatccccaaagtgagaggtggctcccccggcccccaccaccctcagcagccccaccccactcaaccctgagggtccccagggtcctgatgaagacctccgaccccagcgccaggctcctcggagcccaacagtcccaagggggcagtgctgaggggtacagccctgggccctgaccagccccggcacctgccatgctggttcccggaatgaatcagctgctgactgtctccagaagggctggaaaggatgctgccaggtgacccgaggtgcactcgccccagggagatggagtagacagcctggcctggccctcgggacacattgtctgccccgggactatgggcaaatgcccctccttcttacttcccagaatcccctgacattcccagggtcagccaggacctgttacagccctggtcacttggaactgacagctgtgtgaggcctgcacttctcagacccagacttagaacaaaaggaggagtgaggactcaaggctacaatgaggttccagtacttgttacaagaaattggttttctgcaaaaaaagtccctacctgagcctttaggtgaatgtgggatccactcccgcttttaacatgaaagcattagaagatgtgtggtgtttataaaagaacagttgtcatcaccgggcattgattggcagggacaaggagctgcttgggtgtggaaagttggggcgttggaaagtgggctgtggtgcccatttgcagtgactgtgaagtgactccaggacggacctgcgggggcacccagaggtcctaagccccaggactgagggtcgtgcatcaccactcgggtgtcccgggaggtgccctgggcccggggacctcacaggcaggacggcgacactaatgcagggagagggagtctggccccagcttttcctatcagaggcgattttccttcaccaggggatgggcaggaaagaggcaggggccccagaagcttctgtccctcatgcctgagggcacgggggacacttggaggctgctgtcaccactgtgcgtccaaggccatgctctctgcgggtcagtgcctgagtctcgcctccctgctggtccctgaagccccctcagaagccctgcctgtcacgtcggcatttgtgagacctaccctgtaacgcctgcccctctcagcccaacatcagcttcctctttctcccttgctgtagacaggctggattccagtgttgggacagccatctccacaaacctgacttaagagagtaagatgcaaaaaaaaaa

SEQ ID NO: 65514 - DNA, 541 bp, Homo sapiens
tttcgtgcgaggcccgggcagcatcggcggcgtggtcagagcgagtctcggagaagatgtggtggcttccgtttgttggtggaggaggtggcaggcctcggcgggtaacccagagaacacagccgaagtggaatgtggggacgtctgcgacaccggggacagagcaactgtggatgaagagggctacatctggttcctggggaggagtcatgacactatcaatgcctctgggtggtgaaggcattgattgtcctgaccccacagtttctgtcccatgacaaggaccagctgactaaggagctgcagcagcatgtaaagtcagtgacagccccatgtattgggtgttaggaatccataatacagtgaacccataattgactgcaagcatcactttcaaagcatcatttcaggatgagaatttaagtgccaagtgaattcaaggaacagtgcaaaggatccatggcctcagtcaccatgaagaccctcccaagagccagccctactgggaacatataaatgagtggagacctggaatacgaaa

SEQ ID NO: 65515 - DNA, 798 bp, Homo sapiens
tttcgtagcaaacaggtttcacgaccactgctctctggagtcttattcctcagagtatgagcccttgaccaaggagcatggaatgcatcacctatgtttgaacaagggcgccagatgacctctgcggacccagggtttgggaagtgctgatgtggagccacaggacttgttttagggcgtgtggggcgtgtgtgtgagtgggcttctgcaggtgggcagccagcgggcacaggcgtggagagcatggtcacccatggagacaccgctcacggggactttcctttggccccacatcccgcagggtctcttcttcgatgattcctatggcttctacccaggccaggtgctcattggccctgccaagatcttctccagcgtccagtggctgtcaggtgtcaagcccgtgctcagcaccaagagcaagttccgagtggtggtggaagaggtgcaggttgtagagttgaaagttacatggattaccaagagtttctgtccagggggcacggacagcgtcagccccccacgtctgtcatcacccaggaaaacctaggcagggtgaagcgtctcggatgctttgaccatgctcagcggcagcttggggagcgctgtctgtatgtcttcccagccaaggtagagccagccaagattgcctgggaatgtccagaaaaaaactgcgcccagggggagggctctatggccaagaaggtgaagcgcctgttgaagaagcaggttgtgcggatcatgtcatgctccccagacacccagtgttcccgggaccattccatggaagacccagac

SEQ ID NO: 65516 - DNA, 1708 bp, Homo sapiens
ttaaaagtcacactagataagacatctttattacttaatctttaaaacaggtcactgtgcctattcaattctgaaactgtttgttttctttccctcccccgcactcccgctctgatacacaaacttgttgtaaaaataatgcagaaacatatacgtcaatctaagtctctgaaatatggccaactctacctcgccgtatatccaacattaaaaagaaaaaaaaaggctgtttaagaatagaactcattcccggtttccaccaaattatttccctaattcttaaatcctcaaataagttcttaatctccaaagtctcggttgtgggaaaaacattaatttgtgcagtccaacacttacatactttcttgacggaagggcaatcctgtccctttaaactcaatgaaggcagcggccaggtccttctgagtccccgtataattgcctagaacttaacatttagtattcatagtccttggtttacagacgggtccgacagttagaaactattacttcctcctctttcctcctgggcgctgtcctccttttctcttgccacccaagccaggcggcccagaattcatcttgcctcccaagccccctttcctcttccctccctggctgggcgggccccctttcctcttgcccccaggcccctgccggcctccctttctcttgcccttctggctcattttcctcctcttggcggcctcctcctggtcctcctccctcatctgcttattggtggccctagtcacatccagcttgaggcttcttgctgttcatgacacgaagcagctccaactggttctttttctcggctgcaaagtccccgaaaaggggttgaaacttccttttcttgccggagccccggggcaccttctccttggggaggcgctcctgaaagcgccccacagaggcggtggagaccttggccacttgcatggcgcggcccagctcctccttactctggtgtccggtagggtgcaagccggccgcgctgggcagctgcatcttgtgcgcgcgggccaggttacgcagccggttcagctcgttcttggccaccctttccttcttggcctgaatccgcttggcgaactggtcctccaaggggtcggcattgccgggcacctcaatcagccattctttggtgtcgtcccgggcgcgctggtagccccagcgccgccgccactggccactcacctcgtcccacaccaggttggtcttcttcttgggacggatgcccttgaggcgcgcgaactgctgccagcgtgtaagtggcccgcggtcggggcagaggcttctctcgcggcaggcgtgtggtgggctccggcagccgcgccactatcgcctcttccacgcgctccgtgggcagctgccacagctggttgatgagcagttgcgtgttgtcccgcgccagggcctgtagctcggcctccggcgtgggtccggcgcaccgcagcccggtcggggggttccggtccgacgccagcaggttgcccaggtcaaactgcagctccagctccttgtgcaccgtgatgcgttgcaacttctctgcctcgtcctgctctgcctttgcgagcagctcctccacgctctggccctccatggctccggctcggctcactcgctttggggctgcagctgaagttacttttcctacagtggcggcccaaactccggcagcataaccacgtgcagatgccgggat

SEQ ID NO: 65517 - DNA, 828 bp, Homo sapiens
aaccggatgctgtagctcacggacacccccccccccaagacacatatgatccaccattccatctctgactataaggccaccctgaggtgctgggccctgggcttctaccctatggagatcacactgacctggcagcaggatgaagaggaccagactcgggacatggagcttgtagagaccaggcctgcaggggatggaaccttccagaagtgggcagctgtggtggtgccttctggagaggaacagatacatgtgccatgtgcagcatgaggggttgcccgagcccctcaccctgagatgggagcagtcttctcagcccaccatccccatcgtgggtatcgttgctggcctggttctccttggagctgtagtcactggagctgtggtttctgctgtgatgtgcaggaagaagaactcagatagagtgagctactctgaagctgcaagcagcgaccatgcgcagggttctgatgtgtctctcacggcttgtaaagtgtgagacagctgccttgtgtgggactgagaggcaagatttgttcacgccttccctttgtgacttcaaaaaccctgactctctttctgcaaaggcacctgaatgtgcctgtgttcctgtaggcataatatgaggaggtggggagaccaacccacccccatgtccaccatgaccctcttccctcatgctgacctgtgttccctctccaataattaatcattcctgctccatagacgtgaggctgagatgtctccatctctgtctcaactttatgtgcactgagctgtaacttcttacttccctattaaaattagaatctgagtataaaaaaaaaa

SEQ ID NO: 65518 - DNA, 4530 bp, Homo sapiens
tttcgtgacagtagcccctgctcggccttcgagttccactgcctaagtggcgagtgcatccactccagctggcgctgtgatggtggccccgactgcaaggacaaatctgacgaggaaaactgcgctgtggccacctgtcgccctgacgaattccagtgctctgatggaaactgcatccatggcagccggcagtgtgaccgggaatatgactgcaaggacatgagcgatgaagttggctgcgttaatgtgacactctgcgagggacccaacaagttcaagtgtcacagcggcgaatgcatcaccctggacaaagtctgcaacatggctagagactgccgggactggtcagatgaacccatcaaagagtgcgggaccaacgaatgcttggacaacaacggcggctgttcccacgtctgcaatgaccttaagatcggctacgagtgcctgtgccccgacggcttccagctggtggcccagcgaagatgcgaagatatcgatgagtgtcaggatcccgacacctgcagccagctctgcgtgaacctggagggtggctacaagtgccagtgtgaggaaggcttccagctggacccccacacgaaggcctgcaaggctgtgggctccatcgcctacctcttcttcaccaaccggcacgaggtcaggaagatgacgctggaccggagcgagtacaccagcctcatccccaacctgaggaacgtggtcgctctggacacggaggtggccagcaatagaatctactggtctgacctgtcccagagaatgatctgcagcacccagcttgacagagcccacggcgtctcttcctatgacaccgtcatcagcagagacatccaggcccccgacgggctggctgtggactggatccacagcaacatctactggaccgactctgtcctgggcactgtctctgttgcggataccaagggcgtgaagaggaaaacgttattcagggagaacggctccaagccaagggccatcgtggtggatcctgttcatggcttcatgtactggactgactggggaactcccgccaagatcaagaaagggggcctgaatggtgtggacatctactcgctggtgactgaaaacattcagtggcccaatggcatcaccctagatctcctcagtggccgcctctactgggttgactccaaacttcactccatctcaagcatcgatgtcaatgggggcaaccggaagaccatcttggaggatgaaaagaggctggcccaccccttctccttggccgtctttgaggacaaagtattttggacagatatcatcaacgaagccattttcagtgccaaccgcctcacaggttccgatgtcaacttgttggctgaaaacctactgtccccagaggatatggtcctcttccacaacctcacccagccaagaggagtgaactggtgtgagaggaccaccctgagcaatggcggctgccagtatctgtgcctccctgccccgcagatcaacccccactcgcccaagtttacctgcgcctgcccggacggcatgctgctggccagggacatgaggagctgcctcacagagggttgaggctgcagtggccacccaggagacatccaccgtcaggctaaaggtcagctccacagccgtaaggacacagcacacaaccacccggcctgttcccgacacctcccggctgcctggggccacccctgggctcaccacggtggagatagtgacaatgtctcaccaagctctgggcgacgttgctggcaagaggaaattgagaagaagcccagtagcgtgagggctctgtccattgtcctccccatcgttgctcctcgtcttcctttgcctgggggtcttccttctatggaagaactggcggcttaagaacatcaacagcatcaactttgacaaccccgtctatcagaagaccacagaggatgaggtgcacatttgccacaaccaggacggctacagctacccctcgagacagatggtcagtctggaggatgacgtggcgtgaacatctgcctggagtcccgtccctgcccagaacccttcctgagacctcgccggccttgttttattcaaagacagagaagaccaaagcattgcctgccagagctttgttttatatatttattcatctgggaggcagaacaggcttcggacagtgcccatgcaatggcttgggttgggattttggtttcttcctttcctcgtgaaggataagagaaacaggcccggggggaccaggatgacacctccatttctctccaggaagttttgagtttctctccaccgtgacacaatcctcaaacatggaagatgaaagggcaggggatgtcaggcccagagaagcaagtggctttcaacacacaacagcagatggcaccaacgggaccccctggccctgcctcatccaccaatctctaagccaaacccctaaactcaggagtcaacgtgtttacctcttctatgcaagccttgctagacagccaggttagcctttgccctgtcacccccgaatcatgacccacccagtgtctttcgaggtgggtttgtaccttccttaagccaggaaagggattcatggcgtcggaaatgatctggctgaatccgtggtggcaccgagaccaaactcattcaccaaatgatgccacttcccagaggcagagcctgagtcactggtcacccttaatatttattaagtgcctgagacacccggttaccttggccgtgaggacacgtggcctgcacccaggtgtggctgtcaggacaccagcctggtgcccatcctcccgacccctacccacttccattcccgtggtctccttgcactttctcagttcagagttgtacactgtgtacatttggcatttgtgttattattttgcactgttttctgtcgtgtgtgttgggatgggatcccaggccagggaaagcccgtgtcaatgaatgccggggacagagaggggcaggttgaccgggacttcaaagccgtgatcgtgaatatcgagaactgccattgtcgtctttatgtccgcccacctagtgcttccacttctatgcaaatgcctccaagccattcacttccccaatcttgtcgttgatgggtatgtgtttaaaacatgcacggtgaggccgggcgcagtggctcacgcctgtaatcccagcactttgggaggccgaggcgggtggatcatgaggtcaggagatcgagaccatcctggctaacaaggtgaaaccccgtctctactaaaaatacaaaaaattagccgggcgtggtggcgggcacctgtagtcccagctactcgggaggctgaggcaggagaatggtgtgaacccgggaagcggagcttgcagtgagccgagattgcgccactgcagtccgcagtctggcctgggcgacagagcgagactccgtctcaaaaaaaaaaaccaaaaaaaacccttgcttggggcatcagcagcccttggcctctggccaggcatggcgaggctgaggtgggaggatggtttgagctcaggcatttgaggctgtcgtgagctatgattatgccactgctttccagcctgggcaacatagtaagaccccatctcttaaaaaatgaatttggccagacacaggtgcctcacgcctgtaatcccagcactttgggaggctgagctggatcacttgagttcaggagttggagaccaggcctgagcaacaaagcgagatcccatctctacaaaaaccaaaaagttaaaaatcagctgggtacggtggcacgtgcctgtgatcccagctacttgggaggctgaggcaggaggatcgcctgagcccaggaggtggaggttgcagtgagccatgatcgagccactgcactccagcctgggcaacagatgaagaccctatttcagaaatacaactataaaaaaataaataaatcctccagtctggatcgtttgacgggacttcaggttctttctgaaatcgccgtgttactgttgcactgatgtccggagagacagtgacagcctccgtcagactcccgcgtgaagatgtcacaagggattggcaattgtccccagggacaaaacactgtgtcccccccagtgcagggaaccgtgataagcctttctggtttcggagcacgtaaatgcgtccctgtacagatagtggggattttttgttatgtttgcactttgtatattggttgaaactgttatcacttatatatatatatatatatacacacatatatataaaatctatttatttttgcaaaccctggttgctgtatttgttcagtgactattctcggggccctgtgtagggggttattgcctctgaaatgcctcttctttatgtacaaagattatttgcacgaactggactgtgtgcaacgctttttgggagaatgatgtccccgttgtatgtatgagtggcttctgggagatgggtgtcactttttaaaccactgtatagaaggtttttgtagcctgaatgtcttactgtgatcaattaaatttcttaaatgaaccaaaaaa

SEQ ID NO: 65519 - DNA, 2343 bp, Homo sapiens
  misc_feature (1)...(2343): n = a,t,c or g
ttttttttttttatgtggataatatttatttgtatcttatctatagaacaaatatttacagatacaaacggaatcacagcaaagttgctataaaaccatccagacctctcgatggccacttctgaaaacatccacggtgaagggcagggccaggcctggctgtggagtgggccagctgagtacctgggcgtcagccaagggaaatggttggggattatggcttcagcactctgccggagcacattcctgagcgctgacaacgtggagccctcaccgcccccacctaccccaacctcaatggggaaggaaaggggcctgagctgggcagggctgcccgggctcactatgtgcctgctccaggagtccctggcccctgtgctggcaggagcatccctgagctggaccgggaggcctctctggcctggggctgctccctgcccggcaggctgctgtttggcagctggaggtggcaagagctgctggtgctgccagggcgtgttggccaggaatgagctcccagggcagccctgaggaaagggtcttaggaagcgcctcccagctcactactaggagctggggactgtcagtgctgagtggggctggggtacaggagcacctgcctctcctttctttggcttagaagtggggaaggaagggccaggaaaagggaccaaagccgccccagccttggcccctaggccgcctggggactgtgtgtgtgctgagggggcagtgggaggtgggcagctctggagttccctgcaccctgggatccttgggctgctctcactcccggggtcccagcagggcaaggcctctgcttgggaccagtgctgctcttcctcgctgcttactccaggaggtgaaggtgacagggcggcaaggagaggtaaccacagcatggctggggacaggcgctacactgggccccggacccagcacagggatcacagtgtcggtctcgcgcacacacctctggccacatgtgcacaccacatacatccacacgcacctccctcctgtctggcgggaggctcattctctctcgcagccactcgccctctctgcctctcacatatgcggtcacagagtgaatccgagcatcttattgctgcagggggcaggggcgtcggcatcagggaaagttaatccacgaagagcgagaacagcaccattaccacgatgcccgcacagagcagaagcagctgctgcagggagcgccacgggtcctcttcttccaagaggtcagggagcacgttcaccaaggcgatgtagagaaagccgccagaggtgaagggcaggacccaggctgccgtctcctctactcccttgggggactgggtacagatggcgaagccagcgcccagtaggccccccagcgctgttgagagttgcagcttggctgcgctccatcggtcaaagccggcccggagcaggatggcaaagtcgcccacctcatgggggatctcatgcaggaggatggccatggttgtcaggagcccgatcttcttgctcacaaggaagctggcagccacagccagcccgtgggtgaagttatcgatggtgttggccagcaggttgaggtagccgctgactttgatgctccggaccacggcaccgaggccgggctctgcagccggctgggccagacagtggcctccattgagcgcggcggcagcagcagtggggtctttgttgggggcctggctggtcccctcctccttgctgtccaggaacatcttctccaacgccaggaaggtcaggatgccagcaatgacccacagccccagctgttgctgctgctgcaggctctgcccctcaccaccagggctggcgctgcacgtgtaggcccaggcttcgggcagcagatgcagaaacacattgcccaagagtccccccagggcgaagctgagcagctgcttcaggcgccaggccccagcttctgagcgcagcatggtccccatctctaggggaatgacaagcaacgggaagaccccactgagccccaccatgagggaacccaggagggagcagatccaggtgtccagccgctctccgctcagcagagccccccaggactcgctttccttgttgtccaggcgacaggccgtcgcagtcccccggctccggagggccggctgggaacccccagcccttcccaagagctccagggcaagggcagtgaggaagaggagccttgggcccgccatgccacagccagggcagggacatccaggcatgccacgtacgtgcggcggcggcggcggcgatccgggcggccccagcccgggaattcggtnncggtcgtcgtgcgtacggcttcaatnatcaaanngnggcacg

SEQ ID NO: 65520 - DNA, 1325 bp, Homo sapiens
gggaaagtgagtgctggccaggctggggcggacagaacacttcgacgggctccggagcccagattcagccaggaacccacaggcaactcggcctacccccagctgaggccctttttggacccgcaggggagagatcttaaacccagcgctttggtcccacccacccgctcccacactgggaggagaccatggctccacacacagcccctgccaggcccacaggggcgggcatgggggcccacctgcctcctgcatgtgtggacagggtcctggagagtgaggagggccgcagggagtacctggcgtttcccaccagcaagagctcgggccagaaggggcggaaggagctgctgaagggcaacggccggcgcatcgactacatgctgcatgcagaggaggggctgtgcccagactggaaggccgaggtggaagaattcagttttatcacccagctgtccggcctgacggaccacctgccagtagccatgcgactgatggtgtcttcgggggaggaggaggcatagaccgtccggagcagtggggcctctgccagcccttgcagctgcagcccatccctgggccatgtcccctccatcgagtgcccggtgcttgggggaggagggcagggacagggagggagccacagtcagtgcccgggaacctggaagctgcgctgctctgcgcctctgggcctcactgtggacagaggagtcaggcccgccccaggagcctccagctgcctaaccagtgccattctttcacaacacgattttctacaaatctacagcacaaccgagtttgtaacccgtgggttagtatgaggaccgggttcgtgtactctctgtatctcctcttaagcttcgtccagggttctttatttttgtctgctgccaatgtcgtctcgcatgcctgcaccctcgcatgcacgctgcccgcatgccacgtgccacgctgtagccacagaccccttgctcgggcctcacccaaggccaaactccaaacacaatcagaaccagccaaagaagcacttcctgggcacggccaccagctctcccgcctccagtgtgggccggctcctgcagggtccgagggctgcatctctaccagccagcccagggctcttcccagggtctcgcattcaagggcaattacattttaaaaagaaaaacagaaaaaggttaatcacaaaaccaaccctcacttcacagggtctgtaagtcactcatagaactttgctcttcccgagacagggtcccttccccagctcaggcacaacagagtctggcaggctctggcaccctgggcctcctccgggagcctcccat

SEQ ID NO: 65521 - DNA, 1058 bp, Homo sapiens
cctttgagatcatagtcagtgcggtggaattcctgcaacgctgcctgcagctgccagccagaacactacagccctgtgtgcggctcggacggcctcatgtacttctcactgtgccacgcagggtgccctgcagccacggagacgaatgtggacggccagaaggtgagtggagccgctgcctaccgcccctgtcctcccctggaccctgggaaggggcccccgtgccttccccttgtaatcggagctattgttgggcttcccaggtgtaccgagactgtagctgtatccctcagaatctttcctctggttttggccatgccactgcagggaaatgcacttcaacttgtcagagaaagcccctccttctggttttcatattcgttgtaattttctttacattcctcagcagcattcctgcactaacggcaactctacgatgtgtccgtgaccctcagagatcctttgccctgggaatccagtggattgtagttagaatactagggggcatcccggggcccatcgccttcggctgggtgatcgacaaggcctgtctgctgtggcaggaccagtgtggccagcagggctcctgcttggtgtaccagaattcggccatgagccgctacatactcatcatggggctcctgtacaaggtgctgggcgtcctcttctttgccatagcctgcttcttatacaagcccctgtcggagtcttcagatggcctggaaacttgtctgcccagccagtcctcagcccctgacagtgccacagatagccagctccagagcagcgtctgaccaccgcccgcgcccacccggccacggcgggcactcagcatttcctgatgacagaacagtgccgttgggtgatgcaatcacacgggaacttctatttgacctgcaaccttctacttaacctgtggtttaaagtcggctgtgacctcctgtccccagagctgtacggccctgcagtgggtgggaggaacttgcataaatatatatttatggacacacagtttgcatcagaacgtgtttatagaatgtgttttatacccgatcgtg

SEQ ID NO: 65522 - DNA, 910 bp, Homo sapiens
ttttttttttttcccagctcacacatctttattggcctggatgtggggttgccaaaccagttgcccctgtcctgtgtcagccagctgtggcaatttcacccttattccttggagaggccagctgcctgctggaaggagtcagaagtcggtggatgtcattgaggccttggaggccccagtctggcgggagagaaatccacacctgtgcctggagttctccttccctgaccctctgaaccggcgcttaaaatgctgtcccgcctggaacagggaggccacatccagcagtgcgtcctcaatgtgctgccccagcctgtgggaatccgtttttgtgcttgattttttgctggagatgtggaaggtgatcatgccatcccccatgaagatataagaaacaccataaccatggtcatcagcaggcccgaatccaccgcctgaggaaacatagtccgggtaattgtggacgtcaaacagatgcatttgctgaacagggatctggctggtggacagctgccactgctccgaatggacctgggtcaggaagggcgactgcaggtggaggaatcgggacacgatgtacagcgcaaacaggtggcggtcaactccctgcccgctcatggctgccttcagcagagcctggtgcttgtccactgccacgcggaacagggcgaggcactgtgggtcctgcagtccccagggaggtcacaggtcatggaaagacaggaagtcgacttagggctgggcctgcggcacatctggcctcaactgagtttgccacatccctgcaaggtgggaatatcaaccccattttacagatggggaactgaggcttagagaggggaaatcatttggccaggttcacacagccagggagagccaggcgggttcctaggtgtgtctggccccagag

SEQ ID NO: 65523 - DNA, 1885 bp, Homo sapiens
  misc_feature (1)...(1885): n = a,t,c or g
ttttttttttttaaccccagaaatgtgtttattaagttggaactcgtattgctgtgtggggtcccagtgcacgcgtgtgcacccgtctacaagatccaggtaaagatggcacacggcagacgacgacaggaaggacacctgctccccacccttcccgggaccccgccatgtgcaaaattcgagctggggtctgcagctgcttggagagacccagggcctcttgctccacagcctgcaaggtttgagcagggcaacggccctggggcggtgaggcccccgcctgggtcactccccgcgccccccatgcaggcagtggaggggaggacacgcaggaggaccagacgctaaaggtgtaaacggggcagccgtggcactcctcacctctcaataagataaataactaaataaataaacaactaaataaagacatgaaggaatggatgcagagacgtgaacggatggcgcaggacgtccctggtgggggccacggtccccttaaggcatgtgggaggctgcaggcctctggtggtaggtgggtcagaggctggtggaggacacggacagcgtcggggaggatggcggcgggaaattgagcagctccagcaccgccacacccacactgctgcgccgggtgaacatgcaggatgcggccacccacttgttggtcctcgggttgtacttctcgatggagttgaggctggagctaccgtcgttaccccccacggcgtacaaccatccgtccatggccaccaggtcatgcgtgctcctgcggatattcatgggcgccacgctttcccaggctccagcctttggactgtatctctctaccgagttgaggcagctggtgccgtcgttgccccctgccacgtacagggcaccatccagcacggccacgcccgctgagctgagtaggctcagcatggacgccacgggcgaccacaagttcacttatccacagtggccaggtgtgaggagctgtcgtagccgcccacagcatacaggttcccatcaagcgtggccactcgcacatagcgcctccgggtgctcatggcagcgacggacgtccacgttccggtcagggggtcgtagcgttcagcactgttcaggcaggaggccccgtcatagccgccggccgagtacaggagtccatgcaaggcggccacacccaggcagcttcgccttgtgcccatggacacctccggctgccacgtgttagtcacggggtcgtaggactccacggtagccaggtctgaggtcccatcatagccgcccacagcatagagccggttccccaccgcagccactcccacccgggcccggcgcgtggacatggaggccaccacgtgccagcggtcggtgcgcgtgtcgtaggcctcacagtctccgtggatggcaaacaggctcccgccgcccacagcaaaaagcacaggcccggccccctcgcagcgccggggacgtgtgcggctggtgcctaggacgcccctctgctcaggcagcaggtggaacttcagggcctcgatgaggaggtccttgcagtcagggtggtgcctcaccaggctctcggcatccacgtggcccagcaggaagtcgcggctcagcaagggcagccgcacacacttcatgagccgtgggacatgctgcctgcgggcgtccacgtcgtgtttcacccagctcaggacggctcggtagacctcctcctctgaaggcacgttcaggctgtcgctagagaccagttccagaacctgggagtgggggtcctcagacctgagatctggggagggtcctgtggacccagggagccctgaagatgcctaggagggagggttagcaggtgggggctgagtgttcatacgaattccnccgcnctgngctaacgatcatcaat

SEQ ID NO: 65524 - DNA, 2127 bp, Homo sapiens
gcagccccggcaggcggcggccccgacccggaggccttatcggccttccccggacggcacctgagtgggctgagctggccacaggtgaagcgactggacgctcttctgagcgagccgattcccattcacgggcgcggcaacttccccacgctgagcgtgcagccccggcagattcgtgcaggtggtccgcagcaccctggaggagcagggactacatgtgcacagagtgcggctgcatggttcagctgccagccacgtgctgcaccctgagagtggactgggctacaaggatctggacctggtgttccggatggacctgcgcagtgaggcatccttccagctgaccaaggcagtggtgctggcctgcctactagacttcctgccggccggtgtgagccgggccaagatcacgccactgacactcaaggaggcatacgtgcagaagctggtgaaagtgtgcacagactcggaccgctggagcctcatctcactgtccaacaagagcggcaagaacgtggagctcaagtttgtggactcggtgagacgccagtttgaattcagcatagactccttccagatcatcctggactccctgttgctctttggccagtgctcgtccactcccatgtctgaggccttccacccaacggtcacaggcgaaagcctgtacggggacttcaccgaggccctggagcacctgcggcaccgtgtcatcgccacgcgcagtcccgaggagatccgaggtggtggcctcctcaagtactgccacctcctggtgcggggcttccggccccggcccagcaccgatgtgcgcgccctgcagcgctacatgtgctcccgcttcttcatcgactttccagacctggtggagcagcggcgcaccctagagcgctacctggaggcccacttcggtggggcagatgcagcccgccgttacgcctgcctggtgacactgcaccgggtggtcaacgagagcaccgtgtgcctcatgaaccacgagcgccgccagacgctggacctcattgccgcactggcgctgcaggcactggctgagcagggcccagctgccactgccgccctggcctggcgccctccaggcactgacggggttgtgccagccactgtcaattactacgtgacccccgtgcaacctctcctggctcacgcctatcccacctggctgccttgtaactgactcagaccctggccagaagggaagggactgggcctcacggggtggggtggggcctccaagagtgtgtggaggacatgaccagaggcgcagaatgtgccaggaggcccagcactgcagggttgggcctttgattgaacagaccagactttcccgagcacgaggcccctgtgggcttaatgccagcctggggctctcagcaggaggaccctttggttattgcatcacacttttggaccagcatgccggtggggtgcaggcgccatttgtcttggaagtcaatttccttcaggagacaaagcaagtttggggtggtagccttaatgcccagcaccttggattgattcccatggtctaagagggtctttttgactaaggccagcctgtggtgatcccagcagctttggagggcctgcagcccacacactgactgatacatggtatgttacagggacttgtcactttggatcaggctgggccactacagggcctgatgggccaacttgggtaatcactgggaggagggaaactgaggcccgaggcagatacctgggtttggggagggctgggtttagcccggttctctgaactacatacccccagctgtgaagccttcctcttgaggggttgaggtgggcagtatacaggagccaagcagcccagggtgggtcgcagcccaggccccttccagggtgccactcctttcccccttgtgttgcaaggagccctcctgcctgggagcttgttctttggaaggtgctgagcctgaatttgccacagtcaagtcaacgttcccaccccactggcttggttacagggctctcacatggggtaggggagccatactcccacccccttgcgtattcccctgggtttgttgatattttgcactcttaacacctgccaataaagacggtctacactgaaaaaaaaaa

SEQ ID NO: 65525 - DNA, 1667 bp, Homo sapiens
ttttttttttttctatgtacaaaaacattttaattgaaatacctgtataaaaaaatatgatctccagacatctcacttttgaactgaaagaacccccatctgcgatgcctgcacacaccgcattcacacaaacacaggtactgaataaattaaacgctcaggctctggccccaccccagctttcagagcccacaagcagactgtacaaagtcaataatttaaaacccaaaccctgggcacagtgcctggaagtgtcagggtcacccactccccttaagttagccactatacatgttcatcttctgacaggcggggccaggacagacgccaggcacaggaatcagggcctggggtccctggaccacagccaccccctcccctgcctccccactgtcccctggggcttgggagaggcagactgctcagaggaaataacctcaacaaataaattaaacaataaatagccccggtgggccgagggcacctccagggggtcacaccataaataacagagttggcggcgggtacggctcgcgtgggcgggcgggcgcggaggccaggacttgcattgtgtgtgcaggacgtgcccagacgcacaccgcaggactgagggcgggaggtgggcttgggaccctgcgccggcggaaagagctccgggtgggcaggcagatgggaaggccgcctccggacacagcagcacagaggggcgtctggggttcaagtatccacccagggcaggcgggacctcgaccggagcgtctttggacagacagagcttgagaaaaccaagtcccgcgggaccagcgttcaaaaggcactcaaagcgaaggtcaccaggggtcagaggtcactgcttccgcaggaggagacggcccacgcaggaaaaagtcagggtctgggggcgtcccaggtctggccaaggcaggtggtcccctagctcccagtcaggtgcagctcctcacaagctctcgctgctggacgtggtgctggccacgtcatcagggtcgagggtgcacagccgcaggtcacagctctccggggcgcccccgtcagcccccagcatccagggatgggccgcaatctgatccagcgacggccgctctgagggccgcagggacaggcaccaccggatcagctgctggcactctggagagaccctcctccggaagagcaggcggcctcggaggatctcctcgtcctgctcgaaggggatgtccccacacaccatatcgtagagaagcacgcccagcgaccacacggtggccgagcgcccgtggtagcggtggtagcggatccactccggggggctgtacactcgggtgccgtcgaagtcggtgtagaccgtgtccttgagcagcgcacccgaaccgaagtcgatgagcttgagctctccggagcgcaggtccacaagcagattttcgtccttaatgtcgcggtgcacgaccccgcagctgtggcagtggcgcacggcggccagcacctgcgcgaagaaagcggcgcgccagcggctcgtccagggcgccgcgctccgtgataaagtcgaagatggtcctagcgccggctcgggccgctccagcaccagcaggaagccgtcgggccgctcgaaccagtccagcaggcggatgacgccgcgcgcgccgcccggcgcgcccaccttgcgcagcagc

SEQ ID NO: 65526 - DNA, 1468 bp, Homo sapiens
ttttgtttttttttttttagaagcaaataaacattttatttccacagcacgccttcccttttcccaaagaacatgagtttcacctcagccatcaaagcagagggcgaaagctgcaagtgacaaggcaagaggctcctagaaaaatagattatacccaaggctctcctcctggggacccaaacccgtccccaggctccccctcagagcttgccaaatggagtgaaaggcatggaaaggggctgggagaaaagccagctccactgaacaaaggggagaggagcctggcagtgagcagacctgggaggggtgtggggtgggatgagctttgctccttggttgagtgctggaaaagggaagggggaagaaataatttatgttgatgtaattaatgtaatgatgatgtaatggtgcgtggtttcaatcatggcgaccattccagatctctctcaagtgaagctaaattctggccggtctatggaggtagaaattgaggacggaaggaaagtttagaatccctcctccccaggagaatagacatttattacccagctctaccctttggcccagcctgcctccccaaatggcttccaaatccctcagctaaaatctgcatcagaaaatggaattggaatggggatgttgccttgcccaaaccctccagcctcagaactgataaagaggttgaagagcaggggtggggaaaaggaagttaaggaatgaaattacaatttcccctcatcccctactcaaattccagtcccagggctgggctaggcagactgggagagaagaccaggcagctgttctcattatcagggacccatgcagacctgttggacagacatagtaggtgagagaaggctgagctggaggccaggagggttctttaggctcctagagggagaagcaggggcctggggtcaagggggagtgggaagcaacacagtaacaagcagtgggaagagcctttgagccctcaaacttacgggccaccctccaccacccaccccccaagtgctgacagaggggcccctgcgggtggcaggataatcaagggcagagcttgatgcgggtgcccttggagagcacccggaagaaaggaaagacacgctcgcccaggaaggcagccgagaaggtgtgcacgtgggctagagtctctgcgttgtagaagcccaggcgcccagcttcatagtccaggtacacaccaaagcgccttggtttctcactggggctcagcagcgtctgttctgtggagctctgggcctgatagcgtttgccgttggtgcccacgcaccacacttcccgctggagcaggggctgctggggcaggtggagccggcggcggcgatggtgatggcgcgaggagctggcatccccgctgcccacggaggaacccccagggcccaccttttccttatgatgggttgattcacgggcagacgccatcctaccctctcgcacagccgac

SEQ ID NO: 65527 - DNA, 5979 bp, Homo sapiens
cgcagtcgtccttccgccccagagaccgatgatagtcgagttgggggcattatgagaggagagaaaaactactacttccgtggagctgcgggggaccacggttcctgccccactacaacttcgcctctggcctcggccctcttgatgccctcggaggcagtctcaagcagctggtctgagtctggaggcggtttgtcagggggagatgaagaggacactcggctccttcaactcctccgcactgcccgggatccttctgaggccttccaggctttgcaagctgctttgccgcggcggggcggtcgacttggcttcccccgacgcaaggaagctttgtatcgggcactgggccgagtgcttgtggaaggaggtagtgatgagaagcggctctgcttgcaacttctctcggacgttctccggggtcagggggaggcaggccagcttgaagaggcctttagcttagcacttttgcctcaactagttgtctcgttacgggaagagaatccagccctgcggaaagatgcgctgcagatccttcatatatgtctgaaacgtagtcctggagaggtgctgagaacgcttatacaacaaggactggaaagtaccgatgcccgacttagagcttccacagcactactgcttcccatcttgcttactactgaggacttgttgcttggtctggatctcaccgaggtgataatatccctagcccgaaagcttggtgatcaggagacagaagaagaatctgagacagctttctccgcacttcaacaaattggggagcgacttggccaagacaggtttcaatcttacatttctcgtctgccctctgccctgaggagacactacaatcgccgcctggagtcccagtttggaagtcaggttccttattatttggaacttgaagcctctggatttcctgaagatccccttccctgtgcagtgactctttccaacagcaatcttaaatttgggattattcctcaggagctgcattcacgattattggatcaggaagactataagaaccggacccaggccgtcgaagaactaaagcaggtgctgggaaaatttaaccctagttctactcctcattctagtcttgttggcttcattagtttgctatataatttgttagacgattctaacttcaaagtggtgcatggcacacttgaagtcctgcatttactggttattcgccttggagagcaggtacagcagttcttgggaccagttatagcagcttctgtcaaagtgctggcggacaacaagttggtgatcaaacaagaatacatgaaaatcttcctcaagctaatgaaggaagtaggacctcagcaggtgctttgtttactcctggaacatctcaaacataagcattccagagtgagagaggaggtggtgaacatttgcatctgctccctgctgacctatcctagtgaggattttgacttgcccaaactgtcctttgatcttgccccagctcttgtagatagcaaacgcagggtacgccaagcagctttagaagcttttgccgtattggcatcatcaatgggctcaggtaaaaccagcatcctttttaaagctgtggatacagttgaactgcaagataatggagatggagtgatgaatgctgtgcaggccagattggctaggaaaaccttaccaaggctcacagagcagggatttgtggaatatgcagtactgatgccatcttctgccgggggtaggtcaaaccatttggcacatggagcagatacggactggcttttggctggtaacagaactcagagtgcacactgtcactgtggtgaccacgtgagggatagcatgcacatttatggatcttacagcccaactatctgtacccgaagggtattaagtgcaggaaaaggaaaaaataaattaccatgggaaaatgagcaacctggaatcatgggagaaaaccagacctccacttccaaggatatagagcagttttcaacatatgatttcatcccatctgcaaaattaaagctttctcaaggaatgccagtcaatgatgatttatgttttagcagaaaaagagtatcaagaaacttatttcagaatagtcgggattttaacccagattgtcttcctttatgtgctgctggtactactgggactcatcaaacaaatctttctgggaaatgtgcacaacttggattttcacaaatatgtggtaaaactggcagtgtgggttctgacttacaattcctagggacaactagcagtcatcaagaaaaagtgtatgctagcctcaattttggcagtaagacacagcaaacatttggtagtcaaacagagtgtacttcctcaaatggtcaaaatccaagtccaggagcttacatccttccatcctatcctgtctcatcacctcgaactagtccaaagcatacatctcctcttattatatctccaaagaagtctcaagataattctgttaatttctcaaattcctggcctcttaaaagcttcgaaggactatcaaagcccaagtcccacagaagaagcttgtcagcccaaaaatcgtctgaatcctacgggtaggaaatcatgggagaaaattctcaagaaaaacctcccagttcagcttacacctgcccttggtgagatcgccatcttcccgacgaggtctaaatgggacaaagcctgttcctcccatacccaaggggaataagccttttgcctgataaagctgatttaagcacagtgggacacaaaaagaaagagcctgatgatatttggaagtgtgaaaaagatagtcttccaattgatctttcagaattaaatttcaaggataaagatttggatcaagaagagatgcatagctctcttaggtcccttcgtaatagtgcagctaagaaaagagcaaaactgagtggcagtactttagatcttgaaagccctgattctgcaatgaagctcgacttgacgatggactccccgtctctgtcttcctcaccaaacatcaattcttacagtgaaagtggagtttacagccaagaatcattgacttcttctctgtctacaactccccaggggaagagaataatgtcagacatatttccaacatttgggtcaaaaccttgtccaacaagactttcttctgcaaagaaaaaaatttctcatattgctgaacaaagccccagtgcagggtcatcatcaaatccacagcaaatttccagttttgacttcacaaccacaaaggctttatcagaagactcagtagtagttgttggaaaaggcgtatttggaagtttaagttcagcaccagcaacctgcagccaatcagtgatatcttctgtggaaaatggggatacattttcaattaaacaaagtattgaaccaccatcagggatttatggaagatcagtccagcaaaatatttcatcatatcttgatgttgagaatgaaaaagatgctaaagtttctatttctaaatctacttataacaagatgagacaaaagagaaaagaagagaaagaactgtttcacaataaagattgtgaaaagaaggaaaaaaattcctgggaacgaatgagacatacaggaactgagaaaatggcatctgaaagtgaaacacctactggagctatttcacagtataaagaaaggatgccttctgtcactcatagtccagaaataatggatctgtcagaactacgaccattctctaaaccagaaatagcactgacagaagccctgaggcttttggctgatgaggattgggagaagaaaattgagggactgaattttattagatgcttagctgcttttcattctgagatactgaacacaaagttgcatgaaacaaattttgcagttgttcaagaggtgaaaaatttacgttctggagtttctcgtgctgctgtggtctgtttaagtgatcttttcacttatttgaaaaagagcatggatcaagagctagataccacagtaaaagttttgttgcacaaggctggtgaatcaaatacatttataagagaagatgttgacaaagcattgagagctatggttaataatgtaactcctgcacgtgcagttgtttctcttatcaatggtggacaaaggtattatggtcgaaagatgctgttcttcatgatgtgtcatcctaactttgaaaaaatgcttgaaaagtatgtcccatctaaagatttgccatatattaaggactctgttagaaacttacagcaaaagggtttgggggagataccattagatactccttcagcaaaaggaagacgatctcatactggcagtgttggaaatacaagatcatcatctgtttctagagatgctttcaattcagctgaaagagctgtaactgaagttcgtgaagtcaccagaaaatcagtccctcgtaattccttagaaagtgctgagtaccttaaactcataactggcttattaaatgcaaaagactttcgtgatcgtattaatgggattaagcagcttttatcagatacagaaaataatcaagaccttgttgttggaaacattgtgaagatttttgatgcttttaaatctcgacttcatgattctaatagtaaagtaaatctggtggctctggaaacaatgcacaaaatgattcctctacttagagaccacttatctcctataatcaacatgctaattccagcaatagtggataacaatctgaattccaagaatccaggcatctatgcggctgctacaaatgttgttcaggcactgagtcagcatgtagacaattacttacttctacagccattttgcacaaaagctcagtttttaaatggaaaagcaaaacaggacatgacggaaaagcttgctgatattgttacggaactttatcaaaggaagccgcatgccacagagcagaaagtgttggttgttttatggcatctcttaggaaatatgacaaatagtggctctctgcctggagctggaggaaatatacgaacagccacagctaaattatcaaaagcactctttgcacagatgggtcagaatctgttaaatcaggctgcatctcaaccaccacatatcaaaaagagtttggaggaattactcgatatgacaattttaaatgaattatgaatcttcgataaaatactgtatgatgaacaaaagtgtttacatgatgacaaatggaactttctaaaagttatgttatcagtgcctgcacttcacatccagcaaattaagtcaatggctatttttatttgcagcctatgagtacacatctgtcctatatcaaccttaccacttatattcatcacataaaaacctaaaatattcatgaataattcatgaaatctgagtcacatgggatgaattcaattttaatatttttgagaaaagtcctgctcatttgcactattctatagaaactacaatttgttgccctatatgtaaaattagaattgtaattaaaaatacacattttattatgtaatcatgttctggtatgtctcatttctcagccttattttataacgtggaagtcattgaactatgttatcagaaactaagtttgtatattatttgtgaaaaacatgtatttctgaatcagtccgctaatatgattgtgcagtattagcttgcttttgctgctgtgttaatgtcatatatttgcttaccttttgggttcaattatctacataattgtgaaatttaacaagttataataaagcatgacaaccaaagttttagaaaacattaaacattttaaatgcacgtttaaaaaacgtgttgaatgtaacccccctatttttgtgtgcaaacactaaattttattgctttatgttttgacctttataaaggtgttattctgctgcccagttttgtaattctcaaaaatagtgccaggtcttctatagcttttttcagaattcatgggcttacaagtactgtatgcatctttaaaaagaaaaggaatgttataaaataaaaggatttatttctttaaaaaaaaaa

SEQ ID NO: 65528 - DNA, 5541 bp, Homo sapiens
tggatttcgaggtcggggataaaatccgaattctggcgaccttggaagatggctggctggaaggatccctgaagggcaggacaggcatctttccttaccggtttgtgaaattatgtcctgacacacgggtggaggaaaccatggctctgccccaggaaggcagccttgccaggatcccggaaacttctttggattgtttggagaacaccttaggagtagaggaacaaagacatgaaaccagtgaccatgaggccgaggagcctgactgcattatttctgaagcacccacttctcccctcggtcatctgacttcagagtatgacacagacagaaactcttatcaggacgaggacaccgcaggagggcccccgagaagcccaggcgtggagtgggaaatgcctcttgccacagactctcccacatctgaccctacagaagtagtcaatggtatttcctcccaacctcaggtcccttttcatcccaacttgcagaaaagccagtattattctacagtgggagggagccacccgcactcagaacagtaccccgaccttcttcccctagaagcaaggactagagactatgccagcctacctcccaaaagaatgtattcccagctaaaaactcttcagaagccagtgctccctctttacaggggctcttctgtttcagcttcaagggtagtcaaacccagacaatcaagtcctcagctccacaacctagcaagttatactaaaaagcaccacacgtccagtgtttactccatctcagagagattggagatgaagcctggtccgcaagcccaagggcttgttatggaagcagcaacacattcacagggagacggcagcactgacctggactcgaagctgacacaacagctgatcgagtttgagaagagcttggcagggcccggcacagagccagataaaattttacgccacttttcaatcatggactttaactctgagaaggatattgtccgaggttcctcaaagttaatcaccgagcaggagctgccggaaaggagaaaggccctaaggccaccgccacctcgtccctgtactccggtatccacttctccccatttgctggttgaccagaacctaaaacctgcaccacccttggtggtgcgaccctctcgcccagctcccctgcctccctcagcacagcagagaacgaatgcggtatcccccaagctcctatctcgacaccgtcctacctgtgagaccttagaaaaggagggccctggtcatatgggaaggagtctggaccagacctccccatgccccttagtgctggtgaggattgaggaaatggagcgggacttggatatgtacagtagagctcaagaagagctaaacctcatgctggaggagaagcaggatgaatcatcaagagcagagaccctcgaggatctcaagttctgtgaaagtaacattgaaagtttgaatatggaactccagcaactaagagaaatgacgctcctctcctcccagtcttcatcactggtggccccttctgggtctgtgtctgccgaaaatccagagcagaggatgctggagaagagagccaaggtcatagaagaacttcttcagacagaaagagactacattcgggatctggaaatgtgtattgagcggatcatggtacccatgcagcaggcacaggtaccaaacattgattttgagggactttttggaaatatgcagatggtgattaaggtctcgaagcaattattggctgctctggaaatcagcgatgctgtaggacctgtgtttcttggtcaccgggatgagcttgagggaacatacaagatttactgccagaatcatgatgaggccattgcgctgcttgaaatctacgagaaggatgagaagatccagaagcatcttcaggactccttggcagatctgaagagcctatacaacgaatggggatgcacaaattatattaacctgggctccttcctcatcaaaccagtacagagagtaatgcgttacccgctgttgctaatggagttgctgaattccaccccagaatcccacccagataaagtgcctttaaccaatgcagtccttgcggtcaaggaaatcaacgttaacattaatgaatataaacggcgaaaggacctggtcctcaagtaccgtaagggtgatgaagatagccttatggagaaaatttccaaactgaacatccactccatcatcaagaaatccaaccgagttagcagtcacctgaagcatctcactggctttgctcctcagataaaagatgaagtatttgaagaaacagaaaaaaacttccgaatgcaagaaagattgattaagtcttttatccgagacctgtctctctacctccagcacatccgggagtccgcatgtgtgaaagtggtggctgctgtgagcatgtgggatgtgtgcatggagagaggacaccgggacctggagcagtttgagagggtgcatcgctacatcagtgaccagctcttcacaaactttaaggagaggacagagcggcttgtcatctcccccttaaatcagttactgagcatgtttacagggccccataagctggtacagaaacgctttgacaagctcctggacttctataactgtacagaacgggcagaaaagctaaaggacaagaagaccctggaggagctgcagtcggcccggaacaactatgaggccctgaatgcacagctgctggatgagctgcccaagttccaccagtacgcccagggcctcttcaccaactgtgtccacggctatgctgaagcccactgtgactttgtgcaccaggctctggagcaattaaagccactgctttcgttactcaaagtggctggcagagagggaaaccttattgccatcttccacgaagagcacagcagagttctgcagcaactccaggtttttaccttcttcccggagtctcttccagctaccaagaagccatttgagaggaaaaccattgaccgccagtctgctcgaaagccactcctgggcctgccaagttacatgctacagtcagaagaactccgggcctccctcctggccaggtatccccctgaaaaactcttccaggcagaacggaacttcaatgctgctcaagacttggatgtctcacttttggaaggtgacctggtgggtgtgattaagaaaaaagaccccatgggcagccagaaccgctggctgattgacaatggagtcaccaaaggcttcgtgtacagctctttcctaaagccctacaatcctcgccgcagccactccgatgcctccgtgggtagccactcctccacagagtctgagcacggcagctcctcccccaggttcccacgccagaacagcggcagcaccctgaccttcaaccccaacaggcataggctgtatcctttacctcggggtcttgccagaagcagcctcaagatgcatctcctccgccaaaagaatgggaccaaggaactctcagtgcatccctaaatccgagtaattcagagagtagtccttccagatgcccttcagacccagactctacctcccagccaaggtcaggggactctgcagatgtagctagagatgtaaagcaacccactgccacgccgaggagctaccggaacttcaggcatccagaaatagttggctactccgtaccaggacgaaatgggcaaagtcaagacctcgtcaaaggatgtgcaagaacagcccaggctccggaagacagaagtacagagccagatggcagtgaggcagaaggcaaccaggtctattttgctgtctacaccttcaaggcacgaaacccaaatgagctgagcgtgtcagccaatcagaaactcaagatcctcgagtttaaagatgttacaggaaatacagagtggtggttagctgaggttaacgggaagaagggctacgttccctccaattatatccgcaaaaccgagtacacctgagcccacgttgcctgccacccagccttgctgcctttgctttcagtccgccgagggttctggcggcccaccgagagggcgcctgctcctgagacacaggccctgtctgcgttgcttaaccatggcatggtggagcacaccacagatcttgttctcctcgattgggttgtaaaccttgatgctcactagaatctctagaatttgaaatggaccctggggctttgcaaatgacttagtgactatgagaagagagacaagtcttagagctggcttttggaaaggagaaacttgcagtcagaagcccagtgtcctatgtatgcaggaagctgtgctctagcaatagacagtgttggtaatggttgtgctgtacggcgtttggggtggccccatgttccatgctcagctgaccggatgccaactcagatgaaaagaattcatggctctgggcaccccgtgaggcagtgcttgcacatggctgggagtttgtcgggattgaaccaaacctagtgcttcaaagctcctgggacacctccagtgtccagcacacattctcatacatactgcccctaatttctaaagtccctaaagcactacattctgtaaccttgtttcttttactccattcccagattagttatgcaaaattcaactgcgttctacttttagaagtgtttagggtctttattttctgttgacccttcatctgaaagattctcttcccttgttaggtacaatcactgcccccccgcttttttttttgagatggggtcttgctatgttgcccaggctggttttaaacgcctgggctcaagcaaccctcccgcctccctgctgagattacaggtgtaagccaccataccgcaacctcaatgacacctttctgatggtctttacacagtctgtgatgtctggtggcccccctgccctggactcaataattgatagattttcctagagtaacagtatgagagctccagccattccattaaaagtattagttctgctttgagctgaaaccagttgagcctaatggaagactggatgtctttcttcttcatccaagcaccctaatgactgtttagttacatccatagatgcagacaacataacacctgtgacttacttgaattgggataagccattccagaagtagcttatcctagacttggaaataagatttttttcaccactaacttccatgcttcagagatgacattcaaagccagattcccaagtgcctgatcatacctcccagtctcaggaagatatttgcttaccccttagaccaagaatcttaagatcttccccagctatgaagcctatcttggaatgggaaaccatgaaatttgtcttttaaaagaaagggaagaaatagccttacagcccctgttcctccaagtgcacatttagccttaaaatcctgggagtcgggagacaccgtggagtcctaacatccacagtgtctgctggtcgtggtcagaaggcagtaatgcaagagtccttttggtgaagaagtgtttctatgtaagagatgtttatatttaagtaggttctttaataattaaaggcatttctaatggccaaaaaaaaaa

SEQ ID NO: 65529 - DNA, 714 bp, Homo sapiens
tccgcgcgggcttcggaggagcccgccctgccagaggagagggaggtcacggcgtaaaggtgcagctgccgccaccgccgcttctgcaaggtctcagggacgggctgcagccatgtcctattgccggcaggaagggaaggatcgaatcatatttgtaaccaaagaagatcatgaaactccaagcagtgcagaattggtggctgatgaccccaacgatccatacgaggagcatggattgatactgccaaatggaaacattaactggaactgcccatgccttgggggaatggccagcggtccctgtggagaacagtttaagtcagccttttcctgcttccactatagcacggaggagatcaaggggtcagactgtgtagaccagttccgggccatgcaggaatgcatgcagaaatacccagacctctatccccaagaggatgaggatgaggaagaggaaagagagaagaagccagcagaacaagcagaagaaacagctcccattgaggccactgcaaccaaagaagaggagggatcaagttaatgaaggccacaaggcactgggcaccagtccttttggagtggaccttttgcaaaaggccttgtcatcaccttccaagaaagtttccttctgttgtcctgtgcattataatatacaaaataacttattttgatgatcagaggtcttgaggtcttgacctcttgacatatacactg

SEQ ID NO: 65530 - DNA, 1258 bp, Homo sapiens
atggaaaactgtgcaactgcaggtaccacccacgagtccgcgatcttggctcaccgcaacctccgccttctggattccagcaattctgcctcagcctcccgagtagctgggactgcaggcgcgtgccaccacacccggttaattttttgtattttttggtagatacggggtttcgccatgtcggccaggctggtctcgaactcctgacctcgtgatctgcctgcctcagcctcccaaagtgctgggattacaggcttgagctcctgcgcccagcccatgctaagtcttttacccagtggtcaaaactggcacaacacaggatttatactggagagcaacctcacaaatgtaatgaaagtggtaaggctttttatcaaatgtccttgtctttggggtcatgagaaaattcatacagaatctattaaaaatgtactaaacatggaaagacctttaagcaacagtgatgtgatgaaggtggtagttttttaaatgaactcccataagagtctacacaccatagaactcataccaggaatcacaaagtctctaaatttccaaagttaactggaaatattacaaactgcagaataattccaggccaaaatatgttaaattcataacatgatgtatatcaaaggaaaaaaggacatgtggaaatgacacattatcttcagtgtataaaatattcatttatgtgaagtttcttggaaaggctacactactattactggtttccgtctgatgtttgagatctgttgattttatgcttttcttacaggcctttcattatgatctttgggaaggaatcaataaaatgatagggcctacttcattaggtgtggttcattcctattcatgctccctggaagaacaagaatgctgaattttgaaatttaatattgtatgaattagcatcagggagaggtggagaaaaatacaaaactaaaagtcatgcttattgtgttcagtgtgcccttctccagagggccactggcttataggaaaggattgctgctctaccagttgaccaggagatggcacgccaggacattaagacactggagttttgtttcgtttttttttttttttgagactctgcctcaaaaaaaaaaccaaaccaaaccaaagaaccagaatagcatgtgcacgtatacacagacgtttcacaactggcattatgttttgctactgttttatttacaatgtatcacaagttttatgccccaataaaatttaatcataacttctaaaaaaaaaa

SEQ ID NO: 65531 - DNA, 2549 bp, Homo sapiens
atggatgatcagcaagctttgaactcaatcatgcaagatttggctgtccttcataaggccagtcgaccagcattatccttgcaggaaaccagaaaagcaaaatcttcatcaccaaaaaaacagaatgatgtccgagtcaaatttgaacatagaggagaaaaaagaatccttcagttccccagaccagttaaactggaagatctgagatctaaagctaaaattgcctttggacagtctatggatctacattataccaataacgagttggtaattccattaactactcaagatgacttggacaaagctctggaactgctggatcgtagtattcatatgaagagcctcaagatattacttgtaataaatggaagtacacaggctactaatttagaaccattgccatcactagaagatttggataatacagtatttggagcagagaggaaaaaacggctatctataataggtcctactagtagagatagaagttctcctcccccgggttacattccagatgaattacaccaggttgcccggaatgggtcattcactagtatcaacagtgaaggagagttcattccagagagcattggaaccaaatgctggatccaattatctttaagcagccctgaaaattctggctcaggaagttgtccatcacttgatagtcctttggatggagagagctatccaaaatcacgaatgcctagggctcagagctacccagataatcatcaggaattttcagactatgataaccctatctttgagaaatttggaaaaggaggaacatatccaagaaggtatcatgtttcatatcatcatcaagagtattatgatggtcgtaaaacttttccaagagctagaaggacccaggggaaccagcttacggtctcctgtgagtttcagtcctactgatcattccttaagcactagtagtggaagcagtatctttaccccagagtatgatgatagtcgaataagaagaaggggaagtgacatagacaatcctactttgaccgtaatggacatcagcccacccagccgttcacctcgagctccgaccaactggagattgggcaaactgcttggccaaggagcctttggaagggtctacctctgttatgatgttgatacaggaagagaattggctgttaagcaagttcaatttgaccccgatagtcctgagaccagcaaggaagtaaatgcacttgagtgtgaaattcagttgctgaaaaacttgctacatgagcgaattgttcagtattatggctgtttgagggatccccaggaaaaaacactttccatatttatggaatatatgccagggggttcaattaaggaccaattaaaagcatatggcgctcttactgagaatgtgactaggaaatacacccgtcagattctggagggtgtccattatttgcacagtaatatgattgtccatagagatatcaaaggcgcaaatatcctgcgagattcaacaggcaacgtcaaactaggagattttggggccagcaaacggcttcagaccatctgtctctcagggacaggaatgaagtctgtcacgggcacaccatactggatgagccctgaagtcatcagtggagaaggctatggaagaaaagcagacatctggagtgttgcatgtactgtggtagaaatgctaactgaaaagccgccttgggctgaatttgaagcaatggctgccatctttaaaatcgccactcagccaacaaacccaaagctgccacctcatgtctcagactatactcgagatttcctcaaacggatttttgtagaggccaaactgagaccttcagctgatgaactcttaaggcacatgtttgtgcattatcactagcagccagtaacctctcctgtgcctctacctagctcccatctattcattcaccttctctctgactgcacttttcttttttataaaaaaagagagatgggggagaaaaaagacaagagggaaagtatttctcttgattcttggttaaatttgtttaataataataatatcctaaattttttatatttaatctttttttcccttacaagaacttgaagtttttttttttaatttttataatgtactgatggggttcaaaaagataaagcactttagtacatagtcactctttttagtacaaacaaatcatttggaatacctaaagattgtagagtcattccctctatcactgacacatcagtgacgatgggaagacatggaaaacaaggagaagaaaatgatgtataatttgtagtttttagtgatagtatttaaaatatatcctcatttgtggggttgagccctaaactttagtttagggtaggtactcaacttaaagaatataggtttcttcttatatctgtattctttagatcctaacctctgtctaccaacctttttgctcagtaggagtcttgatagaagatatgaatctctgagaggtatgtttatttgttaatcctaaccagtataataagcaaatacactataatagatccacgttactggaatctgtaaaccttgaggg

SEQ ID NO: 65532 - DNA, 415 bp, Homo sapiens
gctgagcttttgctcgccgtccaccactgctgtttgtcgctgtcgcagacccgctgctgactgccatccgtctggatccggcagggtgtccactgtgctcctgatccaatgaggcacccattgccgctcccgatccggctaaaggcttgccattgttcctgcacagctaggtgcccgggtttgtcctaatccagctgaacgctagtcactgggttccacggttctcttccgtgatccacggcttctaatagagcgataacactcaccacatggcccaagattccattccttggaatccatgaggccaagaaccccaggtcagagaacacaaggcttgccaccatcttggaagcggcccgccaccatcttgggagctctgggagcaaggaccccccgacccaataagagtttcgca

SEQ ID NO: 65533 - DNA, 2473 bp, Homo sapiens
acgcgccctgaattcccgggtcgacgggaggcaggagactgtaatggacggggatgggggtccccaggacggcctaagaagaagcacacaggcatggccagcattgacagcagtgcccctgaaacaacatcggatagttcccccaccttaagccggagaccacttcgagggggctgggcccccacctcctggggtcgaggtcaggacagtgacagcattagcagctcttcttcggactccctgggctcctcatcctccagtggaagtcgccgggccagtgccagtggaggagcccgggcgaagactgttgaagttggcaggtacaagggccgccgccccgagagtcatgcccctcatgtacccaatcagccatcagaggcagctgcacacttctacttcgagctggcgaagacagtgctgatcaaggcagggggcaacagcagcacttccattttcacacatccatcttcctcagggggccaccagggtcctcaccgcaacctgcacctttgcgccttcgagattgggctttatgcccttggcctgcacaactttgtttctcccaactggctctcacgtacttattcttcccacgtttcctggattacaggccaggccatggagataggcagcgcagccctgactatactggtagaatgctgggatgggcacctgacaccccctgaggttgcatccctggctgacagggcatcacgggcaagagactccaatatggtgagggcggcagcagagctggccctgagctgcctgcctcacgcccatgcattgaaccctaatgagatccagcgggccctggtgcagtgcaaggaacaggacaacctgatgttggagaaggcctgcatggcagtggaagaggcagctaagggtgggggcgtgtaccctgaagtgttgtttgaggttgctcaccagtggttctggctatatgagcaaactgcaggtggctcatccacagcccgtgaaggggctacaagctgtagtgccagtgggatcagggcaggtggggaagctgggcggggtatgcctgagggtagagggggcccagggactgagccggttacagtggcagcggcagcagtgacagcagcagccacagtggtgcccgtcatatcggtggggtctagtttatacccaggtccaggactggggcatggccactcccctggcctgcacccctacactgctctacagccccacctgccctgtagccctcagtatctcactcacccagctcaccctgcccaccccatgcctcacatgccccggcctgccgtcttccctgtgcccagctctgcatacccacagggtgtgcatcctgcattcctaggggctcagtacccttattcagtgactcctccctcacttgctgccactgctgtgtctttccccgttccttccatggcacccatcacagtacatccctaccacacagagccagggcttccactgcccaccagtgtggcctgtgagttgtggggccagggaacagtgagcagtgtccatccagcatccacgtttccagccatccaaggtgcctcactgcctgccctgaccacacagcccagccctctggtgagcggaggttttccaccgcccgaggaggagacacacagtcagccagtcaatccccacagcctgcaccacctgcatgctgcctaccgtgtcggaatgctggcactggagatgctgggtcgccgggcacacaacgatcaccccaacaacttctcccgctcccccccctacactgatgatgtcaaatggttgctggggctggcagcaaagctgggagtgaactacgtgcaccagttctgtgtgggggcagccaagggggtgctgagcccgtttgtgctgcaggagatcgtcatggagacgctgcagcggctgagtcccgctcatgcccacaaccacctgcgtgccccggccttccaccaactggtgcagcgctgccagcaggcatacatgcagtacatccaccaccgcttgattcacctgactcctgcggactacgacgactttgtgaatgcgatccggagtgcccgcagcgccttctgcctgacgcccatgggcatgatgcagttcaacgacatcctacagaacctcaagcgcagcaaacagaccaaggagctgtggcagcgggtctcactcgagatggccaccttctccccctgagtctttcacccttagggtcctatacagggacccaggcctgtggctatgggggcccctcacacagggggagtgaaacttggctggacagatcatcctcactcagttccctggtagcacagactgacagctgctcttgggctatagcttggggccaagatgtctcacaccctagaagcctagggctgggggagacagccctgtctgggagggggcgttgggtggcctctggtatttatttggcatttataaatatataaactccttttttactctagtaaaaaaaaaa

SEQ ID NO: 65534 - DNA, 2087 bp, Homo sapiens
cagtcattgtccaaacctgcttttttccgacaaaattcagagaggaggaacttcaagctgctggacactaggaagctgagtcgggatggaactgggtccccttccaaaatcagccctccctccactcccagcagccctgatgacattttctttaaccttggagacccacagaacggcaggaagaagagaaagatacccaagctggtgttgcgaatcaacgccatttatgaggtccggagaggaaagaaacgggtgaagaggctgtcccagtcaatggagagcaactcaggaaaagtgacagatgagaacagtgagtctgacagtgacacagaggagaagctgaaagctcacagccagcgcctggtcaacgtgaagtcccggctgaagcaggcgcctcggtacccatcacttgcccgggaactcatcgagtaccaggagaggcagctcttcgagtactttgtggttgtgtctttgcacaagaagcaggccggggctgcctacgtgccaaaactcacccaacagttccctctgaagttggaaaggtctttcaagttcatgagagaagctgaggaccaactgaaggccattccccagttctgttttcccgatgccaaggattgggttcctgtccagcagttcaccagtgaaacattctcgtttgtcttaactggagaagatgggagcagaaggttcggttactgccgaagactgctgcctggaggcaaagggaagcgccttcctgaagtttactgcattgtgagccgcctgggatgcttcagcctcttttcaaggatcttggatgaggtggaaaaaagacgaggcatctctcctgccctggttcagccactcatgagaagtgtcatggaagcccctttcccagccctgggcaaaaccatccttgtcaagaacttcctgccaggttcaggaactgaggtgatcgaactgtgccgcccgctggactcccggctcgagcacgtggactttgagtctctcttctcctccctcagcgtccgccacctggtctgtgtgtttgcctccctgcttctggagaggagggtcatcttcattgcagacaagctcagcatcctgtccaagtgctgccacgcgatggtggcgctgatctaccccttcgcctggcagcacacctacatcccggtgctgccacccgccatggtcgacatcgtgtgctcgccgacgcccttcctcatcgggctgctctccagctcgctgccactgctcagggagctgccgctggaagaggtccttgtggttgacctcgtcaacagccggttcctcagacagatggacgatgaggactccatcctgccccggaagcttcaggtggccctggaacacattctggaacagaggaacgagctggcttgtgagcaggacgaagggcccctagacggcaggcacggtccagagtccagccccttgaacgaggtggtgtctgaagcctttgtccgcttcttcgtggagattgtgggacactactctttgttcctgacgtcgggcgagcgtgaggagagaaccctgcagcgggaggccttccgcaaagctgtctcctccaagagcctccgccacttcctcggaggtcttcatggagactcagatgtttcggggcttcatccaaggagcgggagctgcgccggcaggatgccaaaggtctgtttgaggtccgagcccaagagtatctggaaacactccccagtggagagcacagcggtgtcaataagttcctgaagggactaggcaataaaatgaaatttctccacaagaaataactctcagcctcaagggaaaacttcctcctagtgcagccctattctttaaaaacagttcctggtggcctttctgaaaggctgggtcccaggttgtcacggtgcggaactggaggccgcggtggcttctggccgaggctgggctcttccctggatgaggacctgggagccgcctgggaggacagccccagaaagggagcccgagaccaggcgtgtcgccgacatgcaaatgggttgttttggtggttgagagtttttttttttatcttagatattaaaagtaagaaaaatgaaaaaaaaaaa

SEQ ID NO: 65535 - DNA, 998 bp, Homo sapiens
ttttttttttttaccaatggaatagcagactttctgccagattttattggttaatggtaatataaaatataagaaaaaaacaacttcaaaagagtcaacaatctgtatccatctacatggtatctgaccaccattactgggcttttgaagtacctcgtagtggacttcacaaatgattcttaatttttaaaaatgcaaagtgtcttagtatttgtgtatgacatttaaactcagaatttacgtagtatagaaaaatactcaccaaaatatttataagccacacacttaaaatgcattgaacatttatgaaagctccaaaatttaaagcatagcatatatatttattttataaaatagaaaaaaaaataaagtatattgattgttctttacacattttgattacactgaatttgttaatttaatattagttcaaataaacattgttatttaaaaaatgctgagtacacgattaagctgaattttgttttccatcagaaaaagaacttcaggagtatataatggtctacaggtgcttcccatccaaaacactaggtcttcatcttttgtttcttagaccactcaggtgcttcttttttagtaaagagtgttggtttaggtgtaaatatattgtcttcatgctctttaggcacattcaaagtctttgatttctgattttctgtcacatgttttggttctgttttagtgagaagtaagctgttctcagaatgtttactatgcatcttaacgagaatctgtttcattgctgccaattcctgacatctttctcaagttgtgcaatagattccgtcagtgaatcaatcttagaatctctctgacgcactgattcaatgagatacctgtaaggctgttgagtctggtttaatagcgaattggctctgtcaagctatgtctgttgtatctgtatggtgcaaacattaagtactggtatgctgctgacaatctttactccatcttcagtaaccttaggttggtagttt

SEQ ID NO: 65536 - DNA, 3325 bp, Homo sapiens
ctgagtcgcctgcaggcagcgtgccaccggctgaagctctggccagagctgcaggacaatggtggggactatgtctcagctgctttgggccccctgaccaccctcctggagcagggcctgggggctcggctgaacctgctggctcactctcgacccccagtcccagagtgggacatcagccaagatccaccaaagcacaaagactctgggaccctgaccctgggactccttctccggcctgagggactgaccagcgtccttgagctgggtccagaggcagaccagcctgaggctgctaaattccgccagttctggggatcccgctcggagcttcggcgtttccaggacggagccattcgggaagctgtggtctgggaggcagcctctatgtcccagaagcgccttattccccaccaggtggtcacccacctcttggcactccatgctgacatcccagaaacctgtgtccactatgtggggggccccctggatgcacttatccaaggcctgaaagagacctccagcacaggtgaggaggccctggtagcggcggtacgttgctacgacgacctcagtcgcctactgtgggggctagagggtctcccactgaccgtgtctgctgttcagggagctcacccagtgctgcgctacacagaggtgttcccaccaactccagtccgtccagccttctccttctatgagactctgcgggagcggtcctcactgctgccccggctcgataagccctgtccggcctacgtggagcccatgaccgtggtttgtcacctggagggcagtggccagtggccacaggacgctgaggccgtgcagcgggtccgagctgccttccagctgcgcctggcagagctgttgacacaacagcatggtctgcagtgccgtgccactgccacgcacacggatgtccttaaggatggatttgtgtttcggattcgcgtggcctatcagcgggagccccagatcctgaaggaggtgcagagcccagaggggatgatctcgctgagggacacagctgcctccctccgccttgagagagacacaaggcagttgccactgctcaccagtgccctgcacggactgcagcagcagcacccagccttctctggtgtggcacggctggccaagcggtgggtgcgtgcccagcttcttggtgagggtttcgctgatgagagcctggatctggtggccgctgcccttttcctgcaccctgagcccttcacccctccgagttccccccaggttggcttccttcgattccttttcttggtatcaacgtttgattggaagaacaaccccctctttgtcaacctcaataatgagctcactgtggaggagcaggtggagatccgcagtggcttcctggcagctcgggcacagctccccgtcatggtcattgttaccccccaagaccgcaaaaactctgtgtggacacaggatggaccctcagcccagatcctgcagcagcttgtggtcctggcagctgaagccctgcccatgttagagaagcagctcatggatccccggggacctggggacatcaggacagtgttccggccgcccttggacatttacgacgtgctgattcgcctgtctcctcgccatatcccgcggcaccgccaggctgtggactcgccagctgcctccttctgccggggcctgctcagccagccggggccctcatccctgatgcccgtgctgggctatgatcctcctcagctctatctgacgcagctcagggaggcctttggggatctggcccttttcttctatgaccagcatggtggagaggtgattggtgtcctctggaagcccaccagcttccagccgcagcccttcaaggcctccagcacaaaggggcgcatggtgatgtctcgaggtggggagctagtaatggtgcccaatgttgaagcaatcctggaggactttgctgtgctgggtgaaggcctggtgcagactgtggaggcccgaagtgagaggtggactgtgtgatcccagctctggagcaagctgtagacggacagcaggacattggacctctagagcaagatgtcagtaggatgacctccaccctccttggacatgaatcctccatggagggcctgctggctgaacatgctgaatcatctccaacaaaacccagccccaactttctctctgatgctccagcattggggcaggggcatggtggcccatgtagtctcctgggcctcaccatcccagaagaggagtgggagccagctcagagaaggaactgaacccaggagatccatccacctattagccctgggcctggacctccctgcgatttcccactcctttcttagtcttcttccagaaacagagaaggggatgtgtgcctgggagaggctctgtctccttcctgctgccaggacctgtgcctagacttagcatgcccttcactgcagtgtcaggcctttagatgggacccagcgaaaatgtggcccttctgagtcacatcaccgacactgagcagtggaaaggggctatatgtgtatgaatagaccacattgaaggagcacaatgccctcctgtgttgatgccacttcccagggtggagacagtggaaaagaaccgaggacaggaaaggattgggtaggtgaaggggtcaggggactggtagtcacccaatcttggagaggtgcaaaaagcactgggggctacccgttagctgcatctgccctggctgtttgcccgttcatgtcacaaactgccactactatgtacctgcagtggggttgcagagatgggggagactcaagtcttactccccaggagctcccagggcccaaggaggagaatgctgcctcctttcagtctggtctacacccactttctggtagcctctctgcttcctgtaattctggctgtttttccagactcagctcaaatagtgcccctccttaagcccatccctcgcccccagcctgaggtgatctttccctcctctgaactattagagcagttactgtctgttcagttcgtttggcaggcacacacagtggcataaattctattgttttgaactctgatttaaaattaaattgcagctgggcgtagtggctcatgcttgtaatcccaacacttagggagtcaggagaatcacttgagctcaggagttctagaccaatctgggcaacagagagaccccatctcttttaaataaaaagttaaattgcttaatttcccccgtattcctggcctgtctgcccctttcacataattttaacctggtttcttgtatgtaaactccttgagggcaagaacatgtttgaacataaaaaaaaaa

SEQ ID NO: 65537 - DNA, 1938 bp, Homo sapiens
  misc_feature (1)...(1938): n = a,t,c or g
gtggaaagaacagtcagaaagcctctcctgtggatgatgaacagctgtcagtctgtctttctggattcctagatgaggttatgaagaagtatggcagtttggttccactcagtgaaaaagaagtccttggaagattaaaagatgtctttaatgaagacttttctaatagaaaaccatttatcaatagggaaataacaaactatcgggccagacatcaaaaatgtaacttccgtatcttctataataaacacatgctggatatggacgacctggcgactctggatggtcagaactggctgaatgaccaggtcattaatatgtatggtgagctgataatggatgcagtcccagacaaagttcacttcttcaacagcttttttcatagacagctggtaaccaaaggatataatggagtaaaaagatggactaaaaaggtggatttgtttaaaaagagtcttctgttgattcctattcacctggaagtccactggtctctcattactgtgacactctctaatcgaattatttcattttatgattcccaaggcattcattttaagttttgtgtagagaatataagaaagtatttgctgactgaagccagagaaaaaaatagacctgaatcttcagggttggcagactgctgttacgaagtgtattccacaacagaaaaacgacagtgactgtggagtctttgtgctccagtactgcaagtgcctcgcccttagagcagcctttccagttttcacaagaagacatgccccgagtgcggaagaggatttacaaggagctatgtgagtgccggctcatggactgaaactcagcagggactctgggaagtctgaccaagttggagcagatggtttgttacttgaatctccaaacacttagttgaatttttacagatatttcagatcagtgggtgttggggccactattgttacctccaaattttattttttgcccttaattccatttctcccagctaccatgtactattgtttaatgttcagtttggtttcatttttaattttatggttctgtgcgtcccccatatttaatatttattattcaaacgcatgcatatagacagagcatgcagtgaagagtattaaaaaaaaaagcttagtagatttggtgcagcttttgaaacttaggttagacgtgaaactgaaatacaggtttcaaatttacttccccagaacctaaaaatgcaagatgtttttgataccaaccataacctcctgagaatagtaagtgttcccccggggcattaagggtaagcctgggggtggtttttgaccaaatcccagtccctgttttacctttacccagcggcaactttcacccaacttcccctctcccaagtgagtcttagagagtgcagtcccattcctttttgaagggtgagatggaagtggtcgtaaactgactggtgtcttctgtttctgggaggcacacttgtaaggcacagtggctgctttgggaggagtaaggtgtgagaaaaagcaaccttggaggccagtaacaatgacagatttcaatcgtggttttaggaattataatacgtggcatacatctcataaaggcttttgctgggatattgaattccctgaatttttctgttttcgacctgttaaaaaaatcttaacatccatcaaactagtggtcaaacaaatgagaatgcagctgttctcagagtaatttttaagttgtcatttccctgtgttgcctcccaattggaagaagttaaggtttaccaaatgcatttctatttcaagggtatctgaaacgtaaacattcaaaactgaaggctgactgacttnagatgttttgcaggtggctggagagaacagggaaggtaatagagacacacttagtcccatgggaagcgcagcaccgttgtaggttctttctcctgtcccattagcgacctca

SEQ ID NO: 65538 - DNA, 3654 bp, Homo sapiens
cagacactgaaatctgatgttttgttgggaactgctgcattagatatttatgaaacattaaagtcaaacaatatgaaacttgaagaagtagttgtgactttgcagcttggaggtgacaaagagccaacagagacaataggagacttgtcaatttgtcttgatgggctacagttagagtctgaagttgttaccaatggtgaaactacatgttcagaaagtgcttctcagaatgatgatggctccagatccaaggatgaaacaagagtgagcacaaatggatcagatgaccctgaagatgcaggagctggtgaaaataggagagtcagtgggaataattctccatcactctcaaatggtggttttaaaccttctagacctccaagaccttcacgaccaccaccacccaccccacgtagaccagcatctgtcaatggttcaccatctgccacttctgaaagtgatgggtctagtacaggctctctgccgccgacaaatacaaatacaaatacatctgaaggagcaacatctggattaataattcctcttactatatctggaggctcaggccctaggccattaaatcctgtaactcaagctcccttgccacctggttgggagcagagagtggaccagcacgggcgagtttactatgtagatcatgttgagaaaagaacaacatgggatagaccagaacctctacctcctggctgggaacggcgggttgacaacatgggacgtatttattatgttgaccatttcacaagaacaacaacgtggcagaggccaacactggaatccgtccggaactatgaacaatggcagctacagcgtagtcagcttcaaggagcaatgcagcagtttaaccagagattcatttatgggaatcaagatttatttgctacatcacaaagtaaagaatttgatcctcttggtccattgccacctggatgggagaagagaacagacagcaatggcagagtatatttcgtcaaccacaacacacgaattacacaatgggaagaccccagaagtcaaggtcaattaaatgaaaagcccttacctgaaggttgggaaatgagattcacagtggatggaattccatattttgtggaccacaatagaagaactaccacctatatagatccccgcacaggaaaatctgccctagacaatggacctcagatagcctatgttcgggacttcaaagcaaaggttcagtatttccggttctggtgtcagcaactggccatgccacagcacataaagattacagtgacaagaaaaacattgtttcgaggattcctttcaacagataatgagcttcagtccccaagatctgcgaagacgtttgtgggtgatttttccaggagaagaaggtttagattatggaggtgtagcaagagaatggttttttcttttgtcacatgaagtgttgaacccaatgtattgcctgtttgaatatgcagggaaggataactactgcttgcagataaaccccgcttcttacatcaatccagatcacctgaaatattttcgttttattggcagatttattgccatggctctgttccatgggaaattcatagacacgggtttttctttaccattctataagcgtatcttgaacaaaccagttggactcaaggatttagaatctattgatccagaattttacaattctctcatctgggttaaggaaaacaatattgaggaatgtgatttggaaatgtacttctccgttgacaaagaaattctaggtgaaattaagagtcatgatctgaaacctaatggtggcaatattcttgtaacagaagaaaataaagaggaatacatcagaatggtagctgagtggaggttgtctcgaggtgttgaagaacagacacaagctttctttgaaggctttaatgaaattcttccccagcaatatttgcaatactttgatgcaaaggaattagaggtccttttatgtggaatgcaagagattgatttgaatgactggcaaagacatgccatctaccgtcattatgcaaggaccagcaaacaaatcatgtggttttggcagtttgttaaagaaattgataatgagaagagaatgagacttctgcagtttgttactggaacctgccgattgccagtaggaggatttgctgatctcatggggagcaatggaccacagaaattctgcattgaaaaagttgggaaagaaaattggctacccagaagtcatacctgttttaatcgcctggacctgccaccatacaagagctatgagcaactgaaggaaaagctgttgtttgccatagaagaaacagaaggatttggacaagagtaacttctgagaacttgcaccatgaatgggcaagaacttatttgcaatgtttgtccttctctgcctgttgcacatcttgtaaaattggacaatggctctttagagagttatctgagtgtaagtaaattaatgttctcatttagatttatctcccagtgatttctactcagcgtttccagaaatcaggtctgcaaatgactagtcagaaccttgcttaacatgagattttaacacaacaatgaaatttgccttgtcttattccactagtttattcctttaacaacaatattttatgtgtgtcaaaagtctcacttgggagtagtgtttttttcttttagacattctgcagacatgcagggaagtcctttggtaactgcaatatacaagattttcctattaagcctcttggtaagaggcatttgttaaaagtgcaagcttactcctgcttctggggatgtgagcaaaattcgggcttgtgttctccctctcattttagtctgacttgactattgtttttcctttctggcgcatgaatccatacatcattcctggaagtgaggcaagactcttgcatctctacaaagtagttttgtcaatttgaattcagggaaaagttggtcacagcctgcaaatgacttcatttggaagtctgattgtttcagttgcctgacaaatactacactttacaaacaatgttaacactgtgattccttcattgttttaagaagttaacctagggccgggcatggtggctcatacctgtaatcctagcactctgggaggccgaggcaggaggatccctttagcccaggagttaaagaccagcctgggcaacatagggagaccctgtctttttttttgggcagcgtggtgggggataaataaataaaaggaaaaaaaacttagcctagaattagaattaatttaattgaattcatctaaagatgtctctggtgatttttatatgttccgctatataattgatgctttatagttttatcataatccaacaacttcagttatatttaattattgttaaggagtttaagactagaaagactagagtgctttctagtccaaatagaggtcagtgaaacagcttttgacatcagattttcatttgagagggagagctgtggtactggctaaaaagaaaggaagataacatccagtaaccacaggaatatattctctgtgaattaaaagtcttcaaagttatcatttctctgacatatgttggagtagtcatttccattctttacattgtcatgaactggattgataaccctcatctgcaatattttcacccctaaaatttttaacag

SEQ ID NO: 65539 - DNA, 1283 bp, Homo sapiens
  misc_feature (1)...(1283): n = a,t,c or g
gatttcagttgcctgaaagctgtaagtctgcttttttaaaagagaaattggagttaagcagacttttcattttttgatcatgaccctggaaagagaaatatatttgacatcaaaactcagcacatatccttggtctatatatacacatgaaagtttcataaaacaatacactgatattttccatgctgtattctatttcattttttaaaatgctggttgtatcccattaaactggtttcaaaataaatataacatgtacacaacaacaacaaaaaaaaacactgggttagagggccagtaagctcagcgagtatcagcaactgagacttcatccttgtctcacaaggactaaaaagagaataatgttctcattatgtggttcaatgccacacccatgtatctgagatatacatgtcacaatctgggagaagcctgtcctcaatttactttaaatacccaattctgcctagaacatgaattagacacatagtaagctcttgagtgaagtgcagatgataatgacacgatcacataccacttaaaaatatcttaacacctttacttagatctcatctcatacttgtagcatttcttcaaatttactttgaaaaaagagcttcactgtgtgtggttgtcatacacattcttctacccaaccatggacctcttttttcctctcaggcgcacttcatctaatttttttagcactggcctggcctttttggaggaggtggagtagctcttcagaaaggcttcaaacacagtttcagtgttgggatgggtactgaggaaggccttctccaggacatagaggtctactcccttatcctctggaagtgctgaaatgaaactcagcccaaagtctatgagcacaatgttcagctgttccagggggggtttcaggagcatgttggaggtggtgagatcaccatgaatgaggtcttcatcgtgcattcgagccaaaacctgcccaattgtcttggctaagttggagagaccctggggagtttttttcagtctccatagtggactgaatataatctcgaacagtcactgagccttcaatttcttccatatataagcagttggaagcatagtccacaaaaaagacaactggggcagatattccagcgcggcgacagcggaggagcgcccgggcctcctgcaccgtccgccgtctgccaagccgcgcctccagcgccgggtgccggtagccttgggaagcggtgcttnnttncnnggccttgctagccccctggctcattnnccccggcccggtctcc

SEQ ID NO: 65540 - DNA, 1583 bp, Homo sapiens
ttttttttttttggatttaaaaacactttatagtgtgttgtttttattgagcgctcacacccgaaggggtggcggcggatgctgtgggtgagtggggccgcctgagcctgctcgggccacatccacacatccacagagtccacctggactcggaggaaggccgagaggacacggacggtggccacacccacgctgcagtgaaggcccaagtgtgatggcagagaaagagggaaagttggagaaagagcggtatctgacaataacttttctcttggatgttaattttttggtctataaattggaaaggaaggctcggactgaaataaatacatttattctgagtaatgaccttttgggagcagtgtccgtcaactctgcttcgagagcgtctccacgtgagcagcagcgcctgtctcgcgcctcgccgaggcggaaccacaccgggcctccagcggaggcggctttctcctgtgtctgtgaagggaagtagcaggtgtgtcactgttcttaatggagcggacaatgatgccttttctctgacagaaaaatgtccggcttaactatgcaagacaagacttggtcgtcacgttcgcgtctctagttgattttgtcctggaatatgtacaagttattggtggcagccacggcaatgacattgtccacggggtgccaggctgtgtgcaggatcttcttgttgaagtccagactgtccacactgatctcgtctttcctccgcttaccccccgtacacaccttccggggtttgaggctggcgcgcggtttgctgctctctctcgaggcctccagggtcacatccctccgcgtgtctctatcaaacatcctgaagaagttgttataggacccggtcatgatggcgctatccgaaccgttccagcaacactcaaacttgtcaaagatgcagtcgttctcatagagagagcagagcttgctgcgcaggtactcgtggacctggtgggtctccaccggcctgctctccatgttgaggtcccacaccttcaccgacaggtagtctctggtcatcatgtaccgcccactatgactgaattttacatcggatatggatgaaattatttctgagaagaaggacctactgctgggatcttcaggctcttcaaaaaacttggagtgtctgtcgcacagggccgaggagcgcatgtcacacaggcggatggtccctttgctactgctgtagacgaacacgttgcactggtgcgggtggaactcggctgcagtgatgacttcggtcagctcctccatgttagcaggcttgatgtccacgatgttaaagcttctatctgtgatttctaagtgccataaattaattctcaggtcatccgtagcgccgtgatcctaaatgggtctcgaagtcttccatcttcgtctttcaggttataaccttctgctcttttatcccgttcacttattttccataattttatagttttatcatttgtagacagtagaaaatgagcagcattctgttgtggtaaccacctaattttattaattttttcctcaatttctagacttttcaaatagtcgatctccggttcatgactgtg

SEQ ID NO: 65541 - DNA, 2149 bp, Homo sapiens
acgagcctgcgttttccggccagaggacatgatgcagggggaggcacaccctagtgcttcccttattgacagaaccatcaagatgagaaaagaaacagaggctaggaaagtggtcttagcctggggactcctaaatgtatctatggctggaatgatatatactgaaatgactggaaaattgattagttcatactacaatgtgacatactggcccctctggtatattgagcttgcccttgcatctctcttcagccttaatgccttatttgatttttggagatatttcaaatatactgtggcaccaacaagtctggttgttagtcctggacagcaaacacttttagggttgaaaacagctgttgtacagactacgcctccacatgatctggcagcaacccaaatccctcccgctccaccttccccttcaattcagggtcagagtgtgttgagttatagcccttctcgttcgcccagtaccagtcccaagttcaccaccagctgtatgactggttacagccctcagctgcaaggtctgtcctcaggtggcagtggttcttatagccctggagtgacctactcgcccgtcagtggttataataagttggcgagctttagcccctctcctccttctccgtaccctaccactgttggaccagtggagagcagtggattgagatctcgctaccgttcttcacctaccgtctacaactcacctactgacaaagaagactacatgaccgacctacgaactttggatacttttctcagaagtgaagaggagaaacagcatagggttaagctggggagcccagattctacctctccttccagcagtcctactttctggaactatagtcgttctatgggggattatgcacaaactttaaagaagtttcagtatcagcttgcctgtaggtctcaggccccatgtgctaacaaagatgaagccgatctcagctctaaacaagccgcagaagaggtctgggcaagagtggctatgaatagacaacttcttgatcatatggattcatggacagctaaatttagaaattggatcaatgagacaatattagtgccacttgttcaagagattgagtctgtcagcacacagatgagacgaatgggttgtccagagctacagataggagaggctagtattactagcttgaaacaagctgccctggttaaagcgcctctcattccgactttgaacacaatcgttcagtatctagaccttactccaaatcaggaatacttgtttgaaaggatcaaagaactatctcagggaggttgtatgagctcatttcgatggaacagaggtggcgacttcaaaggacgaaagtgggatacagacctgcccaccgattctgctatcatcatgcatgtattttgcacctaccttgattccagattacctccacatccgaagtatcccgacggaaaaacttttacttctcagcactttgttcagacaccaaataaaccagatgttacaaatgagaatgttttttgcatttatcagagtgctatcaaccctccccattatgagctcatctaccagcgtcatgtatacatacctgccaaagggcagaaataatatgtttcatacattgttgatgtttctctacatcataaagaccaaagagtcaggaatgcttgggagagttaatcttggtctatctggtgtgaatatattgtggatctttggcgagtagcaagtcatatatttaattctgacatttagactatttcactgaaccagaagtcgaaactaaacatctctgagccactgactcttctgaaataaaatacacatgggtgtatgttacagactctttagatttaacagaaaatgtagctgttatgaaatgtaattgtaaaaatatgtcccgtatcttctatatcgagacattgcctttaattttatatcgcttttcagaaatttcagttgactacaaaactgcaacccttcggatttttattgactcaaaatagtgccattccccttaatgaaatagattttgagtctttttttcattgtaacccccaaatgagaatcatctacctgattcttgtaccaaaaaaaaatttttttcagtcttttttttttttaaagagggtttttgccaacccaaactggagggcaggg

SEQ ID NO: 65542 - DNA, 1776 bp, Homo sapiens
  misc_feature (1)...(1776): n = a,t,c or g
ttttttttttttaacatattaccacatccaacttctttattcttgagaaaacaaaaaagtccaaaatcaaaggaaagcacccgttttaaaccctcatatctttctcagggctcactgcagtctggccatatctcaagcaggtctgtccaatggcttggaacatagacttttgcagtgaaactttaaaaacattacttgaattaggattacacaaaaaaaactaaattctaagtgagcacaactatcgctgagaccctgaaatttcaggaaataaacatggttcaaaactcaaactgttcatcaaaataattacgcaggtcagccaccactgcagaaccatcactgctcagaggaattgagtcagcaatgactgatctcatcatctcttcattagcacataagcggttcaacttgggatacgcaaggagtctctgcagaggtacgaaaaatttatctccaacacagaagggtgtgggagagttctctatcttggccttctcaacctctgtgaagactggtccaaagcatgggacaggggcctttgagccaccaatgtctttgggcttatcaccccgttccccagcctgttctttccgccttggcaggtggctcactcttaagctttccacttgttgggacacctcattaaccaacacaagtttaaagaacctttcctgctgtaagcttgggtatgaggtggtaaaaacagctttataaacatgctgatcatgctgctctgaaagacatgattctgttgcctttcctccatttttccggaagattcctatctgggtacagtatccaacattctcagctccagctggtggttccccgacaccagtaaactccacagagtaatcatagcgatttgccacatataaagcccaggtctgaaactccattctggtccactcaaatttatgatctgaatctcttaaggtcactgatggaaacaggggattgaattcagagtttggtgtgctgatgacaatcatggatggagacaggtacccaaataccacttcaggacaatctggccagatcacctgaatccaaatgttctattaattcaatacacgttatcaagtcaaatccaagcaaacgagagtctctctccacaacggagccatgatacaatgtgatggtcaaattcagatcccgaggtttcagaaaatcccccaggaaaggagctaacgaatcccctctccatcgtaatttatcctcattaatatctactccaacaagcaattcaatgcatggattgacttttagcagccttaagagtgaagtatcaccacatcccaggtctgcaaccttcttaggctcatgttgatccactaaatttttaacgaactggtaccgctgtctgtatagtggaggtttaaactgaattgccgtctccctgggaacttcttcaaaattaccgtcaaccacactactgcactgtagattattttcttccattttgtttcgaagttttgttgaaacaaaaatgaagatttatccttcaagctctatttgagagaatcagcactgactcagctcgtgcgctctcacggtcggccttgggccccgggagcctcatggtgcgccgagctccgtccctctaggctctcagttccaaggcgtcggttttgcgtctcgtaacggccgctgtggcgcatgcccagaagccattttcaaggtcctcttccgaaccttggcgaggaccccctcgtccaagctggcgtntgtggtttcagatcttcagttatcaggcngggggtctctaaaccc

SEQ ID NO: 65543 - DNA, 785 bp, Homo sapiens
ttttttttttttcaggtgaaattaaactgatttaatcagcacacattatatacatgtatcaaatttcacactccataaatatgtataacttatatgtcatttaaaaataatgataaaattatatccagattcaagcgcctcttgtagcgcttcccacagtcctcacatttggatgggttttctccactgtggtactctttgttggtctttacagtatgaccgggcatacaagcctctttccacagtcttcacatttcaatggctttctttggcagtggagtttcttatgattcaaaatactagaagcatgtctaaagctcttcccgcagttatcacagttataagatctctctcccgtgtgggttctatggtggaagtcaagacctgacttactaatgtagcccttcccacactcctcacatttgtatggcttttctccagtgtggactcgttgatggaccaaaagatatgaggaccatttgaagctcttcccacattctttacaattatatggtttctgtcccatatgaatcatctgatgcttatgcaaatctagcctatcaatgaaacctcttccatacttttcagatttgtacagtttctctgctgtgtggaccatgcaatgcctattaagacttgacctaagacagaagctcttaccacatatttcacatttgaatggcttctccccagtatgaattctgtgatgtttctgaagctggaaattgtgcatgaaagccttcccacatttctcacaattataaggtttctctcggacgcgtggg

SEQ ID NO: 65544 - DNA, 770 bp, Homo sapiens
aacgaatctggctctgcctgaatcatcgatgacagggcaaaggcaactggagcagatgggagctctggcaaacacgggaggagggtcttggaagagcccccgtccccagcggctagatgcttacacatggacgatctactctcctgactgtggcctcatcaggctggtgcctaccatctgtggttgtaaaggtcccaaagagggcctacggaaaggacaggtgggctggaaggaatgtggagaatgacccccaggacaggggaggaggagactggccccatcaatccagttcacagccgggaaaagtgcaggaagacagacaaacgaccccaatgtgggcgaaggacacacctccaaggactggagccgcagagtccacgtgacaaggagacccaggatagaaacactgtgcggaggacacggtgtcaacctcggaaggggcctcctatgctttccacaccaaattcccccacgggagaaaccctgccacaaggcccaggaaaccacagaccccaagccaactgtgcctagcacagacaccaaggaatgacagcgatgccagtgacgccaggaggacttggcccctagccccatcatcggctgtatgatgattggtgtgtctgcggcctccctctcgtcagactgcagccttgggggacacgtagaactctgtctcctcgccctcaggggccttgagcttacacttcccgcagcacagcagcggttgaagcagcaccacagacagcagcagcagtagcagcaggtgagga

SEQ ID NO: 65545 - DNA, 2069 bp, Homo sapiens
ggcacgaggcccagtggtatgggcctagtccagactgccacaagtcccacccattctaccacaagccccacccatcccaccacaagccccatccttataaatgtaagcccttccacttctctagaacttgctaccctctccagcccctccaaacactcagaccccaccctcccaggcactgactcccttccctgtagtcccccagtctccaattcctacactcaggcagaccctatggcccccagaactccccacccaagtcctgcccattccagtaggaaacccctcacaagccctgccccagatccctcagagtctacggttcagagtctaagccccactccctcacccccaacccctgcaccccagcattcagacctttgcctggccatggctgtccagaccccagtcccaacggcagccggagggtctggggacaggagcctggaggaggcactgggggccctaatggctgccctggatgactaccgtggccagtttcctgagctgcagggcctggagcaggaggtgacccgcctagaaagtctgctcatgcagagacaaggtctgactcgcagccgggcctccagtctcagcatcactgtggagcatgccttggagagcttcagcttcctcaatgaagacgaagatgaagacaatgatgttcctggggacaggcctccaagcagcccggaggctggggctgaggacagcatagactcacccagtgcccgccccctcagcacggggtgtccagctctggatgctgccttggtccggcacctgtaccactgcagtcgcctcctgctgaaactgggcacatttgggcccctgcgctgccaggaggcatgggccctggagcggctgctgcgggaagcccgagtactggaggcagtatgcgagttcagcaggcggtgggagatcccggccagctctgcccaggaagtggtgcagttctcggcctctcggcctggcttcctgaccttctgggaccagtgcacagagagactcagctgcttcctctgcccggtggagcgggtgcttctcaccttctgcaaccagtatggtgcccgcctctccctgcgccagccaggcttggctgaggctgtgtgtgtgaagttcctggaggatgccctggggcagaagctgcccagaaggccccagccagggcctggagagcagctcacagtcttccagttctggagttttgtggaaaccttggacagccccaccatggaggcctacgtgactgagaccgctgaggaggtgctactggtgcggaatctgaactcggatgatcaggctgttgtgctgaaggccctgagattggcgcccgaggggcgtctgcgaagggacgggctgcgggccctcagctccctgctcgtccatggcaacaacaaggtcatggctgctgtcagcacccagctccggagcctgtcactgggccctaccttccgggagagggccctcctgtgcttcctggaccagctggaggatgaggacgtgcagactcgagtggctggctgcctggccctaggctgcatcaaggctcccgagggcattgagcccctggtgtacctctgccaaactgacacagaagctgtgagggaagctgcccggcaaagcctacagcagtgtggagaagagggacagtctgcccatcgacggctggaggagtccctggacgccctgccccgcatctttgggcctggcagcatggccagcacagcattctaaactattcacccatgggttcctggtgcccctttccccccactttcagggctcaccaggcactggcagggagggtaagggctggctccagatacccctcccccacagattcctagcaatgaaaatctaatatattcttctgttgcccctggggttggagagtcagtgcctgcagtcaagtgcctcccagcctcggctcagcacatcccttgccacaaatcagtgtctggggcttggccaccctgccgctgcccagccacatcccttggttttgtattttatttacagagttttacagaaaataaaaaagcaaaatgtctttcctaaaaaaaaaa

SEQ ID NO: 65546 - DNA, 1643 bp, Homo sapiens
acgccaagcttggcacgaggcgagagacccctcgggaccgttcctcatgtctgtggaccactgtttctccatcaaaggccaaggcactgtgatgacagggaccatcctttcaggctccatcagcctcggtgacagtgtggagatccctgccctcaaggtggtgaagaaggtgaagtccatgcagatgttccacatgcccatcacttcagccatgcaaggagaccggctgggcatctgcgtcacccagtttgaccctaagctgctggagcgcgggttggtgtgtgcccccgagtccctgcacactgtccatgcggccctcatctctgtggaaaagataccgtatttccgggggcccctgcaaaccaaggccaagttccacattacagtgggccatgaaacagtcatgggccggttgatgttcttcagtcctgctccagataactttgaccaggagcctatactggactctttcaacttctctcaagaataccttttccaggagcagtacctgtccaaggatttgacaccagcagtgacagacaatgatgaggccgacaagaaggccggccaggccacagagggccattgtcctcggcagcagtgggccctggtggagtttgagaagcccgtcacctgccctcggctgtgcctggtgattggctccaggctagatgcggacattcacaccaacacgtgccggctagccttccatggcatcctgctccacgggctagaggacaggaactacgccgacagcttcctgcccaggctgaaggtgtacaagctgaagcacaagcatggccttgtggagcgggcgatggatgactacagtgtgatcggccgctccctgttcaaaaaggaaaccaacatccagctcttcgtggggctcaaggtgcacttgtccactggggaactgggcatcatcgacagtgccttcggccagagcggcaagttcaagatccacatcccaggtggcctcagccccgagtccaagaagatcctgacacccgccctcaagaagcgggcccgggctggccgtggggaggccaccaggcaggaggagagcgccgagcggagcgagccctcacagcatgtggtgctcagcctgactttcaagcgttatgtcttcgacacccacaagcgcatggttcagtctccctgagtgtccggtgacctcccccagggcctccttgcccagcccagtccaggctgctgtgccaaatcccaaccagccacgcctcagcctctcccagtctctccctgcagtcctgcagcagcagcccccacccccaagcttggtgctgagccctggtgaggagctgagggggatgggttgctggggccaggagggtctctcctccagcccctgcacactcccacccaggacagcccccagcccaactaggaaagggccatgggcagagggctggtagccagtatcttccactgccccatctgttggccacctgcaggccagtctcaaccctcccccaggtgggcaggcacttgatggctacaaataaatgtcccgtggccccagcccactctactggtgtctctctctctgtgacttcactaggtccgccgccctccccagctgtgttccaaggggaatctcagaaatcccaagagttcctgcccag

SEQ ID NO: 65547 - DNA, 914 bp, Homo sapiens
  misc_feature (1)...(914): n = a,t,c or g
cttctttttaatagtgaaagcccgcaggaagcaagcagctgggagaccagagaaaatggatgatgaagaccccattatgggtaccatcacctcggaagaagccctggccagacagccccggagatcaagcatctcctcctggggatgcccctcccttggaagaacaaaaggagctccattatgcctcccttagtttttctgagatgaagtcgagggagcctaaggaccaggaggccccaagcaccacggagtactcggagatcaagacaagcaagtgaggatttgcccagagttcagtcctggctggaggagccacagcctgtctgggggaaaggacaagtcagggaccacttgctgaagcacgaagagcccttgtggcaatgttaacattaactgatgtttaagtgctccaagcagagcagaaagaaaacagatgatggaattagagaggtgggctcaaatctaggccctggcactgtcatcaagcaattcactgcatccctctgtgcctcagtttcccattctgtaaatcagagatcatgcatgctacctcaaaggttgttgtgaacattaaagaaatcaacacatggaaatcaaccaacatgggtcctggaacagggcgttgtgctcagtgctttctggtctctcttccttgaatagaaaggtcctgctggcaagttctctcaaggctggggatgaccaggcacaaaaaacagggcagcaatatgttggtgtcactccccttcccaaaactcttcgaagactccctaggaaagaccagcccctcagcctggcacttggttcatgatgtgggatcttatatccttgccagagtcatatctttgcccacttttacctgcaatccttgcatcatattccttgggttccagtcnttcatttatgagaccctaggg

SEQ ID NO: 65548 - DNA, 1886 bp, Homo sapiens
  misc_feature (1)...(1886): n = a,t,c or g
ccagcctatgccggttgttttaccccctttaccccttaaaatttttttttttccctaaagcctttaatttttgtagggaggttggcccaatatgtcccccccccaaaataagggttctttcccaaaattcccaggtaggtttttattcggccccccataaggaaaaaaatttttccttgcccgccccggttaactttgggccccccaagggttcttttaaacggcccccccttttttttttttttgccatgccacagccaaggggcctttattggatggtgagggcacataggagcaggcaggtggctgctagatggtgttgcacaccttctcagggtgcagtggtgcccggatgtccagtctgcgagtcttgctgtccttgtcgatgatctccagacgcagcttggggaggcgcttctcagcctggggtgagggcagttctgggcttttgagtagctgcttgtctgagtcctccaccgtgatgcgcaaagtacagccccctggcagcaggtcctgctcatagggctgctgccagctggttcaccacacggcgttctacctcatgtttgatggagcgggcgccatagtgcacattgtagccgtcgaccagcacatctgccacctcgcggtcccagagcagcgtgatgttgtgcctttgcttggctctcttggcccagaagtttagttccttgttgacgagttggatgagctccgagtggcagaaggggaggaagtagacgatctcattgatccgtcccagaaactcatccctccggaagtgagctttcaggatagggcgaatcacattctccttgaagttctttgagatggtgatcttgtcacttatctggacatcccccaggttttcggcaatacggttacggctcatctccaaagcttcctgcctcagctgcagcgcgtgctgtgcgatctcgtcgctggccacattggaggtcatgatgaagatggcgtccttgcaatcaatggtcttcccttttccatctgtcagccggccctcatcaaacagctgcagcatgatggtgagcacatctggatgggccttgtctacttcatcaaagagcaccacagcattggggcactgcttcaacttcttggtcagctggccaccctcctcatggccaacgtagcctggtggagacccaataaacttggccacctcgtgtcgctcctggaactcggacatgtccagcctgatgaagccctttttagcatctttgtgcatatatttggctgtctgcttggccagctctgtttttcctattccagatgatcccaagaagaggaagaccagagggtgttcttcatcgtaccagccattctccttcctccggatcgcagcacccactgtggcgatggcgctctcctggccaatgatgtgctcctttagtcgctgctccagggggaagcggcgccgctcctcagcctcacgcttccgctgcttctcttggtacttggcttcagaagtcctcagaagcttcatcacttccccttctcgggcataatccaagggtgtgtgtcccatttcattcctctgcagggggttggctcctccatcaagcagctccttgacagtgcggtagtcatcagcaagaacagcatagtgcaaggccgtgcagcccttgaaactggcgcggttgttcagcctgttgttgaagtcatcctctcgggtgatcaggacttccaaagaatggattccctgttccttggcagtcttgtaaacactgctgaaatcatctccaaggtttggatcagccccagcagcaagcaggacctgtaccacactgttgtttcggttgatgaattccaccgcactggactaatggtctacagtnnccnanggnctcgattctcttnnnnncggacct

SEQ ID NO: 65549 - DNA, 983 bp, Homo sapiens
ggggtcctctcgctctgtcgcccaggcgggactgcggactgcagtggcgcaatctcggctcactgcaggctctgcttcctgggttcacgccattctcctgcctcagcctcccgggtagctggggctacaggcgctcgccaccgcgcccggctaattttttttgtatttttggtagagacggggtttcgccttgttggccgggatggtctcgatctcctgacctcatgatccgcccgcctcggcctcccaaagtgctgggattacaggcgtgagccactgcgcccggccagaatatagctaagttttaagcaagtgttcactaggcataagaatatacatcctggagagaaatcacagaagtgtagtatatgtggcaagaatactacttaaaggtcaaaacttgtggatctataactcaaagtgcagatatgctttacaaatgaaatgagggtggcagaagcttcaccagagttcagtcactacttgagagtttatattggaaagaaatcgtataaatgtatgtgctagaggcttccccgaggtgtctgaactcactagacctcaaaatatacatctttgacaaatgtaatgtgtgtgctaagactttttacccgaacatccaaatggaaacatcagagtattcatactggagaacagtcttacaaatgtaacgaatgtggtaagcctttttaaaaatcaaatgggctgggtatggtggctcacacctgtaatcccagcactttgggaggccgaggtgggtggatcatctgatgtcaggagtttgagaccggcctggccagcatggtgaaaccccatctctactaaaaaatacaaaaattagctgggcagtggtgggcacctgtaatcccgctacttgggaggctgaggcagaagaatcacttgaatccaggatgtggaggttgctgtaagccgagattgcgccattgtactccagcctgggtgacaagagtgagactctgtct

SEQ ID NO: 65550 - DNA, 3848 bp, Homo sapiens
ttttttttttttattctctcataaaaatcatttattggacacatcagaaatgacaattttttctagtatagtagttgtatgcatctgtaattgcaattcagtgtaaactacatgttacaagtcactagaaatctaattagcaggatgaatttaataaagaacaagaggaactatcgagtctaccacggacccagccattgagtctcattgggaggagttaaatcaaatatcaaactaggtgttgccctgcaacaggtttttctgtaggccaaggaaaaaccaaggacacacattaaacagggattaggcacccattccataaattaggggtacacttaactagaaaaagattgtaactgatagaaataatctaaataaagtaagcacaaaagtaaataattagctatttacatatattcctttttgccaaaactttaatttgttagctttcccatcctatctcttcccttctatttgttattcttgttttttcatggtgaatttcttggctcactgaaaaatatttagacaactaattagaacttctttccgggtcctacctttcctaaaactttatgacaaactaatgaatttcaagggtaacctatgtaagtctatctctatatagaagtaagatgcattattattctgctatcagtcatagtaatgacatacagtcccatgtttttccaaacattgtttggactactccagaaaattaggctgtgaatggcagcagagtggatggatttttcattcataacaggcacagatagtatatatggagacaagcatgtttatcctgagaatgtgaatgctgtggactgcaactcaagatctcccattactgagaatgggtcctttgccctctggtcactcttttttttttcaactgtcaatttttaaggcgtggtatcatagcagcatcagcaaataagaatgctgacatcatttctaccaagaagggctctgtgatgagtggcagcaggtaccataattaaatagtgcagctgaaaaggcattgagttggtacatttctggtgctatggccagaatgtgtggatttttagcatcattctaggaagcctgaaagatcttgcccatgagtctctttgacccttgcccatttcctttctagtacatatgaccatttataattattttatttttgctttttctcctactggaatataagctccgaagggcagagaccatgcctgtctgttcaccactgtgtccccacagtgtcctagaacataatgttctagtgtcttgaacagtgcctggtcaatagtaggttctcaattaaaagcttttattaaataaacgaaccaaatcattaagtcccctggtttgcctgtgtcttagagactttccaattttatacagtggccagggttctggcctatcctaattatagagccatcctaacgatcctaccctgatgtgaacctgtgtagcggatatttttgtgcttcaatgagtagtaaaacttctcagtgatagattcattctcccaaagcttagctctgccagagctaacgctacaggagaggtaagagggtaagaacattctagcaggtaagctgtatgctacaaattcagctcattcttccctacctccccctacaacctcattgtttgacagaaagcttaagaaaaaaagttagcaggagaattttctcctggcggtgccagtccagtaagtcaccaataacctgatcagaaaagaaagaaaatataactcacctacataaaaaattaagttaaataaaagcaaaatctgggagtgggaaccaagtgacttggtgggctgtctaggtcctttgttggttagaattgttggacatggaagcggaagcaggcatgacagcggaggagaggttgaaagggaaaagggcagagctgtgggtgtaaagactgcagaggaccagcttttctctcctccttctcccactcctgccaactctgcaccccaccacggctggctgagctccttgctgtggctctcgcaggcggaggtaagaacaggcagctggcgcctccacggcacatccttaggctattaatgctctgctggagtagaagtcggggactgggagcccggtgtgcagcgtgacctgcacgttcctgttcaggctgaccgcagggaagaagaggccctccacgttatcaaatgctatgggaccttgttgttcatcgttgataaaaaatgtcaagttttttctatttaagtcgaggaggaccccaattgtggccccttttgtgatccctccctcagttctgttggtgtgcgagttgttgtgcatgaaccagctccggttattgtccacatacattgcccaagctttgtcgtcttttcctaacatcacatccttcatcacgtccatgcgagccacaccaaaggcaggatcagggtggttgtcatagcgatctaccgtgagctcccagtagtggatgcccttggagaagccagtcttccctagcgccacccggtcatcatagctactacaggtcactgtcaggttgtcattggagaggatgatgtccgagtgcgccgagccagggtcgaaagcaaaccaggccacctcagacgtttggaggaccagggtcttgctgtacgggctgactcctgttttgttgaaggccttgacccgagcgttgtatgtgctgttgaagtgaagaccatccacagtgcacattgtctccttccccacatacacctcccggaattgaccaccgttgccatcatccagctccagaatgtatccatcggcgggcaccgtggacagaggtggctgtttccaggacaacgtagcgctgttgttgtgggtacaacattcctccagctgtaggataggggttgctgggactggagaggaagctttcacttgcacgaaatccagctggtggatggattgcagcagagggctgttgtccagactcaagtcaaagtccgtggtcatccttggagtgagtgtgcctttaccccactgatcctcagtcaggtgcactcttcttatgagggcgtcagaaatctgcaaaaaaccactaggatcattttccttaatcacctccaagcagtactccatgagacctgtggtctggcgcaatttcactgtgcagtgagagatctgatctcgaaccaccttcagcttgtgctcatgctccttgttgacgcgggccagcagctgggcttttcttctgttgagggcatcgatgagggcatcacattgggccaccagacaggcttcaaactccacactgttctcctggatctgctggaccatgttgcgcagctgtaccagaaactccttggcttctttggccctgtctgacagtccgttcagcgcctgggagagctggctcttatgtagtttccacatggcccccagagccttgacttcgtggctggagtgtttgccctcctccaagcactggtagcacacgggcatcttgcattgcacgcagtacatgctgtggttctccagctcgtggtctgtgcaggtggagaccttgcgtgggctcagcctccggctcacacgaccctgggccgggggcaccaggcggtgcttggctaggggcccccggggcgggtggcagcgcaggcggcacggatcgcagtagaagacatcgcactgttcgcacatgacggtggcttccttgggcgccttctcgcagagctggcacttgagggccgcggctttgctctgctggtagcggtcaattaccccttccagtacgcgattcttggggaagccgcggagcccccggtcatccaggatgaggctgcggtgacactgggggcaggtgatacaggagttgcggggcaccggggccagggccgg

SEQ ID NO: 65551 - DNA, 6995 bp, Homo sapiens
aacagaccttcctctgctagttctacatcatccaaggctccaccaagttctcggagaaacgttggaatgggaaccacccgccggcttggttcatccacccttggatccaagtcttcagctgcaaaagaaggagctggtgctgttgatgaagaggattttattaaagcatttgatgatgtacctgtagtacagatttattccagccgagaccttgaggaatccataaacaaaattagggaaatattatctgatgacaagcatgattgggagcagagagtaaatgctctaaaaaagattagatctttacttttggctggtgctgctgagtatgataacttctttcaacatttgcgtcttttggatggagcctttaaactctctgctaaggacctgcggtctcaggtagtgcgggaggcttggtatcacgttggggcatctgtcatcagttctggggaataagtttgaccatggagctgaagccattatgccaactatctttaatttaattccaaacagtggccaaaattatggccacatctggtgttgtagctgttaggttaattattcggcacacacacatccctaggttgatacctgtcataacaagcaactgtacctctaaggctgtcgcagttagaaggcgctgttttgaatttttagatttgcttttacaagaatggcagacacattcactagaacgacacatatcagtattagctgaaacaataaagaagggaatacatgatgctgattccgaagcaagaatagaagccagaaaatgttactggggtttccacagtcacttcagcagagaagcagagcacttgtaccacaccttggagtcctcctaccagaaagccctgcagtcccacctgaagaactcagacagcatagtgtctctgcctcagtcagaccgctcatcttccagctctcaagagagtctaaatcgtccgctgtctgccaaaagaagtcctactggaagtaccacatctagagcttctacagttagtaccaaatctgtgtcaacgactgggtccctccagcgatctcgaagtgatattgatgtgaacgcagcagccagtgccaaatccaaagtctcctcatcttcgggcacgacgcctttcagctctgcagcagctttgcctccagggtcatacgcatccttagatggtactaccactaaagcggagggtcggatccgcacaagacggcaaagctctgggagtgccaccaacgtcgcctctacacctgataatcggggccgcagtcgcgctaaagtggtttcacagtcccagcgatccagatctgctaatcctgctggtgctggcagccggtcaagttccccaggaaaattgttgggaagtggttatggtggacttactgggggctcctcacgaggcccacctgtgacaccgtcttcagaaaagcgaagcaagattcccaggagccagggatgtagccgggaaacaagtccaaaccgaataggattagcacggagcagccgtatccctcgacccagcatgagtcaggggtgcagccgcgataccagccgtgagagcagccgagatacaagccctgctcggggctttcctccacttgatcggtttgggcttggccagccaggaagaatacctggttctgtgaatgccatgagagttctgagcacaagtacagatcttgaagctgctgttgctgatgctttgaagaagcctgtgaggaggagatatgagccgtatgggatgtattctgacgatgatgccaacagtgatgcctcaagtgtttgctctgagcgctcatatggctccaggaatggtggcattccccattatctgcggcagactgaggatgtagcagaagttctcaaccactgtgctagttcaaactggtcagaaaggaaagaagggcttctgggcctgcagaacttactgaagagccaaagaacactgagtcgagttgaactgaaaaggttgtgtgagatcttcactcggatgtttgctgaccctcatagcaagagagttttcagtatgtttttggagactcttgtggattttataataattcataaggatgatttacaagactggctttttgttcttctcacacaatttacttaagaaaaatggggaggcagatttacttggatctgtgcaagcaaaagttcaaaaggctctagatgtcacaagggactcctttccatttgatcaacaatttaacattttgatgagatttattgtggatcaaactcaaactccaaacctcaaggtcaaagttgcaatcctgaaatacattgagtctctggccagacagatggatccaacagattttgtaaactctagtgagacaaggcttgctgtttctagaatcataacctggacaacagaaccaaagagttcagacgtgagaaaggcagcacagattgtgctaatctctctgtttgaattgaatactcctgaatttaccatgttacttggtgccttgccaaaaacattccaggatggtgccaccaaactcctgcacaaccacctcaagaattccagtaacaccagtgtgggctctccaagcaatacgattggccggacgccctcccgacacaccagcagcaggaccagccccctgacctcacccaccaactgttcccatgggggtctgtctccaagtcggttatggggttggagtgccgacgggttagcgaagcacccacctcccttttctcagcctaactccatccccaccgctccctcccacaaggctctcaggcgctcttactctcccagcatgctggactatgatacagagaacctgaactctgaagaaatctatagttctctacgtggagttacagaagccattgaaaagtttagttttcgaagccaagaagatctgaatgagccaattaaacgagatggcaaaaaggagtgtgatattgtgtcccgcgatgggggcgctgcctcccctgccactgagggccgggggggtagtgaagtagaaggaggccggacagctctggataacaagacctcactactcaacacccagcctccgcgcgccttcccggggccgcgggcgcgagactacaacccgtacccctactcagatgccatcaacacctacgacaagaccgccctgaaagaggctgtgttcgatgacgacatggagcagcttcgagacgtgcccatcgaccattctgacctggtggctgaccttctgaaagagctgtccaaccacaatgagcgagtggaggaacggaagggagccctgctggagctgctcaagatcacgcgggaagacagccttggtgtctgggaggagcacttcaagaccattctgctcctgctgctggagacccttggagacaaagaccattcaattcgagcactggcgttaagagttttgagggaaattctgagaaatcaaccagcaagatttaaaaactacgccgagctgacgattatgaagactctggaagcccacaaagactcccataaggaggtggtgagagcggctgaggaggctgcgtccacactggccagttccatccacccggagcagtgcatcaaggtgctctgccccatcatccagacggccgactaccccatcaaccttgctgccatcaagatgcagaccaaagtcgtcgagaggatcgcaaaggagtcattgctgcagctccttgtcgacatcatcccaggcttgctgcagggttatgacaacaccgaaagtagtgtgcgtaaggccagcgtgttttgcttagtggcaatttattccgtaatcggagaagacctgaaacctcaccttgcacagctcacagggagcaagatgaagctactaaacttatacataaagagggcccagaccaccaacagcaacagcagctcctcctccgatgtctccacgcacagctaatggcagtacctgtctcttgtgtagacctagaagcaatcggtggtgcctctcagagacctttccccacccccttcatcggctgcccagtcagtacaaggaggcccacaaatatttattacaatcagtattttggtcccttccagcttttctgtagaatcttactggtattgaatgtaaaggaagcaaggcctgtattgcagtcttcatacaaaacaaaaggaataagaacagaaaagagccatactgaaacatgtcttgtacagcctgctgagatggcgaaaccctgtgtgtggggtgcagttttttaaaaatcagagcgctctagccactacttggtagaaagtagcattttttttttcagttaataacatatttgggggtggggggggggtgttactttgtgttcatcctccttagcctattttcttgtgcgtatggtctgtgtggggcccctttcacagctggacaccacgaaaggggatatatctttaagttgtgttctgagacctactaaaaatgggaatcaagtcttggcaagaacagtctgaagatggccttttaacaaacgctgggaattttgcttgtcatatccagactggaggccgactgccctggctttcagcgtagaattgggagtgcaccctgacagtctccttccagctctccctaatcgactccaccgacaaggtccctaccccagagcttccatgcaaaggaattcttcaagtttaaatctggacacaaaaataagataaatgtatggcatcatttagggatgcctgagatggcagttcatgaagcacagaagataaagaagaagtctttcatctttactgctgagatccttgggaacactgttgtcatgggggctctgccaagaccctcatctctgggctacacggtgattcagattgagcaccaacttgtttcctcccctcaaagttctgcctaagccgttcagttctaacatggtctcagttaatctggtaaatggcatctttaccatcttagttctgacttctcagtttaatgtgggattaagagccaagaaaagcctagagagactggatatcacaattttttttaattttataaactgaagtagttccttgaatgtctgttgatgaaatagtcactgtttaaggaaaaaagtaattatgaggtgtagcagattgcagaaaaacaggattagaaacacacttaaaaagaacacacatttagagtctctcttcctcctcagcgaaccactaggccccctttttaaaaacacctttagagcctaattactccaataaaagtaactagaggtttggagtctggttaaataaattctgagtaaaattcttaagccaaatggaaattcttaatgcaatcatgaggacttctattgtctcttactgttgtattagatcctataaattgaactgatttttccataaggaaaatgcttcttttgagattaattctaataacgtatttgctattgcagtgcagagcccactgcaactgctaggactgaaagcagaggctgggtgccagagcacgtgattcttaacatcatttccacagacccctctgccctgaccctctgcattggatgcaggaagctgggaaagactgatgttgatttggaaacatgggctgaaaatgaaggccccatagtgcataggaacagtaaagccagggtgctgacgtgtgtgtgtgtgtgtgtgtgtgtgtgtgtgtgtgtggggtgttgtgtgtgtttgcgcgtgcaccctacacatgtgtggtacctcactgctgctgtttagggaacttgagggacgcgtttcaaggggttgggtattactgacgagctttggctcaaaatatagcaggaccaggtcttttgttgataagtactgtttgtttattaatatgtcattaatggtatttcttttttacactctacaagtgaattagggagtctcttgttgacccctttgttgcaggaatgggcgtcgggctaggttatccatgagtttctttattcctaatgcagttagaaagacctttctccttgagctctttgactcccagaaggtaccccagtccccagtgtacttagaaaggatctcgaacattgctggacgtcctcatagtactcacaaagggctagccttgaatgtcactcgcccagtcttcagtctcctgacttagagatacaatcacgtcacaggtctcttggcctcaatctgaaaactgctgccgccgcgccgaggagactcgcatgccgccaccacctcactgggagggcgccgagcccaccgtcgccccctagaccctgacagctgcagctgccttgccttgccgccgcctccctgcagggcccctgttccaatgaaaaacagaacacaaaagagcagagcacctaagcctgtctctgcctccctgtctacctgactggccagggcccaagacccccgctgctccactgcggggctgggcgggctgactccctgcttcctccaagctgctgcctcccctgcagccagggtctgggcagggtgcagccggtcctcggggcacgcagcttccttcaagtacactgtgtgtgcttcccggacctgcggcgatgccacgggcctgccttttctatgcgcctcactagcttaccaccctgtgcaggtaatgcaactgactttgtctcatcagtctttttctttccctgccaccctttatttatcaagcgtaatgttacactttaaaggacagcaaataagaactttgtagaatcccaccaggactttgctaacaataatgtttggaaataaagaagtgctctgaaaaaatatcagccaccaaaatagttatgttggcactgtgttcacacgcatggtccccacacccccaggttgggtgggtttttttgttttttgggtttttttggggggggggctttttcatgttacatccatatctgtatttatatcttatttgtttcactttcaagggtatcatggcaaatgtacagatttttttgttaataatgtgctaggatttgctaaaaaagaaaaaaaaaaaacccttttgagtttgccctaaaataaatgagacttaattcaaaaaaaaaa

SEQ ID NO: 65552 - DNA, 1155 bp, Homo sapiens
ttttgctctatgaagaaattcactttaacacttataactgtaagactttgcatacattacaacagtgcattagtgatacaagttgtaaaatacgtttccattcctttggattttgcatatgatggttttgcatcagtcactgcaggtagattgagcaagctttttgtgtttgtttttttaaacatgcattcaactagatatgattcagaatagattaatactccctttttatcattacagttagctaaaaaattgccagggcagtccacaaaacagaatttgctttaagaccaacccacagagtcagctggagactaacggcgctggggcctgctgggccgggatatagtcgtgtttagctaagtgtcgagagcattaagaagaaagtcctggttggaggcgcaaggcctgcagcaccagctgtggaatccccaataatgtgactgcacagctccgtcctcaaacatttgcaggtgatcaccactgagggggcacatagctgtaagtgggcgttccctggggcccggtacgtgggcacagtgaccgggtggggggcgacaggagttggggagtgagcagtcagcagggtacctgctgacatggccatggtggtcccagccaccatgcccatggtgaccccgttgcctctaggaggggggatgggagcagggtacaccgttgcaggcatgccgttgggctgcaccaccgtggtgtggtggatgacgtgaggaggtgctgcatacagcggctgtgtgtagtacgtgccttgctgtgcatacgggctctgctgggggtaggcacttcgcacagggtacacggcagtctggtaggggttcggggaggaggagtacggtggcacagccccgctggtgggggaacaggacactttgtaaggtgtgccaggagtgtaacctgtttggaaggtaggattcgctccaggatacatgttaggagaataggcaggagctgctgctgcatagcccatgggaaaaccagctggataaccaattcctttggcatttgcatagggaaccccagaagatccaggactataaacaggattcatgatttcaaaaacctccgagccccgcgtctccgccgcctcccggacgacgaactcccgctcgctcggctccgcttggcccggccacgaaa

SEQ ID NO: 65553 - DNA, 1853 bp, Homo sapiens
ttttttttttttgagaaccagaatgcttatattttattagtatccaagactggggagagggatggggtgggagagatcaagaattggggagcagatgggaggcgctacctcactcaggagacacgagttcttatccaagttcaaggtgaaagaagtgagggcaggaagagaaatctccctgctagcaacagcgactcagggagaaactctgggcccatagctagctggaggcagggtgacattgctcccaccaatgggccatcttcttagctacacctttgtagctgtggtgccaggcagaagaaccacctggaaactgagctaaggcaggttccttcttccaacagaagacacagctgggcagggactgtgcagactcaacagggccaggccagctagtggccagtcagtgttcatgtctctcaccagtgcctggagggtccccagccaaggaaagaactggtcagttcctgccagcagcttgagctggaatgccctgggagggtcagtagagggtggtcacttgaggagcttcacagagaggcggatgtcaacatcgcagaggaagatgtccatgaggtcatggcctgcctcctgtgctatctgggagatcacgtggcccttcggaccaatcaggagtttcacataagattctttgggcaccagaagcttctgttggataaccagctccccacctggtccttcctcccacactgctgtcttctgctgtacattgtaaggcacctcctggggcaggtgttctaggagcttctctcggataatgttggcacagatctcttctggtgtctggctagtgaggactgcactgtggtactcccagggccctggctgggcctgtgtcagaaggtattgctttagtgttttcacatcctcctggcttagggctgacaacatgaagatctccttgaagtggggccagccaatcctctgaggatttcccacagattgtgtgtttgggtccttaactgctgggctggggcaatgggtgccagggtgtgagtggaaggcctgcctcatcttgagctttttgccattgaccacaccttcagtgagggctgccgtgagctccaggagaactgacttctgcttcaaacaatctaccttgttcatgaccaggacactagggatctgggagtacttggtcaagcacctgagcaactgggggctgagctggttccgtgtccacttgtctgagacatccacaagaaccacaacaagatcagcagattccatgctcttccatggatcttccaacaaagagagctccaggtgatgcctcttctgtttaccaggactgataatgccaggtgtgtcaagtagaatcacctgggtctccttctctgtgatgacccccagagcttggcagcgagtagtatgcaccttcctggaaacagggaacacctttcggcccagtagctggttggagagtgttgacttccctgcattcggggctcccaggaggaccactcgtaggacccgggaattctcaggcatatcagggtgatggaccaagaggacatcctgctcatctctgttcatggacaccgcggggacgcaaggagtcaccgaactgtcgggctgagagaatccgaggaagtggtccagggcagagccctggccattactgcgagaagccgaggccaagcggggaccagagaaagcggaccccgcgacgcaggacacgcacctccgttggaagcctaagagtgaggaaaaagggatcacccgctccctcgcgacatgagggcccacctgccagactcttaacaccgattgaacaagcctagccccgcgccagctgggggcagccatcctcgtgccaagcttggcgt

SEQ ID NO: 65554 - DNA, 1917 bp, Homo sapiens
atggcgctgagtgaacccatcctgccgtccttttccactttcgccagcccgtgccgcgagcgcggcctgcaggagcgctggccgcgcgccgaacccgagtccggcggcaccgacgacgacctcaacagcgtgctggacttcatcctgtccatggggctggatggcctgggcgccgaggccgccccggagccgccgccgccgcccccgccgcctgcgttctattaccccgaacccggcgcgcccccgccctacagcgcccccgcgggtggcctggtgtctgagctgctgcgacccgagctggatgcgccgccggggcccgcactgcacggccgctttctgctggcgccgcccggccgcctggtcaaggccgagccccctgaagcggacggcggcggcggctacggctgcgcccccgggggtgaaccggtggaccgcgcggcctcaagcgcgagggcgccccgggcccggcggcttcgtgcatgcgaggtcccgggggccgccccccgccgccgcccgacacaccgccgctcagccccgacggccccgcgcgcctgcccgcgcccggtccgcgcgcctccttcccgccgcctttcggtggccctggtttcggcgcgcccgggcccggcctgcattacgcgccgcctgcgcccccagccttcggtctcttcgacgacgcggccgccgccgcggcagccctgggcctggcgccccccgccgcccgcggtctcctcacgccgcctgcgtccccgctggagctgctggaggccaagccaaagcgcggccgccgctcttggccccgcaaacgcaccgccactcacactctgcagctacgcgggctgcggcaagacctacaccaagagttcgcatctgaaggcgcatctgcgcacgcacacaggtgagaagccctaccactgcaactgggacggctgcggctggaagtttgcgcgctcagacgagctcacgcgccactaccgaaagcacacgggccaccggccattccagagccatctgtgcgatcgtgccttctcgcgctccgatcacctggcgctgcacatgaaacggcacatgtagccgggacgcccccgcccacctgcgcgcgggccgtgggcgggttcccacgcgccgggcgcggccccctcccaaactgtgactggtatttattggacccagagaaccgggccgggcacagcgtggctacagagggtctccctcgatgacgacgacgacgacgccaccaccccagcccccgtctgtgactgaaggcccggtgggaaaagaccacgatcctccttgacgagttttgtttttcaaaatggtgcaataatttaagtggcatcttctctcccaccgggtctacactagaggatcgaggcttgtgatgccttgtgagaaataagggccttaatttgtactgtctgcggcattttttataatattgtatatagtgactgacaaatattgtattactgtacatagagagacaggtgggcatttttgggctacctggttcgtttttataagattttgctgggttggttttttttttaattaaaaagttttgcatcttttaaaaaaaatcacagcactggtctggttgcttggaactggggccttggggcacttgggaggaggggggagcggaaagtttgatggagggcagcccccactaaagcatcgtgtgcagtgggtcctgcgtctgccagcaccgggactgccagctgctgtgcctgcctgccaggaacctgtgggtttttctgtaaatttagacactgcattttaggactgagggagggttattttaaggttgttctttgagccataaattgcctctttgccccacatgctggggaaagtgctggtcccactgacgtggcctcctctacgttgaaaaaaataaaactacttacctcttcctgg

SEQ ID NO: 65555 - DNA, 1292 bp, Homo sapiens
  misc_feature (1)...(1292): n = a,t,c or g
tttttttttaaaaaggttttgcatttcatatttattatcagtgcttcaatatagaatgttttgtaatgattagcaacattgtaaaacaccaccaggtttttccaacactaactgctagtcttttccagtaaatattttttccccagacaaaataaccaaacctaacacaatttcaagagatggtgataccatcagcataataacccaaattacaaaaatggcaatacttaaaatcatgcatattatttcaccatttcataaaacttattttaaaatttctacaaactttcccagtgtaaaagactcctcaaaagctgcatgataacattaaactacaaaattcactttggaaaagtagggagttatttttctaattttggctttaagatttttttttttaaatgggttaaaagatacggtgaggagtgtgttgagagaggtggagaaaaggagcttccagtcaatgcattcaccatatctgaaaatacttcagttatacaaagggaacacttcgagagtaaggatatattataaataagtctctcagcaagatgaacggatgaacagttcaattgcacccacaggagagaggtcttcttggagaatgcttgtttatagaatcttctgtaaaatagagttggctacttctaatgattcatcttgtactaaaacaatatcataagagtccatgtacttttctaaaagctcatccactctatcatttagatatccaattttcagaatgtgctcaacattggccactccatctgccattcttaagtctccttgggagtctcccaaggagaattatgttactattgtcttttagttgattgaaatattctgtattcctcaaggcaccatcatgtttgttaaatacatgaattagttctcctttaaatcctttgagcaccccctatgaaaaatataaatcttttgaacaggctttaaaaattctatttgttggattttcatattttggagctcttaattgatgtcactattatttcatcatatttgtaaatacatctttgatactagagatctcaaagcacttaagtccatcacattcaccatagctaagaagggctcggagaagtaaatgattttttagatactattttaaatggtaaaacaaaggccgggcgcaggggctcccccctgtaatcccagccctttggaaggccaaggaggccagatccctcaaggtcaggagttcaaaaccaaactggccagtcgacgcggccgcgaattccagatctgttttcgtgntnctgannccgccatggctt

SEQ ID NO: 65556 - DNA, 2092 bp, Homo sapiens
ttgcctgtttctctttctcccaaagagctgggattaccggtgtgagcgagcgcactcctccccccaaattgtttacctttacccgaagttggtatgcattgacttacctgtggacaacagtgatttttgtctcctgtccttacttctctctgtctccaactctcagggactcattcatcacctctccctgcaccccaccccctgacccgtgctagtttggtatctatgcctgtagctttgctttggggcatcatctgaatctcatactgcacggcctttcagatctggcttcctgcactcaatgtcatgcacgtctcttagtgccgtgttcccttaatgctgagtcatgctccattgtatggatggaccacatgactgatttgcctcctgtccttagtcctctcagcctccaactctccttcctgcaggcattgatgttgaacaagtgtctgtcgtcatcaactttgatcttcccgtggacaaggacgggaatcctgacaatgagacctacctgcaccggatcgggcgcacgggccgctttggcaagaggggcctggcaagtgaacatggtggacagcaagcacagcatgaacatcctgaacagaatccaggagcattttaataagaagatagaaagattggacacagatgatttggacgagattgagaaaatagccaactgagaagctccaccagccactgatgccagccctggcactgcccctgcacaggagacaagtgcatttagggcacaggccccgacatcaccccaaggacaacggcagaagtagagagaaactacctacctcacttcaaattatgtttggacttgacaaaaataggtgcaaatgatggggggcaatagaagaaaaaatttgcattttggaaaattgggtcctttccccacttttttaaagccacattcccccatctttataataatctggtcacagtggtagtcgctggccccaggaccccctcctgattttggctaggcatcgtggaaccagctccagcccctgaagaaacgatagatgtgcaggttgtgcggaagaggctgagtggaaaatggtgtgagccccaccgctgtgcatcgaatgagggaagtggcagcagagaggccagagctgccccctctctgtctcttcaatggacccttcacaagtgtttctcctgcccttggggctgtcttccttctcctgaaatccagagactttcttgctcatcccttctccctttcacttctgttctctgctgcagaaagcagacttgcatatccctgatgagcagctcggctacttttgtaaacttcagatttggagagaaacacgaaagtctgaatcctgaccccttgagagagagtgatctggcgagggccgatgaaggggctgggcctggtcttgccttctcttctctcggttgctccctctgcctaggcccctggtactcagtcacggcagccaggagaccccaggtgagtttctgagcgcatacgtagttggttcttacccccaggtgtcacacggggccgagagctgagcaagaatttggaatggaagttatgaccaagggaattatgctgttcatttataatagtggacattatggagagctctgattcctacataatatgaataaggatggataggccgggcgtggtggctcatgcctataatcccagcacgttgggaggctgaggcgggcggatcggttgagctcaggcgttcgggaccagcctggccaacatgatgaaaccccgtctctaccaaaaatagaaaaaaatatagccgggcctggtggcgcacgcctgtagtcccagctactcgggaggctgaggtaggaggatcgcttgagcctgggtagaggctgctgtgagctgaaatggcgccactgcactccagcctgggtaacagagcgagaccccgactcaataaataaataaggatggataaattgtagcgtatgcaccattcattatgctaagacattttaaagtaattatgagaaacgctctactaatgatttgtttttatttgtatttttctgcttattagacgaaatatatactcattttaaaaaggaaaaaaaaaaa

SEQ ID NO: 65557 - DNA, 920 bp, Homo sapiens
tttttttttgtgagaaaagccgttgaggtcctctcaaatctgcatgtgagcaagtaggtctacaacaggcaaacatactgcttcccgacttctgaaaagtcaaggaatcctaagtaatctagatgaaaaagtgactccttggtttcttcacattcccctccaagagcccagtgagccatcagctcctggccagcaacacacctgatacaaaatgggagaagtgtataaattattatgttgataagcaagataagtgccaaagggtagataagagtgaaagcattgggaagcctggcagagtgcagtcagcaggtcagttcctggcggttcattgagcagcttggcccaaagatgtaagtgaagtccctcctggtggagggatgagagcagctccagttactcggccttcatgacacaggaagttgaaggtggcacaggcattgggcgtgtcctgcacttccacagcaatgccccgctgcctcatggcttgaagcacctgggactgcagcctctcggtccggtctccagtccccaccaccacgatctctatccggggctccagcaaccagaagagggaaaagctgtcttcggtgatgtcctggtgggatcccacgttccactgcaccaccgagtgcgggagcagagcgcaggggccgagcacgcggtttccgtttatcatgaagccgcggctgttgtagctgtcgatgtacattgcctgagcggcctcgcgttgcagcagagagatgcgcgtccgctgatacagctcgtcatccgccggcgagagccgatgccctcgccgcggggcccagggaagctcaacgggcggacagcgcagcgagggtcgcgctcggtacaagctacgtagcgcgagagcggtggccatggctgaccaacgcgcggcgaagtcgtcaccggcgccg

SEQ ID NO: 65558 - DNA, 1189 bp, Homo sapiens
cggtcctacagtagagatgggcagtctgtagccgagccaggcatttcgttaaaggcaggatctggtccgggaggtctgggatctctggttatatgggacttctgacctctgggcacctactgcagctgtggctgaggccaagaaatgtgaggggcctccatccactgcattgagtagcgaccccgacgtggggttcaatgtggagcggggaggggctgctgcggcagctgcaggagccgaggtgccaggccttgttcttctcatgccggcatccctgcttgcaggtgtgaagggggcaggaatcagcgaggtgtcctgggctgagtcccgggagtgggaagaggtggcaggaaggggatctgaggaggagaacaggggtcctggtggtctgtgcttcttcccagacacgggagctgtagaggggacctctgcagcagatgctaggggggccactaggcccaggcagtcttgggacttgggtctgtcctgctgtgcatccatagtgggtgctttagaaacgggaggcccacccgaagcccctgttgcaagtgaggacaaagtgtgggaaggccgtgagggtctgcagtccgggatggccttgtcctcaacgtgcagtgcactgttgatgcgctggaatgccgtctctttttccaggtgcaggtcttcagccgtgacccggtaccccagctctaagggaggtggcagcatcaaaggctcccctcgcctgcgtggcagcaggggaatcttgcgtctacggggcctagagtcctgggatctgggggagccacccgttggggcgattgtctgccctggtgctgtatctgcccccttttcacaccgtgtgtgacccgaagagacagcctgaggcctgtcctcactcactgtctttgagtaactgagggtcagctggcagcgggatgaggctggccccctcctctgctttagccccggcaagcctcccgtggagctgtaggagctggagatggcatttcgtttggtgttcgagctcgtccaggatgtctgggatgtgtggttatatctgatttctgagctctgggcgtggaggtctgtctgcagaggcccgggcctgggcacaaagggagaggggcctccattgtcccgcaggggccaaaatgcagaccgtgcatccccggtgaacctcgggaccgttctctgatcatcaggattt

SEQ ID NO: 65559 - DNA, 1159 bp, Homo sapiens
accggaccggaatttccgggtgagaagatttcgtcttgcctcccccatcacgtcccctgacaccgacaccccattgctcccacagtctccccagtctccactttggtccccagcgctgtctgcccgaggatttgcctgaaggctgcccccaactctgcacccgccccccgagggccaccgaggaccatgactaagacagatcctgccccgatggccccgccaccccgaggagaggaggaagaagaggaggaggaggatgaacccgtccccgaggcccccagccccacccaggagcgccggcagaagcctgttgtgcacccctcggcacctgcccccctccctaaggactacgctttcaccttcttcgatcccaatgacccggcgtgccaggagatcctgtttgaccctcagaccaccatccccgagctgtttgccattgtgcgccagtgggtgccccaagtccagcacaagatagacgtcatcggcaatgagattctgcgccgaggctgccatgtgaacgatcgtgacgggctgaccgacatgacactgctccactatgcagtgcaaagctggggcccacggagtcggggaccccgcggcagccgtgcgcctctcgcagcagctgctggcgctgggcgcagatgtgacgctgcgcatccgctggaccaacatgaacgcgcttcactacgcggcctattttgatgtgcccgacctcgtgcgtgtgctgctgaagggtgcgaggccgcgagtggtgaactccacgtgcagtgacttcaaccacggctcagccctgcacatcgctgcttccagcctgtgcctgggcgccgccaaatgtttgctggagcacggcgccaaccctgcgctgaggaatcgaaaaggacaggtgccggcggaggtggtcccagatcctatggacatgtccctggacaaggcagaggcggcactggtggccaaggagctgcggacgcttctggaagaggcagtgccactatcttgcgccctccccaagggtcacgctacccaactatgacaacgtcccagggcaatcttcatgcttagcgcactgcgttgcgcctgggagaccgcgtgctgctggatggccagaaggtcaggggctgggatgtgtgtttgcatggtgggtgggggtgggactcagccc

SEQ ID NO: 65560 - DNA, 5530 bp, Homo sapiens
agccggccgtggtggctccgtgcgtccgagcgtccgtccgcgccgtcggccatggccaagcgctccaggggccccgggcgccgctgcctgttggcgctcgtgctgttctgcgcctgggggacgctggccgtggtggcccagaagccgggcgcagggtgtccgagccgctgcctgtgcttccgcaccaccgtgcgctgcatgcatctgctgctggaggccgtgcccgccgtggcgccgcagacctccatcctagatcttcgctttaacagaatcagagagatccaacctggggcattcaggcggctgaggaacttgaacacattgcttctcaataataatcagatcaagaggatacctagtggagcatttgaagacttggaaaatttaaaatatctctatctgtacaagaatgagatccagtcaattgacaggcaagcatttaagggacttgcctctctagagcaactatacctgcactttaatcagatagaaactttggacccagattcgttccagcatctcccgaagctcgagaggctatttttgcataacaaccggattacacatttagttccagggacatttaatcacttggaatctatgaagagattgcgactggactcaaacacacttcactgcgactgtgaaatcctgtggttggcggatttgctgaaaacctacgcggagtcggggaacgcgcaggcagcggccatctgtgaatatcccagacgcatccagggacgctcagtggcaaccatcaccccggaagagctgaactgtgaaaggccccggatcacctccgagccccaggacgcagatgtgacctcggggaacaccgtgtacttcacctgcagagccgaaggcaaccccaagcctgagatcatctggctgcgaaacaataatgagctgagcatgaagacagattcccgcctaaacttgctggacgatgggaccctgatgatccagaacacacaggagacagaccagggtatctaccagtgcatggcaaagaacgtggccggagaggtgaagacgcaagaggtgaccctcaggtacttcgggtctccagctcgacccacttttgtaatccagccacagaatacagaggtgctggttggggagagcgtcacgctggagtgcagcgccacaggccaccccccgccgcggatctcctggacgagaggtgaccgcacacccttgccagttgacccgcgggtgaacatcacgccttctggcgggctttacatacagaacgtcgtacagggggacagcggagagtatgcgtgctctgcgaccaacaacattgacagcgtccatgccaccgctttcatcatcgtccaggctcttcctcagttcactgtgacgcctcaggacagagtcgttattgagggccagaccgtggatttccagtgtgaagccaagggcaacccgccgcccgtcatcgcctggaccaagggagggagccagctctccgtggaccggcggcacctggtcctgtcatcgggaacacttagaatctctggtgttgccctccacgaccagggccagtacgaatgccaggctgtcaacatcatcggctcccagaaggtcgtggcccacctgactgtgcagcccagagtcaccccagtgtttgccagcattcccagcgacacaacagtggaggtgggcgccaatgtgcagctcccgtgcagctcccagggcgagcccgagccagccatcacctggaacaaggatggggttcaggtgacagaaagtggaaaatttcacatcagccctgaaggattcttgaccatcaatgacgttggccctgcagacgcaggtcgctatgagtgtgtggcccggaacaccattgggtcggcctcggtgagcatggtgctcagtgtgaacgttcctgacgtcagtcgaaatggagatccgtttgtagctacctccatcgtggaagcgattgcgactgttgacagagctataaactcaacccgaacacatttgtttgacagccgtcctcgttctccaaatgatttgctggccttgttccggtatccgagggatccttacacagttgaacaggcacgggcgggagaaatctttgaacggacattgcagctcattcaggagcatgtacagcatggcttgatggtcgacctcaacggaacaagttaccactacaacgacctggtgtctccacagtacctgaacctcatcgcaaacctgtcgggctgtaccgcccaccggcgcgtgaacaactgctcggacatgtgcttccaccagaagtaccggacgcacgacggcacctgtaacaacctgcagcaccccatgtggggcgcctcgctgaccgccttcgagcgcctgctgaaatccgtgtacgagaatggcttcaacacccctcggggcatcaacccccaccgactgtacaacgggcacgcccttcccatgccgcgcctggtgtccaccaccctgatcgggacggagaccgtcacacccgacgagcagttcacccacatgctgatgcagtggggccagttcctggaccacgacctcgactccacggtggtggccctgagccaggcacgcttctccgacggacagcactgcagcaacgtgtgcagcaacgaccccccctgcttctctgtcatgatcccccccaatgactcccgggccaggagcggggcccgctgcatgttcttcgtgcgctccagccctgtgtgcggcagcggcatgacttcgctgctcatgaactccgtgtacccgcgggagcagatcaaccagctcacctcctacatcgacgcatccaacgtgtacgggagcacggagcatgaggcccgcagcatccgcgacctggccagccaccgcggcctgctgcggcagggcatcgtgcagcggtccgggaagccgctgctccccttcgccaccgggccgcccacggagtgcatgcgggacgagaacgagagccccatcccctgcttcctggccggggaccaccgcgccaacgagcagctgggcctgaccagcatgcacacgctgtggttccgcgagcacaaccgcattgccacggagctgctcaagctgaacccgcactgggacggcgacaccatctactatgagaccaggaagatcgtgggtgcggagatccagcacatcacctaccagcactggctcccgaagatcctgggggaggtgggcatgaggacgctgggagagtaccacggctacgaccccggcatcaatgctggcatcttcaacgccttcgccaccggcggccttcaggtttggccacacgcttgtcaacccactgcttttacccggcttggacgagaacttccagcccattgcacaagatcacctcccccttcacaaagctttcttctctcccttccggattgtgaatgagggcggcatcgatccgcttctcagggggctgttcggggtggcggggaaaatgcgtgtgccctcgcagctgctgaacacggagctcacggagcggctgttctccatggcacacacggtggctctggacctggcggccatcaacatccagcggggccgggaccacgggatcccaccctaccacgactacagggtctactgcaatctatcggcggcacacacgttcgaggacctgaaaaatgagattaaaaaccctgagatccgggagaaactgaaaaggttgtatggctcgacactcaacatcgacctgtttccggcgctcgtggtggaggacctggtgcctggcagccggctgggccccaccctgatgtgtcttctcagcacacagttcaagcgcctgcgagatggggacaggttgtggtatgagaaccctggggtgttctccccggcccagctgactcagatcaagcagacgtcgctggccaggatcctatgcgacaacgcggacaacatcacccgggtgcagagcgacgtgttcagggtggcggagttccctcacggctacggcagctgtgacgagatccccagggtggacctccgggtgtggcaggactgctgtgaagactgtaggaccagggggcagttcaatgccttttcctatcatttccgaggcagacggtctcttgagttcagctaccaggaggacaagccgaccaagaaaacaagaccacggaaaatacccagtgttgggagacagggggaacatctcagcaacagcacctcagcccttcagcacacgctcagatgcatctggggacaaatgactttcagagagtttgttcttgggaaatgcagaagaccatcacagacctcagaacacagataaagaaacttgaatcacggcgtcagtaccacagagtgcgtggatgccgggggcgaatctcacgccaacaacaccaagtggaaaaaagatgcatgcaccatttgtgaatgcaaagacgggcaggtcacctgcttcgtggaagcttgcccccctgccacctgtgctgtccccgtgaacatcccaggggcctgctgtccagtctgcttacagaagagggcggaggaaaagccctaggctcctgggaggctcctcagagtttgtctgctgtgccatcgtgagatcgggtggccgatggcagggagctgcggactgcagaccaggaaacacccagaactcgtgacatttcatgacaacgtccagctggtgctgttacagaaggcagtgcaggaggcttccaaccagagcatctgcggagaaggaggcacagcaggtgcctgaagggaagcaggcaggagtcctagcttcacgttagacttctcaggtttttatttaattcttttaaaatgaaaaattggtgctactattaaattgcacagttgaatcatttaggcgcctaaattgattttgcctcccaacaccatttctttttaaataaagcaggatacctctatatgtcagccttgccttgttcagatgccaggagccggcagacctgtcacccgcaggtggggtgagtctcggagctgccagaggggctcaccgaaatcggggttccatcacaagctatgtttaaaaagaaaattggtgtttggcaaacggaacagaacctttgatgagagcgttcacagggacactgtctgggggtgcagtgcaagcccccggcctcttccctgggaacctctgaactcctccttcctctgggctctctgtaacatttcaccacacgtcagcatctaatcccaagacaaacattcccgctgctcgaagcagctgtatagcctgtgactctccgtgtgtcagctccttccacacctgattagaacattcataagccacatttagaaacaggtttgctttcagctgtcacttgcacacatactgcctagttgtgaaccaaatgtgaaaaaacctccttcatcccattgtgtatctgatacctgccgagggccaagggtgtgtgttgacaacgccgctcccagccggccctggttgcgtccacgtcctgaacaagagccgcttccggatggctcttcccaagggaggaggagctcaagtgtcgggaactgtctaacttcaggttgtgtgagtgcgttaaaaaaaaaa

SEQ ID NO: 65561 - DNA, 4254 bp, Homo sapiens
ttttttttttttcttgctttattaggtttattataaggagcagtgatgagatctttatcagtcctcactacaaagctttcatctccagccttctccatagctctgtggagggcagagagttgagggaaggaagaatggagcttgggagcatgggatcatgtatgtataccaggaaagaaaacacacattctttattctattgcttcaaagacagtttgtgagaatggaagataacaagcacagctggccaggaaggcagggcacacatggcaggtcaagttcctgctatccagggaggtggcccagagcttccctgctgctcctggaggaagcagagtccaagctggcccagatgaggccccgggcagcactgcttctgtgtgggtatggccagtcgggacgtggcgccacacactgctcctccgaactctggtgaagggctgcccagcctcacaggcctgagcagagtctcccacatctgcgaatggggccaatggcactcactgtctcttcaggcccccacggacggcatgcctggggaagcctagtctacttaccatcagcacgttgatctgtcacacagcatggagccatagtttacaaaggaccacggcaggtcaaggacaggccactaaaactgttggtgctgggcaccatcacccaccctcaccaccatcaaagacactggtgcagtgagacttcgagtctgcaaaaaccccggggaggacaggaggcagggccactctccctgtgtgtcatcagcctgcagtgcctgaaactccagcctgtgcacctctggcaggatgccccacactgctccacaggtttggcggtgagttatttttaaaccagcgtcctgctgttcttgccccccgcgtcccctctgctgtgcctaaacacctctcaggaacacttggcagcacgccattgtcagttccaggtccactcatcccctgcgtgttgccgggacccaccttcctgcgctatcccagcacaactctccaaccacaccattgctgaacaaagctggggagtgacggccagggcaggctgtaaggcaagtgaatggaaactggctggaaaaagagaaagggcccagagcacaaaatcgccacgcacaaagactaagccagcctgcctgagtgtctggtgagcgaagacggagcaggcacctctgtgggaacatgtatctagggatcacgcataccccagacagggcaggcccatcctcaggagctgcagtcacactcagcccggcctgaggcaagggatgcagggccttgcctaggcagagaatgatgctctccgaggcatctaggcatggagtgtatggccaaagagggtctatttacaacatacctgacaatcaactagcactgtattcctagaactgagaccccttgcttctcatcttaccttgcttaaatattagttattcccagagtcagggaagtgggagagaaagcctgggtagggcagtgagggaagtgataaatggtgagaaagaaaaggagactgaaaactaacagggcggctaccgaggggtgcagggcacagttaccatggagacgtaaaacactacacagaatgcgagccatcgggtccatgcggccagaagcttgagtgctgttctctcatggaactctccagtgagccatgctgagcggtccttgtgaagtcatgtacttaatagaaaagcccttgatgaacaaccccatggttacaaacacttgtgacaagtttccttgttcaggtgactggtgtgcaaaggcaagatggtgcacatcctcctgaccaagcaggtactgaattctctggaattgcccacaacataatggtataaggtataactaatctcttttcccattaaaaagctggcaatgccagaccatgagtctaattaattcagagttgttccagggcacaagatagccaagtaatgtccaaatggggagccttgtggttggtggcagccaggattcctaaggccaaggtgctccttcacctctctgggagagccaagctgtccatccgctggatccccaggatgctgggctcaagtgtcagctgggtttacctctttgggaacagaagtaatggacgaccactccattggggtatcttgcaaatgcactgttcccaatcttcttcttacacaccatgcacaccttctcctctgtgatgatgcacttcacctgctggtgtaaaatccgctcttcctggaaccctcaggaattctgcatggagaaggttcttgagcacttgattgaaccgtttcttttgtgcattttcttccaagaccttttccaggaagatgcgtatgtcattgatctgagtgtttgctggcagaaggttgagggccttggtggtgtccagtttgctgtggtgtagctcgaggacctgcagagcggcctggaggttggcttttggctccagtagttccagcttgattggccccaggcagtgaatgctggggggcgacaggtacatccgaagcagggacagatacacatctttgttgccatctttgtttcggtcatagtgtttgtggcagtactcctcagccatccttgtatccttcaagatgtggacataaatgaaaagagcttgttcatgtttccccatgcgccccaacaggagagctcgttcttctaagaggccatcaaagggaaaatcacagatgagccggcctggatcatagtagctggaaatctccaagaacatgaggagcttttgccggtattctcccagctcaccctcttcctctccagctgggactggggttttgcctgcagggaaggacaggagatactccttcatcagaccttgcaccttctcacagtatagctggatcaggcagttgtggaaccgagagcctgtctcctcccaaacatggatgatgtgttccagataaggaatagccagacccttaaaattctctattaagaagccgaggactcgatcacgtggcagagactccacttccgggagatcttcagtaaatatcttcaggccatcttctgggaagtctctcagcacccacactgagtaggagaaaatcaaatgcaggttttctgtgcccagatgctgcagatactgcactgtcctctcgtggcctttcagaggggagttggctttcttggactggtccacgagcacctgcagagctttctcgtggagccccttcttctcatacaggatgataagctcactgtacttgtgagccttcttcagcacgtgctcgctctcctcgatgtggcagtgattgttctccaggcgtagcaagggggccaccagggccacatttgtatggagatagcacttgagcagggtggtgtcgatgatttgtagcagcttcttcttggatttgatggtgggagtgccttccatgagcggtgaggtgcttgactggtgatcagagtcattcagcttctttaccaattgacttcgtttctgtgtcaggtagtcaatcagagctaagtgagccttctccaattcagccccggagagcacaggcaatgggttgggatactgcaactgctttctgtagtctgtgggcagcaggtcagggtacaggcccatcacatgggtgggatctgtgccaagtttagcaaagacctgcatggactcatcaaaacgcttctggcagaagaggttgaaggcatacaagttcttgatgtgatgaatttgttgctgcttttcactgtcagaatcatctttcatttctgcgagctgcagagccaattcaaactgcttgtcctggagaagttgttggatttgggttgccatggggacagggatgagtctccaaacaaaatgattgctggccacatagataatgtttgatcctcctgaggtaatgaaacggggcctttgcaattcaatgctttggaccagaagcctcggttcaaatgttcggatctcaacatatcgaggcaacactgcaatgatgtagggaggctggtgctccatggccactggtatgtccgtccagttcagggcacatttctgtgtgcagatcccttcctcattgagtaccacggtgagatcatcctggcccacagccacttttccatctgccagaggtgcaactaagggctccagctgttttcctgttggaaagagctctttgatggacccctttccatccacccttattaggtagtagtctctcttgaaacccacacagatagaattttcacaccacgccatggacttgggcacatctggcacactaaagtccccctgcaattc

SEQ ID NO: 65562 - DNA, 4830 bp, Homo sapiens
acacccagcaccacaggcaccaagtccaacacgcccacatcctccgtgccctcggccgccgtcacacccctcaacgagagcctgcagcccctgggggactatggcgtgggctccaagaacagcaagcgtgcccgggagaagcgcgacagccgcaacatggaagtacaggtcacccaggagatgcgcaacgtcagtataggcatgggcagcagtgacgagtggtctgatgttcaagacattattgactccacgccagagctggacatgtgtccagagacccgcctggaccgcacaggaagcagcccaacccagggcatcgtgaacaaagctttcggcatcaacaccgactccctgtaccatgagctgtcgacggcagggtctgaggtcatcggggatgtggacgaaggggccgacctcctaggggagttctcaggaatgggcaaagaagtggggaatctgctactggaaaactcacagcttctggaaaccaaaaacgccttgaatgtggtgaagaatgacctgattgccaaggtcgaccagctgtccggggagcaggaggtgctgaggggcgagttggaggctgctaagcaggccaaagtcaagctggaaaaccgtatcaaggagctggaagaggaactgaaaagagtgaagtccgaggccatcatcgcccgccgtgaacccaaagaagaggcggaggatgtaagcagctatctctgtacagaatcggacaaaatccccatggcccagcgccgccgcttcacgcgggtggagatggcccgtgtgctcatggagcggaaccagtacaaggagcggctgatggagctgcaggaggctgtgcggtggactgagatgatcagagcgtcccgagagcacccatccgtccaggagaagaagaagtcgaccatctggcagttcttcagccgcctcttcagctcttcctccagcccccctccggccaagcgcccctatccctcggggaacatccactacaagtcacccaccactgccggcttcagccagcgccgcaaccatgccatgtgcccgatctcggcaggcagccggcccctggaattcttccctgacgacgactgcacgtcctccgcccgtcgagagcagaagcgcgagcagtaccgccaggtgcgtgagcacgtgcgtaacgacgacggccgtctgcaggcctgcggctggagcctgcccgccaagtacaagcagctgagtcccaacgggggccaggaggacacgcggatgaagaacgtgccggtgccggtgtactgccgccctctggtggagaaggaccccaccatgaagctgtggtgtgccgcgggcgtcaacctgagcgggtggaggcccaatgaggacgacgctgggaatggagtcaagccagcgccaggccgcgatcccctgacctgcgaccgcgaaggagacggcgagcccaagagcgcccacacgtctcccgagaagaagaaggccaaggagctccctgaaatggacgccacctccagccgggtgtggatcctgaccagcaccctgaccaccagcaaggtggtgatcatcgacgccaaccagccgggcacggtggtggaccagttcaccgtctgcaacgcgcacgtgctgtgcatctccagcatccccgcggccagcgacagcgactaccctcccggggagatgttcctggacagcgacgtgaacccagaggacccgggcgcagatggcgtgctggccggtatcaccctggtgggctgtgccacccgctgcaacgtgccgcggagcaactgctcctcccgaggggacaccccagtgctagacaaggggcagggggaggtggccaccatcgccaacgggaaggtcaacccgtcccagtccacagaggaggccacagaggccacggaggtgccagaccctgggcccagcgagccagagacagccacattgcggcccgggcctctcacagagcacgtcttcactgacccagccccgaccccgtcctctggcccccagcctggcagcgagaacgggccagagcctgacagcagcagcacacggccagagccagagcccagcggggaccccacgggagcaggcagcagtgctgcacccaccatgtggctgggagcccagaacggctggctctatgtgcactcggctgtggccaactggaagaagtgcctgcactccatcaagctgaaggattctgtgctgagcctggtgcatgtcaaaggccgtgtgctggtggctctggcggacgggaccctggccatcttccaccgtggtgaagatggccagtgggatctgagcaactatcacctaatggacctgggccacccgcaccactccatccgctgcatggctgttgtgtacgaccgcgtgtggtgtggctacaagaacaaggtgcacgtcatccagcccaagaccatgcagatagagaagtcatttgacgcccacccgcggcgggagagccaggtgcggcagctggcgtggatcggcgatggcgtatgggtgtccatccgcctggactccaccctgaggctctaccatgcacacacgcaccagcatctacaggacgtggacattgagccctacgtcagcaagatgctaggcactggcaagctgggtttctccttcgtacgcatcacggccctgcttgtcgcgggcagccggctctgggtgggcaccggcaacggagtggtcatctccatccccctgacagagactgtggtcctgcaccgaggccaagctcctggggcctccgagccaataagacatcccccacctctggggaagggcgcccgtcccgggggcaatcatccacgtgtatgggcgatgacagcagtgacagggcggccagaagcttcatcccctactgctccatggcccaggcccagctatgcttccatgggcaccgcgatgccgtgaagttctttgtctcggtgccagggaacgtgctggccaccctgaatggcagtgtgctggacagcccagccgagggccctgggccagctgcccctgcctcggaggtcgagggccagaagctgcggaacgtgctggtgctgagcggcggggagggctacatcgacttccgcattggagacggagaggacgacgagacggaggagggcgcaggggacatgagccaggtgaagcccgtgctgtccaaggcagagcgcagtcacatcatcgtgtggcaggtgtcctacacccccgagtgaagctgctgccctgcctggcccgacctgtacataggacccccgaccacctgacccccgcccggcccgcggggtagccagccaggcgccgccgcccctcttctaacctctcaacctgcagctttcacctgagtctggcccctccagcgggcagggagtgcggggatgcggatcaactgggaggaggaggggaggggtgcttccacccgaggggaagatgctctcgggacagtttcccgggcagctcctggccagcttccagcccagagtcctcaagtccagggcaccttgggcccagcgcaggcagaatccgaggtggtcctggctctaccctgggcctcctactccccagcacccctggaggaggcaggggctccccgccgccgaggctgcctgccctgggcccacctctgcatgctgctcatggggccaccctgcctcctgggccctcactctgcctaggggagctgggccaggcactagcctttgcccagggaggtgggcctcaggctgcccaggtgcctgcaccccagccggccttctctggggcctccccgtcgtcaagcctctatcctgtctgtccccaccccagctgtcccctgcccagggagctggcataaaagcacgaggcccggctccctggggcagctgcttgagaacagagactgctaccccatcctgcccatgcaggcaggctcttgccagccccgttctgacccgtgtccccccaggctctgcctgggcagaagactcaccttggaggagtgggccctggagtcctgtccctcccagaagcccccagggtgggatttctcaggctgccagggcaggcccaggcctcaggaagaaggggaggcccctggcctctccgggatcagtcctaggacacaggctcagcctcaggttgatgggggatgatgtgctcccggggcctgcctcctgcacggggctccacggagcccagctcccagacacgctactaagtgcctagggttgcccgctgtggcctgctcccagggagcaacagagaggccaccaagcagaggcccgtggggctgaggatggagccgcccccagccgactccaagcccgcagagggcagacgccaccctggactgctctccctgcccagctgggcctctctggccctaattcctaaccttcccaggcccactgcaactcctgtctgggaggcccttatgaggggcagcccagcccccccggcaccacccccaaccagagaagcacagatcttggggagctgccccacaagccccgctggccaccgagggctgcagccgctgcgctgccggcttctccccaccaccctgccacctccactgtgatgtatgtccgctccctcgtctgttcccccaggatctcgaagtgactccgggctgagcagtggggcggctgggggaggggtgacgattctcctcaggctttggccctgcaagcaaacccacatatctgctctgtatgtaataaatgtcttaacgtcgaaaaaaaaaaaaaaggggcggccgttttaaaggatccttgggggggcccaagtttacccgggcttgcaaggtaatagttttttccttataggggggcgtattataacctacctgggaatttttgg

SEQ ID NO: 65563 - DNA, 1647 bp, Homo sapiens
ttttttttttttaccttattgaaaaatggtttaataaatataattattaaataaatgttaagactttaaatactaacccaagaaaaatttaaaaatacaaattcagtaagacttttgctctaacaacaatttttcaaaacgaatcaacaacaaaaaagtatccagtgtttcttttcttatgaagattattaataaaacacagtatttggtaagcacattttaacagtatgcttgtcttttgtagggaaaaggaaatttgggtttgtctaacatcgtgggatccaatgtgtttgatatgttgtgccttggtattccatggtttattaaaactgcatttataaatggatcagctcctgcagaagtaaacagcagaggactaacttacataaccatctctctcaacatttcaattatttttctttttttagcagttcacttcaatggctggaaactagacagaaagttgggaatagtctgcctattatcatacttggggcttgctacattatcagttctatatgaacttggaattattggaaataataaaataaggggctgtggaggttgatattattaatagtgttatgcagaaaatatgaatggcagggaggggcagagagaaaaatccatttcttcatttaaatcaaattttaaaaatcttgaaccttagaatctaaaacttacagtaatttaaaaccaaccaaaatcacatcctaatttttgtgagccctttcttttcatgaaaaattacatattataaaacagaagtttggggggaaaaaatctatgttttaccatacaataagttgacaaaaactggagaaactagaacaaacaaatccaactatgtagtactgaaaacaacaagaaaatggcttatttcattaaaaacagtataaccattcatttaaactgaatgaccagacttgctgtctttaaaaacccaaacttgagattaacaaaaattacagtatatttttaacattatactgttaaaagctggtgggagttttaaaagttcatttttacagcttttgtaagcatacaatattactttaaaaaaatgacttttactaggagattcagcaaaacagatgtaggaatgttccaaccatggcttgaaattatgcattacgatccaagcgaacatcaatttctctgccactgatttttatgccattcattattctgcaggctttttcagctgattctggggagtcaaatctgactgttccacagccttttgactttccattctccatttttatttctgcaaacattacatgacatttctgacaaatatctggttgcctttggagcctattctctctctcattccgcttcccattggacccgataaaaatcctcgatccatatcgatgctcctttccagtatagctcctatacctggtcccattctatcaaagctggaactcatccggtccagtcccatccccattcctccagtcacactgttcatgctacccattccaccacctggattttcaagaaaggacggggggatttgggaattttgtgtttttgtttcaaaaacataaggaaaaggagaagaggagaaaggaggaaaaggagataaacatttttgagaaagaagggggaaattaatttgtttatataattaaatcc

SEQ ID NO: 65564 - DNA, 698 bp, Homo sapiens
gcgctcctggccgtggccctgaacctgctggcgctgctgttcgccaccaccgctttcctcaccacgcactggcgctctacagctgggagaccggcgacgaccgcttcctcttcaggaatttccacaccggcatctggtactcgtgcgaggaggagctcagcgggcttggtgaaaaatgtcgcagcttcattgacctggccccggcgtcggagaaaggggtcctgtggctgtctgtggtctccgaggtgctgtacattctgctgctggtggttggcttcagcctcatgtgtctcgagctcttccactccagcaatgtcatcgacgggctcaagctcaatgccttcgcggctgtcttcacggtgctctcaggcctcctgggaatggtcgcccacatgatgtacacgcaggtgttccaggtcaccgtgggcctcggtcctgaggactggagaccccattcctgggactacgggtggtccttctgcctggcgtggggctcctttacctgctgcatggcagcctctgtcaccacgctcaactcctacaccaagacggtcattgagttccggcacaagcgcaaggtctttgagcagggctaccgggaagagccgaccttcatagaccctgaggccatcaagtacttccgggagaggatggagaagagggacgggagcgaggaggactttcacttagactgccgc

SEQ ID NO: 65565 - DNA, 2146 bp, Homo sapiens
ccactgtggcgtttgatcgataaacgcacatgcgaggtggagggtggctggtgtgtaatgtgcccggcagccttcatagcaaaggagaattctagaaccaaccgaagtgcccctctgaagggagctggtcccgtccgttccagccgccgtggagtaacacagccagcagtttccctcctgccacgaaagctcgagactgaaactcaggatgaactgttttcagcccgggtcaccccagccctggggtggaggcccattgaggatggccgagcaggggcgggcatccaggcaggtccagcagtcctggcgggctgaggagaaggaggtcagtgctcagggagacatccgcagagggacctggcaggcagagctccagaagggagggaactgcacagacagaaagctccagaaggctgcctgagggcctctgaggcctccggagtcaggcgccatgcatgtggaaggtggactcttcagcatggatgggaccctagggggctgtggacccccggcccctgggactcacaggtgggagacaggagttccaaccgccagggggagagtcctggaggatcctgggctgttggcagccacccagcagggcccgtcctgggagtggggctggactcttcctgcaggaaaggctgggctggacctgctctgagaggcttcagaaccagccacacgaagaccaaagtgaagagcaaggagctgaactccacgcagaacacagcgcagcgtcctttaaaggaaggccaaaaacaacccaacaaaaatgccaggtgatcaaagcggtcacagcacaatgtccacatccaacgagaaattgctactacgtccagacgcagggaaaggtggccgtgggaacgtgagtcagcagcaacaggcccagaagggcagccacggtggacttgtcagacgtggaccctgaaatgacaatcacagcatgatttcaggcaggagcctgaaatggtacagctttggacatcggtttggcaaattcttttagagagaaacacacaccttccctaggacccagcaactccactcctaataaccaagtgaaatggaaggagttgtcctcagcaaaacgtgtgtgcggaagttcacagtcactttctcggtgataaccaagagctggaaaccactgcaacacccaccagcaggtgaacggattaacacactgggctagggccacacaatgagatgctccgtggcaacacaaaatgaaccgtggacacacactgcacggcggatgaatatgcagacatcaggccacgtgaagggagccaggccccgaggcgccacgctttgtgattcagggtggtccctctgcgcccaagacccggctgcctcctcctcttcctggctgcagggagtgcttgtgtctgaagaacgccaggctggtgtccccagagggcggctggaggggctcagaaaccattttcaccttctgtctcctccatgtctgcactgtttgggtttgtacccgcctgtgtcgcttttgcacgggaagtgagatggagagacacgtgaaccaccattgctggggttccagcatggggccccaggggacccatggctttcccagaaggaagctctgccattggacagccggtctcaggctgctgcacaggcccctccccgccctcagccctggcctgcgggaatcaggaaagggtggggtccagctgcattgcgaatggactaaagccactgatttgcacacttgccaatggctgaaatggtcaataaaacgtcatgtaccttttgccacaggaaagaaagcacgcagccaaagagcgcaaagaggctcagaggaggcccgggtgccctggagagacgctgcggtcctgacgacacagcatccctgtccgccagcggagattttcccagataaagaattccccggcgggagacagggccctgcacacaggtcctttgccatgctgctcaccatgcctgtgtgttatctccccatgaaaagtcacctaggccgagcatggtggctcacgcctgtaatcccagcactttgggaggtggaggcgtgcggatcatttgagatcaggagtttgagaccatcctgagtaacatggtgaaaccccgtttttaggaagaatacaaaaattaactgggaaaaaaaaaa

SEQ ID NO: 65566 - DNA, 1193 bp, Homo sapiens
tcctagtccatgtggaggaattcagcccgttaggacgtgggaaggtccacaggtggggccgagtaaagggggacaggagacgtgcggggcaggacctcggggctggatgcagaggccggggtggtggaaaggggaggagaactgggcagggcagataagtgggtggggcctctggaggtggcgggggcaaggttggagccccgggacgaagaagggacgagggtcagcgaggcctgaagagtgggaggagatgggacccggctgtagagtgcccagaggtctaggccaggggccgcgctgccgcaggaagatgcgagagtttggctttggtgatctggtccacccggggccagtcttgccccctctgccaccgcagcgtagggcctcctgcattccgtttctctggccggaagggtctagtgttcatccctctcaggctttggcctcctcccactctcccgccctggggcccattcgtttaggaagaatgggagagccggtcgtggcccctgggcggggtaaaggagggaggcttggtaaacctctgctggggaggacccagtacagtggcagctccttgtcggggaaagaacggatctggggaaagaacggatctgcgtcacacgctcttacaggggaaccctaaggggcctgaggggtagggcttggtctccacccagagggaaggagaaatttttcgagtcgtaaagaaatgtatcagaagccatggaacatttacagccgcacacgctgggtctcccaacaaacagatccccaaaatattttccagtgctgtactcgtggcatagacccagacccacagaccaggaggaagcgctagagatgtcaacagccaacaaaaacagtgctttacacacttgtaaaattgtgacctacaggggctgggcactgtggctcacgcctgtaaccccagcactttgggtggccaaggtgggaggattgcttgagccccaggagttcgagatcagcctggcaaacatggtaaaatcctgtctctactaaaaatacaaaaattagctgggcgtggtggtgcatgcctgtaatcccagctacctgggaggctgaggcaggagaattgctggaacccaaaaggcggaggctgcagtgagccgagattgcgccattgcacttcagtttcggccacaaagcgagagtccgtctcaaaaaaaaaa

SEQ ID NO: 65567 - DNA, 2427 bp, Homo sapiens
agacagttaatgaggtctacaagctggtcatccccatcctagaagcgcatcgagaattccggaagctgacactcactcacagcaagctgcagagagccttcgacagcatcgttaacaaggatcataagagaatgtttggaacctacttccgagttggtttctttggatccaaatttggggatttggatgaacaggaatttgtctacaaagagcctgcaattaccaagcttcctgagatctcacatagactagaggcattttatggtcaatgttttggtgcagaatttgtggaagtgattaaagactccactcctgtggacaaaaccaagttggatcctaacaaggcctacatacagatcacttttgtggagccctactttgatgagtatgagatgaaagacagggtcacatactttgagaagaatttcaacctccggaggttcatgtacaccaccccgttcaccctggaggggcggcctcggggagagctgcatgagcagtacagaaggaacacagtcctgaccactatgcacgccttcccctacatcaagaccaggatcagcgtcatccagaaggaggagtttgttttgacaccgattgaagttgccattgaagacatgaagaagaagaccctgcagttagcagttgccattaaccaggagccgcctgatgcaaagatgcttcagatggtgctgcaaggctctgtgggagctactgtaaatcagggaccactggaagtagcccaagtgtttttggctgaaattcctgctgatccaaaactctatcgacatcacaacaagttgaggttatgctttaaggaattcatcatgagatgtggtgaagctgtagagaaaaacaagcgtctcatcacggcagaccagagggaatatcagcaggaactcaaaaagaactataacaagctaaaagagaacctcaggccaatgatcgagcggaaaattccagaactgtacaagccaatattcagagttgagagtcaaaagagggactccttccacagatctagtttcaggaaatgtgaaacccagttgtcacagggcagctaagaaaagccatcttcattcgtggagactgtggccctgcaaccctggagaaggacttgctggtacttaaaaaatgggacatttgccacccaggactgactgtacactccctgatcagccagcactctggaagctttgggatcccaggaaccatggaattattcccaaatggactctgaccagatttttgccatactggggggtggcgggatggaggatgggtactcaggcatgactgcgtatttattaaagtgtgtttttccacaatgtaccaaacaaggcataagcagcttctcctgctgactggccaatcactgcccatctgagagatgatttcctctggcccatatttgaatttattggagtaactcaaattgcctgaggaaaaatggaaaaattatccaccagtcgattcaaactgaatttcactctttataggaaggcagggcaaacttgtaggagtaccgaaacattttcaataaatctacaaagggaagccttactacaattccaaaaatcatcatggttggaaatttgggaggaggattatttgtgaaacttgttacccttttggtaatggtggactaatttgctgtatagttatttttgttttattattactgttaccattaattttaacatgcatttatagaagaatacattcaaagcactgatgtaggagatacacggtacttggagcagtcagccaaaaatcacagatactgctttcacttaaatggaaacaattctccgataatgctttgctttttttcttatgtcactcttgtgtactatctatttttctcctctctgggaccaagtttctttttataaagcaataatatctctgttttcatttcagaacattgtgctgtctgtcagcatatgtatatcagctacaaaatatattcaactttgacttcttttgacaaaggactttaggaaaaagaggaacaaagacattatttgagaattaaattatatatttttaatatgactgtgaccttgactgataataaagatgtaataagaattgcaagctaaatgtttccctttgcaactcatgctttgtgttttgttttgatgacctactcgctcgtaatgttttgtaaggcacttcagagagaagacagatgcatcatcctggcctccatcaaataacactatccaaggtggcacctcttctgcaatgtttaaccctgctgttgtccatttgggtttgttttttacagtctcttttgtaccacagtggatacatttgcttcatgagtgcaggaaccatgttcactgctgcattcttacccctagccctgggtccacctagcctgtaagtgccccctgagggtatcaaagcacgcggacttcc

SEQ ID NO: 65568 - DNA, 1766 bp, Homo sapiens
  misc_feature (1)...(1766): n = a,t,c or g
ttttttttttttagaaaggcagatgatttctttattgtaaagacagcagttacaaaagagaataaatatgacattaggatatatttgttaaaaatacaacaaaaacccctagtatttgtgagcaaccccaagaactcacaagtatgggggataagaacatctacagctggataccctgaaacagatgttagaaactggctaatggtgagtatggccatgactttggggatgtttgaaaggccctggatctgtcacttgggaacgtcagcggtctactgtaatacaatttgcacagagtcagagtgaacaggaacccttttactcattggtatcctaactattctttcgttcttacagtgaagtagtacagtatttaagagtggggaaaaggctgagctgggaagacatagacggagcaaggtgaagagggagggactgggggaatgctaaggggccaggagaaaggtggcaggaaggagcagacctctgtcctttctctaatgtgtgttactgtggtggcatgctgttcctcctgttgaagagtggacgggcagtggtccacccagcctccattaagacccaccattacccaggaacagaagatgcaaaagcaactggcagaatcctaccaaagatgagaacagggaagttgaatgtgaagcagagaggagtgcagagaattctccgagaaaatgggcattttctctgaggacccaaaaagacagacatatctacacaaattgatatagcagactactctttgatggggaatggtaaagggacaaggacaaagtgaaggttgctgagaagatacaagttctggctataagaagggcagaggagcagaggcaggagacagaggtgggcaggcatctggcccaccccaggaccctcctggaggggcttggacactgggaggaatgaaggctggcacgggagctggcacggggtggtggatggagatgctggctcagggaggggaccgacagcagtgatgaagatgcctagtcatctcttctcggggcatctgtgaggcacagctgtgggcagagggcaaggtcagcaggactatgtattgaagttggccttgagtttctggaaggctgcctggcggagccgcctctcctcctcctcccgcttccgctcatcttgctcagctttcaactctgcttcaaacttactggccgatgacaaggcttggaccttggcttcaaagaagttcttggcacctttgacaccctccagggccacatcgatctcagaaagctttgccagcgccatcagcccactgtcctcctgcagctcccctgccgcggccttgtggaaaatgagcaggaactcccggaagctgagcttgccatcgaagtcctcatccacctccttgatcatgctcttcaggcccaggtgggtctggggggcccccagcttctccatcatcagcttcagctccatcaggtcgatgaagccatcccgcccagcgtcatacagtttgaacatgctctccaggtccttgatgaggcggcggctgaactccggggaactccgtgtaggggttgaagaccctgcagcgccggggccgcgcagcgccctcgttgatgtccagccgccggctcagctgggcgctcastccgcgtcggcgctggccgtgggcgcacgggcgggaggctcgggctcgggcttgggctccggggctggggcgccgaggggagccagctgggggccactctcctcggcckcccnscgccgcagccggcgctccagcttgc

SEQ ID NO: 65569 - DNA, 2416 bp, Homo sapiens; identical to SEQ ID NO: 65215
  misc_feature (1)...(2416): n = a,t,c or g

SEQ ID NO: 65570 - DNA, 2416 bp, Homo sapiens; identical to SEQ ID NO: 65215
  misc_feature (1)...(2416): n = a,t,c or g

SEQ ID NO: 65571 - DNA, 1495 bp, Homo sapiens
tggccatttaggaaaaattgtccttggggatcctctaaaaaatccttttgtgtccaatagcaccttaaaaaacctgggccccagataattgttgaacctcagatttaggaaggaaaatttccaagctgtcagctaaaggcagtttcccccatttcacagaatatgtggtagaagttccgagtaaggaattttttcagcagccatgaaagctccctgcataaggaagactcagtgtgcaacatctgaaagcagtattgccagagcatgactgtggcaatgaagcaaaatgttccctccacctatccctccctcccatgtataatgcttgaagggtcagtccctgaaataagtagagagaaaagtgtttgctgaaagagctaatacataagtcaaccttcactggtaccaatgaaggcttcccagttcaaaattcaacacccagaaaaggcagaaattttagctttaaattaagtttaaattttcagttatcccagtggactaggcatttaaatctgaggagttccctgagattccatatgaggaaatgaaaaacattagcttgtggattaaatttaaagagactgtaaggagaaaaacatattttatgacatgcctcttaaggactcctattatttcaatgaatttgttacagttataatatgcttgtgataaaaaggcattatttattaagaaatctaaaatgtaataatatttcaattatatagttttagagaacctttcttgcccaacacttttctgatagcaagttggacatccttgtttctgaggctataaaccatggggtttagtaatggagtgacaatcgtgtatgtcaccgtcaccagcctgtctttgttggacacatagtttgctgtaggcctcaggtagatgaaggaagcacagccataatgaacaataacaacactgaggtgagaggcgcaggtggaaaacgctttccgtctgccctcagctgagggaatcttcaggatagtcctcagaatgcagaaataagaaacacagataaacagaaagggaaccacaagtacaagaactccacaaatgaatatcacaaatccgttaacatctgtgttggtacaagccagaagaatgactgctgagatgtcacagaagtaatgattgactttgttggtgctacaaaaagggaggctgaaaactaaatttactactgtaagagaggccaagaagccaccaattgcacaggcagctgccagttttccacacacctgccagctcataagagtggggtaatgcagagggtgacaaatggcagcatagcgatcataacccatcacacccaatagcaggcagttggtaatggcaaaaccaaggaagaagaacatttgaagagcacaacagttgaaggagattgtcctggccacagaaagtagattgatgagcatcttgggtagaatgacaaaggtgtagaagtctcagatgttgagagaaagccaggaagaggccattggtgtgtgga

SEQ ID NO: 65572 - DNA, 5662 bp, Homo sapiens
tttttttttttattcacaaacaaaacagtgattaaattttattcctttttgagttgttttgtttttatttttaaatgaagtttccatctgtacacgttaagaaaataaacaaaacaacaggaagccattctctgtgtatcctccttggaggcaggaaggatggatctgccgataggcacacaacagcacacagccagggctcatgggagtgagtgcccgtcacctcacgaaggtcatgggcctaaaacatacggaggctccatagaaaatgctccagctggctttgcagtcatgcataaaggtgaggacacttaattcaaggcatctgggggctggtgtcaccgcacatgaagagtagtgcccatgctgtcccacgagcttccttgggaaaagggaaaaacaaatcttttcctcaaatagaattgtcgcaggaaagagccatgacattttattcactgtttaatcatcgggtggcaggatttctttgaagtagaatctggtagtacccctcccaatctttgctggatcacttctaaatggtgaatatactctgtcaaggaatgttctggatcttgagaagcagtcagggatctttctaatcttgaatttggggatggagtggctcttcccccactgtgtggggaggctgctgctgccagtctgcggcctctggcagggtccctggtgtggccagagggtacatcccgggttgggggggactctctggttctgggtggagactgcggctgtcgtgctcggggccctgggcgaggggctttgccttgtgccagagctcctttccgatctacttcttgccatttcttaaccaaaaaacgtaatcttaatattgcaatgaccaccctgacggccgtgcggaacctggtgaaaggacgagatgtgattttccgttctgctttggaaggaaatacccccaaatgggcaatcatggagagtgtttcttgttcagaatcctggaatccaccaatcaacagcaaaagatacttcttttgataaatcagagcttttctaaagctctctgctctcaagtaatgcaggtacaatttttccatcttgacattgctggtgtgtgcttcctcgctggcagctggtggaagccggccggggtctgggcgcctcagggaactctgtggagccgtttcgtctggcttccaagcagacctttccgacctgcttgggctgcagcccttctgcagatggtgcttcagcaacttctcaagcttagacacggctctgctcagctccagcttctcctgggtcaccgtgctgagcgcttttgtgagggaaacattgtctttcagcaggacgtccacaaactggaactgcagctctgctgccatttttttctgggaggaggtgggcctgctcaagtcagactccagctcctccaacgtgtgcagtaaagacatcactgctttctcattggatgacgtccaatcattaactgtcctgtccacggcctggctggtgaagctggtgagaagccgggcggcagagagcagccgctgcctcatcgcctccagctctcgctgctgttcccggaggtggtccgcatccgagccggcagccctgcgggcagaacctaggtggaggcggctgccaggcacctcgtccttcgactccaggtctctcactgtctgctgaagctgcttgatcttatgcaagtcacgctgacgctgcagttctaattctcgctccttctctctcctgagcgcctcacagtgcttctgagcctcagcctcaagctgctgctgagaatgcagggcttgttgctgcaccttttcaagcatcgcttgcaagtccaccacccgggacttctcctccttcagcttctgcagcagagcgtgatgggcctgtgtgtcctggtgcacgcaagcctcctgtgtcctctggctcagctgctcggtcaggagccgctcgtgccgcaaggcctctgacagctccagggtgcggctcttctcagccgcaaggtccttctggagctcagagagctggctccgctcctgagccagcaaggcctcgcagcgtgagtgctcgatacgcagctccttctgcaggttgtccttggccgtctgctcgtgtttcagtgccacgcagagtcgactgctctgagcacgctgtgtctccaaagacgcccgcagctcctccagggccttggcactctggctctccctctgcaggtgccgcagctgctcctcctccagctggctctgcagggcacgccccttcccgtgctcactctccagctcctgaagcgcggccttcagctcgttctccttactgctcagcatggatctcagctggaggacctcctgctgcacctcgcagagggaccgggacagctgttcgctcttctgcctgctctcacagaggtcggacttcaaatctcgcactacagtctgctccgccgccaggagcttctgcacgctgtttgccttctcttgctcttcactcagcgtcttctgcaagtccccagcaatgcacttctcctgctctactttataagccagcagttcaacctgcctgcgcagctggtgctcctgctggctcccgcgcgcctctgcgcttgtcagcgccgtgcgcaagtgctgcagcttctcctggttctgcaggtgcgtcatgcgcatgctgggcacgcagcgcctggatctcggacagcaggctgctccggtccggcaagcgaagatgctccagggacttttcctgcaggtctccctgctcacggatgatcttctccagcctttcgagcagggagctgtgaccccccagatctgagccactgagtcggggctgcagctcaaccccctgcatctcctgctctttttcaaaggcctcttgcacaacctgcagaaggtcccctctccaatcggggcacgcggtgggcacttcctgcgtctttcccccatggagcgagatgtcctgtatctcgtcttccttccggggtgggtgtggctcgccgcttgggggtgcaaggccttctgacagcgccaggatctggtggctctcgtcacgcaccatctgcagtaaagccttcacgtgcttcggacgcacttccttctccttcatggcttccggcagcggctgaaaccttccagagatggaagcaggggtcacaggaccagcagtttgagcctcagggcctcctgaccccgggctcagtcttgctccaaaacccgagccgtcacttttctcacttctatcagcttttccttctaatccaggaggaggtgaacttaatgtttcttgagaatcaaaggatgttgtgataaaatcttcgacatctttctccacagccgtcctctgcacatggtggtcgtcagccggcggagactcggcccactgcagtgccagcgctgctgcagacacgcctggggaacaaagcagccccggcccctgggtctgtggcagcgaggtgtccgccctgtcccccagggatgtgtcggcactgcacaggctcagggctcctgagtggggtgtcacggggaggctgggccagggctccagggtccagtccttcctgaggacctcaggggagctccaggaagacaggtccagcatcccgaccgggctcttccggggcccagcctctgcagtgtggctctggtggcgggagccaccaagtacgctggtcggtgaagaaagagacatgtcctgacattctgatttttcttgaatgggagaatctggcatttcatctggtatcaaggaatcccaatttttgataacatcagttacaccccctggggttgtattggcatcacacgcgtctatggcctgatttttgataacatcagttacaccccccgtggctgtattggcatcacatgtgtctatgtggggtgatatgtcaggctcttctccgtcacaggaatcatcactccagctgctctccaacaggtgtgctgaggccatgggccacagagatttggtgtcggcagcatccacattctggaaggtcatggaatacagcaaacggttcagtttttcctgaagctgtttcacctgagctacgagatcgaccttcggcagctgacaatcttccagtactttttctttacccttgccgccgtcctccagactcaggcgcatttcatttttcaccaagagcagctccgactgcagctgcctctggcagacggtgagcactgacatcacgccttcttgcttgcagagaggtgcatccttcaacgtcaccaggacaggctgcagatcaccctgtgggtcagggacaaccggctccaaagcagcatcatgggaggcctccacgtcgccggtgacctgggccttggcgccaccatccatgcgaggctgtgggtgggccccgggcacccgtgtgtgagctgtggctctgcgggcctgccgcctgtccagctccacctggcacctcaggaaccgctggtgcagcacctgcagctggcggctgaggcgggcacactgcgctcggagccactgcagctcgggaggcgccgccccggctgccaggggctgctgctccagggcgcggcggatgcgggccaaggccaacaggacggcctccagctcggcagagtgggccgccttccgctggttcagagcgtcgatttctaaatttctctcggcaatcgtcgcttcctttgctttcagggccgcttcgaactcctggatccgggaggccatgtcttcgacctcagcctccctgagggctacattgcgctccagctcagccagctgtagctccgcagcctcctctgcgccctggaggcgctgctgcagggcctccagggcctggctgtgcctgcgctcctggtcagccagcagccggctcagggcctccttggcttccagcgcagcctcgagctcgccctgtagggcctgcccacgagggcccccggcctgggagcagagcagctcgctctgcagactgccagcctgactgtcgctgacttcgtgcaccacaggccccatgagggacagctcgtgctgcagcttctcaatgacttcatggagttgttcaatttcctctgctttctccttttgtaatcgtttctgattctcttgcagattttcaatagtggctttcagctcttcaatctcagaacttctggtatatatgaccttcaagctcgtgttctcttcctcaagttctctgaggctgacagcagtctggctgttctgcatgtccaattttaagttcagatgtagtatttcttcatttttactttctaagtcacctttcatcttttctagctgttcttttaagtccaaaacctcgctctcgcgccgcaggagtgctctctgtgtcacctctaactgtatttctggaccctcaggagggctgcccgaaggaggctcgggacatctgcctgcatctagtgtagactgcaacgtggacgccagaagcaagctactcatctgctgtttctttaacacctctttatcctgttccagccctttcacgatgtttttctgtttttccacttcttcctggagctgggccacttttttcctgatgttgatgttcatctcctccagacgtttaatttcttcttcctgcattaacacttgtctatctgccgactctttctgtatagccaattcattaaattcatccaacttttctctcaacttttgttgtaacaactcaacctctccatccagcggcgcc

SEQ ID NO: 65573 - DNA, 2655 bp, Homo sapiens
cgaactgctacagaatgtgacgttcgtatgagcaagtctaagtcagacaatcagatcagtgacagagctgctttggaggccaaagtgaaggatcttctcacgctggcaaaaaccaaagacgtagaaattttacatttgagaaatgaactgcgagacatgcgtgcccagctgggcattaatgaggatcattctgagggtgatgaaaaatctgagaaggaaactattatggctcaccagccgactgatgtggagtccactttattgcagttgcaggaacagaatactgccatccgtgaagaactcaaccagctgaaaaatgaaaacagaatgttaaaggacaggttgaatgcattgggcttttccctagagcagaggttagacaattctgaaaaactgtttggctatcagtccctgagcccagaaatcacccctggtaaccagagcgatggaggaggaactctgacttcttcagtggaaggctctgcccctggctcagtggaggatctcttgagtcaggatgaaaatacactaatggaccatcagcacagtaactccatggacaatttagacagtgagtgcagtgaggtctaccagcccctcacatcgagcgatgatgcgctggatgcaccatcctcctcagagtcggaaggcatccccagcatagagcgctcccggaaggggagcagcgggaatgccagtgaagtgtccgtggcttgcctgactgaacggatacaccagatggaagagaaccaacacagtacaagtaaggaactccaggcaaccctgcaagagctagctgatttacagcagattacccaggaactgaatagtgaaaacgaaaggcttggagaagagaaggttattctgatggagtctttatgtcagcagagcgataagttggaacactttagtcgacagattgaatacttccgctctcttctagatgagcatcacatttcttatgtcatagatgaagatgtaaaaagtgggcgctatatggaattagagcaacgttacatggacctcgctgagaatgcccgttttgaacgggagcagcttcttggtgtccagcagcatttaagcaatactttgaaaatggcagaacaagacaataaggaagctcaagaaatgataggggcactcaaagaacgcagtcaccatatggagcgaattattgagtctgagcagaaaggaaaagcagccttggcagccacgttagaggaatacaaagccacagtggccagtgaccagatagagatgaatcgcctgaaggctcagctggagaatgaaaagcagaaagtggcagagctgtattctatccataactctggagacaaatctgatattcaggacctcctggagagtgtcaggctggacaaagaaaaagcagagactttggctagtagcttgcaggaagatctggctcatacccgaaatgatgccaatcgattacaggatgccattgctaaaggtagaggatgaataccgagccttccaagaagaagctaagaaacaaattgaagatttgaatatgacgttagaaaaattaagatcagacctggatgaaaaagaaacagaaaggagtgacatgaaagaaaccatctttgaacttgaagatgaagtagaacaacatcgtgctgggaaacttcatgacaacctcattatttctgatctagagaatacagttaaaaaactccaggaccaaaagcacgacatggaaagagaaataaagacactccacagaagacttcgggaagaatctgcggaatggcggcagtttcaggctgatctccagactgcagtagtcattgcaaatgacattaaatctgaagcccaagaggagattggtgatctaagcgccggttacatgaggctcaagaaaaaaatgagaaactcacaaaagaattggaggaaataaagtcacgcaagcaagaggaggagcgaggccgggtatacaattacatgaatgccgttgagagagatttggcagccttaaggcagggaatgggactgagtagaaggtcctcgacttcctcagagccaactcctacagtaaaaaccctcatcaagtcctttgacagtgcatctcaagtaccaaaccctgctgcagctgcaattcctcgaacgcccctgagcccaagtcctatgaaaacccctcctgcagcagctgtgtcccctatgcagagacattccataagtggaccaatctcaacatccaaacccctgacagccctgtcagataagagaccaaactatggggaaatccctgttcaagagcatctgttaagaacatcttcagccagccggcctgcttccctgccaagagtgcctgcgatggaaagtgccaagaccctctcagtgtctcgacgaagtagtgaagaaattaaacgggacatttctgcacaggagggagcgtcgccagcctctctgatggctatgggaaccacgtctccacagctttccctgtcctcttctccaacggcatctgtgactcccaccacccgaagccgaataagagaagaaaggaaagaccctctctcagcattggccagagaatatggaggatcaaagaggaacgccttgctgaagtggtgtcagaagaaaacagaaggctatcagaatattgacattacaaacttcagcagcagctggaaa

SEQ ID NO: 65574 - DNA, 4410 bp, Homo sapiens
  misc_feature (1)...(4410): n = a,t,c or g
ttttttttttttgtgcaagatttaaataaaaaaacaaaacaaaaaaataggaaatggttgctttcaaaaatttccccaggttgtgaaaaggtttgccaacgactctcagggggtgtggttctaagctgcatcaagtgaaacaaatacaaaatgctgtccctcctccctgggctcggaaggcagtgcactttctccctcttaacagcccagactagacgggtgaggaggtcagtggcctgtgacccagggccaagctgggagtgtcccgcatagcctttttctctgaccagtggggggaattccatctacccttgagggcgtgctgggctggggccccgttttccacaaccagcacatgtgntggtgagaaaaaacccaagggtagctttatcaacagggctgctggggccttaaataacttgacagtgagtgttgggccgggtcacagccaggggaaaggacttaacacagattgccctcccaagcccccactggctgggcctaattttaggattaccacgggaaaaaaagctttgatgaaagacaacaggaagtcaacacagcagagagtggtgtggacaacccatgaatgccagcctcaccgcattcccatgccccacagttaacgatgacaacaacagcaataataataataataataaaacaaaggtacaggtgaaaagcagcgcttggggtgtgctgctgcaagctggggaaggcgcgtgctcaacttggatgggacacacctagtctttcttcaagtccctggattcaaagagcttcaaccgttcttgcaccgtcaggccttccttcagactcttggacctgatgtttctgagttgccgggtgacacaggatctgtctttcttcaagaagtcagggttgcttttagatttcattatatcatatccggacaccgtggcactgtcaggggacttctcccccagtgcttccgttgcagccttgagctgctccttcaacctgctgatgtcacagtcagccttagccttcgcgatgctgagctctgtgtagatgtctttgtacttgtcacttgcgtacttcttgtcccgcagtgccgtctgcagctcatccttgagggagctaatctcctgtttcaggtactgtatttccgattcctttacccgcaataagacctctagttcataggcatccttgccctgtgcaaggggtgacccagtggcctccccaccgccgtccccaatcaagcaacgtccgcaaccgtgtgatctctgcagccaggcggttgttcagctcctggttgtgggcattgagctcctggttctcacgctggcactgccgcagggcctgccgctcggcctccagcgcctgggccagatgggcattctccaggcacttctgcgagtactgctccgagaggacctccaagttccacgctgcaccgactgcagctccctccaggtactggcgccgcagggcctcaaacatccgaagttgacgctgctgatctgggaccgctggctcttctcccagtcccgctccatttcctcccggtgggcgttcttcatggcttcgatggctgagatggtggccgctgtctcctcggctaggaggcggtctttctcttctcgaagtttctctagctcccgctggtgctgcctctggagatcttcaatcttccttctggtgcgtttcttccattgctgcaaaccctcgctcgcacgtggccttaaggctctccaagtccctctggtacttctcacgcagtgtggccgcgtcgccctccaggtccttgtgtcccagctcctcccgcatgacatccatctgggcctccagctcctggatgcgctccctcagccccgtcatggagtcagcctctccctgggtggcctgccagttgggggcaggggctggcagggccttggggtgtggcccctggtggaggcagagggtgtcctgaaggcacctcaggctctgcgagtagtgctcctgcagggtcctcagctcctcctcgtggatcgtctgcagctcccggaccttgagctggaacctgtcctccagggtctgtatctgctcaccatgatgcctctccatgtcctgcctgtctctgaccgaggcatccagctggctcaggacccggctgcgctcagcctgcagtgtgctctcggtcctggtcagctgctccaccacacaccgaatctcctcctcatacctgccccgcagggtgaacatgctcatgctgtgcttgctctctgcatcctccagacactgctgctgatggtctagctgggcggccttggccttgagctctgcattctccctttcaacaatggcgatcacatccaggtactcgctcttctgcttgcggagaagctcctcatactcctccctcagggcccgggctgcctgtgcctgctctgagcaggagggctcccgggtttgccaggactccttgcagagctggagctccttctcatattctagccggattctgcaggacgcatagcaaacctgggcctgaataatggcatcctgaaccaacaatgaagaatactgaccgaggcctcccaaacaagtgttatacgagagactctgggacacctggagaagcttctggcaatctctcagcgattccacaggtggcagagatggtaaggcagccgctatctcctctaagaggctggccttctccttcagctgctgggcaagctcctcctgaatagcaacaaaggccccagggctctggtcagacacatcgaagggctcctgagagctgtctgagtctcggcccaggacttctcctaaggggctcaggtcccaggacagctgaacaccatcttcatggcccgctggaagcctgagggcttccaagacctgctgcatcactctttcaaagtctggggtttggtaggctcccaggatttccctcagcaggcatttgtgctgccgcagggccgtctgggtgccccgcagggtctcctggatgctctgtagcctgcggtggaacgactccctcactgactgtgtggcaaagctgagctctgccctgacccatgtggcattggccaggatgggggccaggccctgtgggatgctttgctgcccgtctcctgaggcaccgactgcctctcctcccagtgtccccaagtgcttcctcagagactcaacctggctccagaactcaccatccactaggaccttcctggcccaggtgtctacgggggccccagcagattccatcggtggctgtcctgaccaagaaatctcatggagcattcgggagacatctgatgttgtgttcttcagggaatctgctatctggctgatcagcgaggcctccagagcaatctggtcagaaagaagcctcacctgctcctgctctgtcaactcagactgggagcactgctgcagggaggcaggcttcccattctcctcggtgccacctgtctccagctgtgcacgggccccgccatgggctggggccggccagtgctgcagggcttggatggcgctgacgagtgcactctccacactggccagggaggctgcgcgtgcgtcctgctcatcctcctggctggccctaggcagagatctcagttgttctcggcaattttccaggcacatcagggcctgactattcttgacctggaagtccccaagctctccaacatgcccttcaaccctcctggccctctcctgcctctcctgctccagctgggaggccagtgcgccaacctggagcaggctggcgcggagctgctcacgcagctgggcctcggtgcccgcccactggtggtgcagtgcgagcagtgcctcacggctctgaccctgctggctctccagcctcacggtcacgtctttgagcttttcctctgtgacgtagagcttggtctccagggagtggatgatggagaggtacgtgtcagagtcgccagttgcaggcagtacactgggtgcaggctctgaggacatgctttcttccgagggtgaccggtcctggctggtgtcggaagatgtgctgctggtccaggtcttctcagacccttcggggtgaatgtatctttggcactggattgtggagaaccggattctttgccttttaacaccaggtgccccttggtcgagtttggctgtgccctgctgatggccctccctgtcaagcacttccactgactttgggggcaccatgctgtcttccctactggggctgccatcaccgtactcttcccccggaggagcccccaggtcctcgtcctcatcctcgagccttgtgtgtgggaggcctagaggtgccctagtggcttggactggttggcctgggagcaaagtgccatccctttctgtctcttcaggggtactccgtggctcttccatgtcctttggagattcacttgcaaatttccttaaaatctcttcttttgcctggagctt

SEQ ID NO: 65575 - DNA, 2751 bp, Homo sapiens
gcgaccgccagcggctacacggtacccgcgtgagaagctcaagtccatgacgtcccgggacaactataaggcgggcagccgggaggccgcgcgccgctgccgcagccgccgtagccgccgcagccgcagccgccgctgccgccgaaccttaccctgtgtccggggccaagcgcaagtatctggaggactcggaccccgagcgcagcgactatgaggagcagcagctgcaggaggaggaggaggcgcgcaaggtgaagagcggcatccgccagatgcgcctcttcagccaggacgagtgcgccaagatcgaggcccgcattgacgaggtggtgtcccgcgctgagaagggcctgtacaacgagcacacggtggaccgggccccactgcgcaacaagtacttcttcggcgaaggctacacttacggcgcccagctgcagaagcgcgggcccggccaggagcgcctctacccgccgggcgacgtggacgagatccccgagtgggtgcaccagctggtgatccaaaagctggtggagcaccgcgtcatccccgagggcttcgtcaacagcgccgtcatcaacgactaccagcccggcggctgcatcgtgtctcacgtggaccccatccacatcttcgagcgccccatcgtgtccgtgtccttctttagcgactctgcgctgtgcttcggctgcaagttccagttcaagcctattcgggtgtcggaaccagtgctttccctgccggtgcgcaggggaagcgtgactgtgctcagtggatatgctgctgatgaaatcactcactgcatacggcctcaggacatcaaggagcgccgagcagtcatcatcctcaggaagacaagattagatgcaccccggttggaaacaaagtccctgagcagctccgtgttaccacccagctatgcttcagatcgcctgtcaggaaacaacagggaccctgctctgaaacccaagcggtcccaccgcaaggcagaccctgatgctgcccacaggccacggatcctggagatggacaaggaagagaaccggcgctcggtgctgctgcccacacaccggcggaggggtagcttcagctctgagaactactggcgcaagtcatacgagtcctcagaggactgctctgaggcagcaggcagccctgcccgaaaggtgaagatgcggcggcactgagtctacccgccgccctcctgggaactctggctcatccttacgtagttgcccctccttttgttttgagggttttgtttttgttcattggggggtttttgttttttggtttttgttttttttgattctatatatttttccttggttttgttgcctgttaaggctgaacaatagaattggccaggacctaggttctcatattcttggtattcctcctggatggaaaggctgttggcatcaataggggacagaggctgatgctggagtggccagtagaggtggtggagcagagcacccatcttttaagtggggctgtatcaggctgggtttatttaaaagcaacaaaatgttttggttaagaaaattattttgctttcagtgtaaatcttcgcagtgttctaaacaaagttcagtcttctgcttgcccctttccctcactgatgtctgcacttggttgaggtctcctggagcctcacaggctctgctgttctccacttctcacctgccatccacgccctgcaagctcatgcaaacaccctttcttcctcctgcggcagagttgttcaggttgcctgggcaggggcttaaacagtgccagcccctgccatcccaaagctattgttaagccccccaggcgtcctccacccacgcccactagcctgccatgtccacagttccttgggctgctgaggggctagtgcagtggtcctgacctctcttatcaagagcacacttctttgctggttgctccttttgagcatatgcgtgtgattatttggaacagttagacttgccacgttgggtcagttttagaaattgtttctagctagagggactggtgtccttccaagtctagcatttggggtatggaaaattgttgtggtgtgtggtagggtttttgttttcttttttgagttttttttccccctttagtctcctggctttttcctttcccttcccttctccactggccagcttgggcctcatcctcatgtcatccttctaggaaggcgcctgccccatcttgtctgccggcagcatgcatccaaggccagagctcaggcctgcagactgggctggtgcctcctccgcttcagggtatgggagttggtgaaggggctttcaaaaaataataagaaaaaaaaggtaaagtctttggtagcttctatccactcagatcctggaaggcagcaaggttttgtggatctagattcattaggaatgtcttcttgtcagccaggccaggacccgggcttgccaagagcagaggccctcccagcaaccaggataccaccactttgggggctttgtgtacagaggtccgggtctgagacctcataggctgcagaaatctggggcagccaccatcaagaagcccctctcaggggccagaactcctttgccagcgtggatttctcaagtcgggactgcataattaaagcagttgcagttttattttttttacagcttttttcccaaaaatgatttatagttgtgtgtgcagcacttcgccctgaaatgtgtgctctacaataaacaaccaaatctaatatattttgaaaaaaaaaaa

SEQ ID NO: 65576 - DNA, 2354 bp, Homo sapiens
agccctgctcatggcagtgaggtgggctcccagctgctgaggccacccagcactagtgagtgacttggcatttttatttttgttcagatcacaagaatgggcattacatcatcccacagatggctgacagatctcggcaaaagtgcatgtctcagagccttgacttatccgaattggccaaagctgctaagaagaagctgcaggcgctcagcaaccggctttttgaggaactcgccatggacgtgtatgacgaggtggatcgaagagaaaatgatgcagtgtggctggctacccaaaaccacagcactctggtgacagagcgcagtgctgtgcccttcctgcctgttaacccggaatactcagccacgcggaatcaggggcgacaaaagctggcccgctttaatgcccgagagtttgccaccttgatcatcgacattctcagtgaggccaagcggagacagcagggcaagagcctgagcagccccacagacaacctcgagctgtctctgcggagccagagtgacctcgacgaccaacacgactacgacagcgtggcctctgacgaggacacagaccaggagcccctgcgcagcaccggcgccactcggagcaaccgggcccggagcatggactcctcggacttgtctgacggggctgtgacgcctgcaggagtacctggagctgaagaaggccctggctacatcggaggcaaaggtgcagcagctcatgaaggtcaacagtagcctgagcgacgagcttccggaggctgcagcgagagcactttgcacccatagatccacaagctgcaggcggagaacctgcagctccggcagcctccagggccggtgcccacacctccactccccagtgaacgggcggaacacacacccatggcgccaggcgggagcacacaccgcagggatcgccaggccttttccatgtatgaacctggctctgccctgaagccctttgggggcccccctggggacgagctcactacgcggctgcagcctttccacagcactgagctagaggacgacgccatctattcagtgcacgtccctgctggcctttaccggatccggaaaggggtgtctgcctcagctgtgcccttcactccctcctccccgctgctgtcctgctcccaggagggaagccgccacacgagcaagctttcccgccacggcagtggagccgacagtgactatgagaacacgcaaagtggggacccactgctggggctggaagggaagaggtttctagagctgggcaaagaggaagacttccacccagagctggaaagcctggatggagacctagatcctgggcttcccagcacagaggatgtcatcttgaagacagagcaggtcaccaagaacattcaggaactgttgcgggcagcccaggagttcaagcatgacagcttcgtgccctgctcagagaagatccatttggctgtgaccgagatggcctccctcttcccaaagaggccagccctggagccagtgcggagctcactgcggctgctcaacgccagcgcctaccggctgcagagtgagtgccggaagacagtgcccccagagcccggcgccccagtggacttccagctgctgactcagcaggtgatccagtgcgcctatgacatcgccaaggctgccaagcagctggtcaccatcaccacccgagagaagaagcagtgacctctctccccacaccctcacctgcaccctaggacctcactggccataggagctgggccactccagacattaatccccaccccaacagagccactggcacaagtgcccttagtgctgccacactccctggcagccaggtgccctggtgcccacccctgtcgagcccctaaggatggggaggtgggggggcaggagcttctgtcccccacattccatgcacctcccctctgtatatagcatctcccccctcctagtgagcaggggcctgcaaggcatcactcccagcccctcgccttctagggcaccctcagcaaaggggcaggtggggacactccaagtggggcagctctccgtacatgcgccccacccccatgagccagttcagccctactgggggctgagcgggggcatcccctcctttgtacatagtctccatggatgtccctgccctgtagccaccagccccttgctgctctccctttaatgccatatggcccctgcctagggcacaggccccaacctgtgtgctggggtccccagcagcaaacactggaaagtctgttttttttttttctttcttcttccccaccccttaattttaactttgtggtaactgagtgcccccgcgtgcctgcgtgttgagtgtgtgggcgg

SEQ ID NO: 65577 - DNA, 2547 bp, Homo sapiens
cgatttcgtctgggctctccgcgggtcaagcggactttcctgttccggggccggaaggcaaaggtgctggtggcgcggggagtgcgcgtcaaggtgaacgaggcctaccggttccgcgtggcactgcctgcgtacccagcgtcgctcaccgacgtctccctggcgctgagcgagctgcgccccaacgactcaggtatctatcgctgtgaggtccagcacggcatcgatgacagcagcgacgctgtgggaggtcaaggtcaaaggggtcgtctttctctaccgagagggctctgcccgctatgctttctccttttctggggcccaggaggcctgtgcccgcattggagcccacatcgccaccccggagcagctctatgccgcctaccttgggggctatgagcaatgtgatgctggctggctgtcggatcagaccgtgaggtatcccatccagaccccacgagaggcctgttacggagacatggatggcttccccggggtccggaactatggtgtggtggacccggatgacctctatgatgtgtactgttatgctgaagacctaaatggagaactgttcctgggtgaccctccagagaagctgacattggaggaagcacgggcgtactgccaggagcggggtgcagagattgccaccacgggccaactgtatgcagcctgggatggtggcctggaccactgcagcccagggtggctagctgatggcagtgtgcgctaccccatcgtcacacccagccagcgctgtggtgggggcttgcctggtgtcaagactctcttcctcttccccaaccagactggcttccccaataagcacagccgcttcaacgtctactgcttccgagactcggcccagccttctgccatccctgaggcctccaacccagcctccaacccagcctctgatggactagaggctatcgtcacagtgacagagaccctggaggaactgcagctgcctcaggaagccacagagagtgaatcccgtggggccatctactccatccccatcatggaggacggaggaggtggaagctccactccagaagacccagcagaggcccctaggacgctcctagaatttgaaacacaatccatggtaccgcccacggggttctcagaagaggaaggtaaggcattggaggaagaagagaaatatgaagatgaagaagagaaagaggaggaagaagaagaggaggaggtggaggatgaggctctgtgggcatggcccagcgagctcagcagcccgggccctgaggcctctctccccactgagccagcagcccaggaggagtcactctcccaggcgccagcaagggcagtcctgcagcctggtgcatcaccacttcctgatggagagtcagaagcttccaggcctccaagggtccatggaccacctactgagactctgcccactcccagggagaggaacctagcatccccatcaccttccactctggttgaggcaagagaggtgggggaggcaactggtggtcctgagctatctggggtccctcgaggagagagcgaggagacaggaagctccgagggtgccccttccctgcttccagccacacgggcccctgagggtaccagggagctggaggccccctctgaagataattctggaagaactgccccagcagggacctcagtgcaggcccagccagtgctgcccactgacagcgccagccgaggtggagtggccgtggtccccgcatcaggtgactgtgtccccagcccctgccacaatggtgggacatgcttggaggaggaggaaggggtccgctgcctatgtctgcctggctatgggggggacctgtgcgatgttggcctccgcttctgcaaccccggctgggacgccttccagggcgcctgctacaagcacttttccacacgaaggagctgggaggaggcagagacccagtgccggatgtacggcgcgcatctggccagcatcagcacacccgaggaacaggacttcatcaacaaccggtaccgggagtaccagtggatcggactcaacgacaggaccatcgaaggcgacttcttgtggtcggatggcgtccccctgctctatgagaactggaaccctgggcagcctgacagctacttcctgtctggagagaactgcgtggtcatggtgtggcatgatcagggacaatggagtgacgtgccctgcaactaccacctgtcctacacctgcaagatggggctggtgtcctgtgggccgccaccggagctgcccctggctcaagtgttcggccgcccacggctgcgctatgaggtggacactgtgcttcgctaccggtgccgggaaggactggcccagcgcaatctgccgctgatccgatgccaagagaacggtcgttgggaggcccccccagatctcctgtgtgcccagaagacctgcccgagctctgcacccagaggaggacccagaaggacgtcaggggaggctactgggacgctggaaggcgctgttgatccccccttccagccccatgccaggtccctagggggcaaggcctt

SEQ ID NO: 65578 - DNA, 2349 bp, Homo sapiens
agcggccgcttgcccgggtaccccgatcgccgaggccccggagccttcctccgctggggctcaggcagcggaggagccgtcgggggccggctcagaagagctgatcaagtcggaccaggtgaacggcgtgctggtgctgagcctcctggacaaaatcatcggggcccgtagaccagatccagctgactcaagcacagctggaggagcggcaggcggagatggagggcgcagtgcagagcatccagggctgagctgagcaagctgggcaaggcgcacgccaccacgagcaatacggtgagcaagctgctggagaaggtgcgcaaggtcagcgtcaacgtgaagaccgtgcgcggcagcctggagcgccaggcggggcagatcaagaagctggaggtcaacgaggccgagctgctgcggcgccgcaactttaaagtcatgatctaccaggatgaagtgaagctgccggccaaactgagcatcagcaaatcgctgaaagagtcggaggcgctgccagagaaggagggcgaggagctgggcgagggcgagcggcccgaggaggacgcagcggcgctggagctttcgtcggacgaggcggtggaggttgaggaggttattgaggagtcccgcgcagagcgtatcaagcgcagcggcctgcggcgcgtggacgacttcaagaaggccttctccaaggagaagatggagaagaccaaggtgcgtacccgcgagaacctggagaagacgcgcctcaagaccaaggaaaacctggagaagacgcggcacaccctggagaagcgcatgaacaagctgggcacgcgcctggtgcccgccgagcggcgcgagaaactgaagacgtcgcgggacaagttgcgcaaatccttcacagcccgaccacgtggtgtacgcgcgctccaagaccgcggtctacaaggtgccacccttcaccttccacgtcaagaagatccgcgagggccaggtggaagtgctcaaggccaccgagatggtggaggtgggcgccgacgacgacgagggcggcgcggagcgcggggaggccggcgacctgcggcgcgggagcagccccgacgtgcacgcgctgctggagatcaccgaggagtcggacgccgtgctggtggacaagagcgacagcgactgagccgcccccgctgccacccaccccattcctcgctccttccgaacttcctctttcgcattctctctcggctcgagctggctgagatttttctaaattgaaaacacgcccccctccccacacctccaggaactccactcccagtcttagagctgttaggacccgatggggaggcagcccccgcagtggacagcccccgcttggacacagtccgagtggaatgggaagggaatggtcaatccctgtcctggttgtccaagtcgggatctcagaggaaattgcagtgattccacggttaggcccccctgggggggctgccttcccctcagcctctccccacaccacccacccagctgctgtcattccgctcactgagctcttcttcattctcaccctgatccctgggggactcaaagccaaaactgcccaaagaggaaagattgaatcctaaaggggatccttgcccccatgggaggccccctactagaaggacgtgaaagcagcttttgggggaaactgaggcagtggggaagacagagcagaatgagccctcaccctggctgggggtccagcacaggctgtatctgcagagggtcccagaggaacgctggagccaagagaagccctgggaaggaggggtggggaacgacatgcatgtgagggatggcacactgatgtgtttatgcacctgtacacaggagcgcatggccatggctttggaaaggagaatggaaaaatagaagaaggtcggccgggcttggtggcttaagcctgtaaccccagcactttgggaggccgaggtgggcggatcacctgaggtcaggagttcgggaccagcctggcaaacaccccatctctactaagcgaaaacccatctctactaaaattacaaaaattagctgggcatggttgcgcatgcctgtaatcccagctactttggaggctgaggtggggagaattgcttgaacctgggaggtggaggttgcagtgagccaaggtcgcgacactgcactccagcctgggtgacagagtgagactccatctcaccggacggggatgagcatgcctgaaatcggcgctcctttttaggctgacctggggggaaccgactttaacctgggaggtggaggttgtagtgttccccttatgggacactgcactacaacctaggtgggagagtttggactccaactcttcttagg

SEQ ID NO: 65579 - DNA, 3269 bp, Homo sapiens
ttttttttttttactcaatgctcagggtttatttgcaaaactgggctgggttgagcagagggggctttgggatgctgacccctctctgacctggccgtttcgacctcagccctgagttaccctgcagcaggcatggacaggcggccgccttgcctgtcgcagcttcctggcagcagctggccttgcctggaccagcctgtctgccccagcggccggacgtggccagctggaatccgtgctgcgcgggcgctccggccgtggcagggacacataggcccgcacatgcttagtttgttccagggcgtcccagtgacatcagggaggggcaaggccaaggtgggccacaggctctcccagggtaggactcctgagtggcgccctcccgaaaggggtcctgctggcccctcacccttctggggccggtttcacccacggggtgggcagcaggagcacggagcgcggggtgccacacacaggccggggggctccgcagaggaggcccaaggttttcatgatcagacaatgcacatcctggctccaggtggacagagcatggggatggaggcagaacgttctcagacagcagtggcctcctgggccgggaagccacgggtgtgtgggggagccatgggcgcagggacacagaagggcgtgcagccacactcatccacgtgggtgtaggtgtgcaggatggctgagccgttaggacagtgcaagggcaccgtctcctcgtggacccgcctctcctggcagcaggtgcactggtgctgcatggcctgggcctcttgctgagtacttggacgcttccggggcaggagcccctcgcagaaggtgatgttgacctcggtctcgcagccctggtgccacagggatggtcgtgttgatgcggacttggacaggagtcctcctcacaggagtagcagcagccggttttcctgaggctccccctgcagctggacacatctgggcaggatgcaggctgtggggtcagcaaatggactccaccctcagcctcacagaggtacacggtgcagttgtccacatggctgttgacccaggtttcattcagctggactggctggccatcgggcgtgaggcaggcggtctggacgcactccccacagcactgcccggccactctcttgtactcaaagccctggggacaggtagtattgttgcaggcatcctcctgacattgcaccgttgggtcctgggtgtccccagagaggcaggtacacatgtggcagggaagggcgcctgggaaggttgcaccaaccccgtagaaggtgccattgtacgaacacagctgaggtctgcagcggaaggtgggacagcagtcgccctcctcctgggtgcagatggactcctgccctggcgggcacacaggcaggctctgggggcaggtggttgtgttgcacacgcacaccgtctcggggcagcaggggttctcggcccggggcctggtcacggttacgaagccgggacggttgcacggcgggggctgaccctgggcgtcacagggcaggggcttgcactgcaccgacactgaaccctcgtcacacacgcaggactggcagttgctgacccaccgctccccgggaaatttaggaaacccatcgggtcccacgcaggggcaggcctgcacgcagatgcccatgtgtgcgttgaagaggatctggtcctcagggcagaagcagccctccgccatcccctccagctgtgggctctggttcctagagttgcaggtggcaggctgtatggggccgcatggcttgtacactttggtgggtgggcaggtgaggtcgcacaggccaccggttgcacctcgccagtcactgcacactccccgggcgcggcagagctctgcgtaagcctccaggctctggcagggcacctcaaggcggcccctgcagtggtcgctgatgcaggcgttgaagaatgggcccgggggcagaagggtgtggcactcagcaaagacctggctcagcatcagatcacagagcagctgtggtgggcatggggtgggggtgggtgtgctagacaccggggctgcggggctggcagtggggggtgtgccagtcggggcccaacagccatcctttctgctgtcggggaccagccacgtcttggccatgtccttgcaactggcggcagtggttccgtcccgctggagacagtcgtccctctggttgttggtgcaggtgccgcactggccctcggtgttgttgtggaagaggctgtagggcagccgggcctggaacacttggccattgaaggtgacgctcacgcccagggcaggaatgtccacagccatggtggtggtccccagcacagacacaagcacgccgttcttgctgaaaccgctgctcaccggaattgggtcaaacaggatcaggccctcctccttcccatgcaccatggtgacagtgaggacgatatccatggacttgtagtggatgctgagggccgcgggggcagcgggcggcagcggcagtggcagaggccgtgcagtagtggttgtccaggtagaggctgagattcccaaagcgtgcatggatctctctcatgaggacataggtgcagttgccccggaaggtgtaagaggtgccgtcaaaggtggaatagtgggagccgccccacatgctgcagatgcactcgcactcatagtggaagtcacagggctggctcgggtccgacactttgatgggcaggtgcttgttcacgcaggtgacgttggccacaggctttgggtccagcaggacgacacggttgtcacccacgcacctggccaccgtgcagttctccagggtccaggtctcattcacctgccggagagggatggcattgtcacagccaggggcaggggagggcgaggacagcggggcggaggacactggcggtggggaggtgggacaggcgccctggaagcggtcaatgtcacagtgctgattgcacactgcgtagaaatggcagccggctcggtcggtcttattgtagatgacttccccgggcgagaaaaactgtccaaatgccctgcagaagcagggagtagaaaagtgggagctggggaagccagtgggtctcagggtggtgaggactgaggaggacacagtggacacgctgaaggttggcaggctgctggggagcactgcaggggtgcgggtggtccccacggtggacgagctgggaaccgtggaggcagtggctgtgggcatagtggccatggtggtcaccactttgggggtgtgagctgttcccagagtggagga

SEQ ID NO: 65580 - DNA, 3307 bp, Homo sapiens
cgcagagactatctgagtatctcaagtggatttatgttaccatttcaaataaggagtttatatagcccgggcaatgttaaggtgttttaataaaccaaaggacaaaaattaagtaaacttgaaagaatgtcaactgaaatatctggggtttttgaaaacaaaaataaaaatttgccaaggaaatacctatattgctctttggtgtaacgggaaactgcgctgcctgtagtaagctcatccctgcctttgagatggtgatgcgtgccaaggacaatgtttaccacctggactgctttgcatgtcagctttgtaatcagagattttgtgttggagacaaatttttcctaaagaataacatgatcctttgccagacggactacgaggaaggtttaatgaaagaaggttatgcaccccaggttcgctgatcctatcaacatcaccccattaagaatacaaagcactacattcttttatcttttttgctccacatgtacataagaattgacacaggaacctactgaatagcgtagatataggaaggcaggatggttatatggaataaaaggcggactgcatctgtatgtagtgaaattgccccagttcagagttgaatgtttattattaaagaaaaaagtaatgtacatatggctggatttttttgcttgctattcgtttttgtgtcacttggcatgagatgtttattttggactattgtatataatgtattgtaatatttgaagcacaaatgtaatacagttttattgtgttaccatttgtgttccatttgcttctttgtattgttgcatttagtacaatcagtgtttaaacttactgtatatttatgctttctgtatttaccagctattttaaatgagctgtaactttctagtaaagaattgaaaagcaaatctcactaatgatacacagatagataaagcaagtctatcaacattaaaaatactaaaaaataaagacacacacagagcattttagtgacatccactacttattgccgctatgagttagagtctatcagtgttcttgttataaccccctattttcaggggggttaaaaatcagctttaaaaaaatacataaaaatttcatcttaaagcactttcattttataccaacgtgaaaagtgccatttttagaataactttaaagcttaacaggtttccttttaatatcctttttttgtgtgctctttacttacacaatggctttgttttgctttttcagccacaccccttatgtgaactagtgcctttgggtatcacgtaaaattttttccaaagggttactttaaaaatctgttaccacaattatgagatgatttttaagtgataaattaaacttcttcttgtataaattctgcccagatctctccacaagagctgagggtttcataactttatggcttaataaatgtatgacactgaaaagatttgagtgtgaatctactgaaatcactataatgcacattgaagctatgatggtatttgagtagtgaggttacttttgatcggagcaacataatgctcatagaatcttctagaagaagagaaacaaagggattgataaaatgctgagaactagtgattatatatttttctgtatttacctgacatttattttaatgttcaaaaagtaaacactttaagtttgatgtgttttactctctcattgttttaagtaattgccaactcagaatacatcattcttaggctgaaatttgtctttccattttttaaggtgaaatagtactaccttacgtgatagcatacaaagaagaaagctctagaaagagaaattatggagaatgattatttaaattacaattaaggaaatgagaatatgatcccctcttccgagttgcccacaaacttgcttctttgcttttgctccctgtaatagaactacttttcaacaaatctaattttgcacggcaccgttaaccatattttcactacagcaaacttagtgctatgggttttctttttctttgtttttttcttgatcacttgtataggaaacaatattttccagtgttatttgcatatatattttgtccttccaatatatgcattacagatgaaaattaaatgttatacctgaattcttgggttggggccaaaatattaaggctggaaaataatgctgggtgtgggatttgttttaaaacaaaggcttttatttatggaacatggcatgtggaatctgggatattgcctcttatttttaagaaaatggttctgtgaaaagtgaatgatatgtatttttccaaatgcttcatggttaggagtcttcaagttccatgttccccagatttgagatatactaaagaaagaaattcaaaagtagctatttggggcccacaaaaataactattattttagccttagagccttacacttgtttcatgaagagaaaggacttgcataaccaaaataaacaaagcaagacaaattaaaaatatgtgggggagagatcagtgaaaagtggttttcttaatgcagccctgctggtccccattaacaattgcttgaaattcacatggatgtaaaattataattgtcaggatcttattcagatgatcttttaaggtttaactggttttgcttttgtttatctatatgtcaaaatacttgtaaattgggaacaaacttctctcagcttcttgaagttgttcaactatccttgccactggaagaccaaacaaggttttcactgctttttcttttacataatatgctgagaattatttcttatgctttttactacaaacaaaattactcacctggattaaagattaaggccttaatctgtttagattatctttaatctccatgaaatcgtgaaataagacaagaatagtgtttcagctgtaggccattttacagctaattgcccataaattgtagcatttattgacctgaagtactaagctaattgtcttgactactcaaagcccctgaattgttgtcaactttcccctttgtgttgggtagccctaacgtcatttagcttgttgtctgatgcctccagtaggacacctccgatggagctttgatttctgagcagcgaaagctcccttcctaagatgcatctcgcataggctgcctatgatgaaggaccgtgcacctccactccaacagagtgctgagtttaaaagttgacctgtgtttgtaatttcactttcatcttgcttaataaatatctgctggattctttcattcacttttttacatttggatttatgtttttacccaaaggggtgttcccctaaaaaaaaaaagaaaaaaaa

SEQ ID NO: 65581 - DNA, 2386 bp, Homo sapiens
  misc_feature (1)...(2386): n = a,t,c or g
gtccgagaggagatggtttttgaagccgttttgcgttggtgtctatcgtgccgttgatctgagaagaccactgttacatgagctcctgacacatgtgagactccctctgttgcatcccaactactttgttcaaacagttgaagtggaccaattgatccagaattctcctgagtgttatcagttgttgcatgaagcaagacggtaccacatacttgggaatgaaatgatgtccccaaggactaggccacgcaggtccactggctattctgaggtgatagttgtcgttggaggatgtgagcgagttggaggatttaatcttccatacactgagtgctacgatcctgtaacaggagaatggaagtctttggctaagcttccagaatttaccaaatcagagtatgcagtctgtgctctaaggaatgacattcttgtttcaggtggaagaatcaacagccgtgatgtctggatttataactcacagttaaatatttggatcagagttgcctctctcaataaaggcagatggcgtcacaaaatggctgtcctccttggtaaagtatatgttgtcggtggctatgatgggcaaaacagacttagcagcgtagaatgttatgattccttttcaaatcgatggactgaagttgctccccttaaggaagccgtgagttctcctgcagtgactagctgtgtaggcaaactgtttgtgattggtggaggacctgatgataatacttgttctgataaggttcaatcttatgatccagaaaccaattcttggctacttcgtgcagctatcccaattgccaaaaggtgtataacagctgtatccctaaacaacctgatctatgttgccggtggactgaccaaggcaatatactgttacgatccagttgaagattactggatgcacgtacagaatacattcagccgtcaggaaaactgtggtatgtctgtgtgtaatggtaaaatatatatcctgggcggaagacgggaaaatggagaagccacagacactattctctgttatgatcctgcaacaagtatcatcacaggggtagctgcaatgcccaggccagtgtcctatcatggctgtgtgactattcatagatacaatgagaaatgctttaaactctgaagacaggatacctcaccgaagaagccacactgatccaagatgggaggttttaaaaactctacagggggaacttcacatatctcctttgtgccatatgcaaaaaatagtaaaaataataatttggtgcctttctcctcaaaatatcaatctttcaaactataataaagcctttcctataattgaaaaaaaaaacttttttgttaaaggtaatgggggttgttacttggcctttgaagagtgtacctttgtaagtatttgtaagaagtctatgtgaattaggaaatgtctgtctgcataccttttaggagcgtgtgaatggtgtcttcacttattatgtatgtttatctgtatgtatattccttattttgtcatatatgtagagaaaattgcatgacttgaggcatcatttaggttgaagaagttaatgcttagaatgcattctaggagaaaaaatcagttttaaaaacctttgttgttaacaaagtatatccagattggttaattttattgaagggtttttttctgtaattgataaaaatgtaatgacaacaattcaggcatcataaaatactgaactattgtgactttattcttagaattgctgtcttacattaaacatgtttttagggggaagttaggtaggagatagaaaaataagtgcccctacaagggggattaaaattacaagttaattcctaagagaaaaatggaatggcctttgaaggaaaaatgacccactatggctctcaaagtttttatgcatcatctcttcaatcctctaagaaagcctcttttcttaacttgataaagcagtggaaacccattttgcaatattgttttgtgaaaaacagggacagacagccaggtacagagactcacacctgtactcccaactactcagcaggctggggcaggaggattgcttgagcccaggagtctgaggctacagtgagctatgaacgcacacggcaccctagcctgggcaacaggttgcgaaactgtctcaagagaaaagaaaaagaaaaatagggataggttttccttcctagcccagtagagtttgacctcattagtatggtgctttgggtgaggacctcttccttgattatcccactttctagtgaacagctaaaattcctgagagtctctactgttaaggtacctttaataggataaagcagggaccacctatctcagtggggtccattttctttttaaaattagttatcttnaaaaaacttaggcagtagt

SEQ ID NO: 65582 - DNA, 3455 bp, Homo sapiens
agatatttaagctatggttccggtcccaaacgattccccttggtagatgttcttcagtatgcattggaatttgcctcaagtaaacctgtttgcacttctcctgttgacgatattgacgctagttccccacctagtggttccataccatcacagacattaccaagcacaacagaacaacagggagccctatcttcagaactgccaagcacatcaccttcatcagttgctgccatttcatcgagatcagtaatacacaaaccatttactcagtcccggatacctccagatttgcccatgcatccggcaccaaggcacataacggaggaagaactttctgtgctggaaagttgtttacatcgctggaggacagaaatagaaaatgacaccagagatttgcaggaaagcatatccagaatccatcgaacaattgaattaatgtactctgacaaatctatgatacaagttccttatcgattacatgccgttttagttcacgaaggccaagctaatgctgggcactactgggcatatatttttgatcatcgtgaaagcagatggatgaagtacaatgatattgctgtgacaaaatcatcatgggaagagctagtgagggactcttttggtggttatagaaatgccagtgcatactgtttaatgtacataaatgataaggcacagttcctaatacaagaggagtttaataaaaactgggcagccccttgttggtatagaaacattaccaccggatttgagagattttgttgaggaagacaaccaacgatttgaaaaagaactagaagaatgggatgcacaacttgcccagaaagctttgcaggaaaagcttttagcgtctcagaaattgagagagtcagagacttctgtgacaacagcacaagcagcaggagacccaaaatatctagagcagccatcaagaagtgatttctcaaagcacttgaaagaagaaactattcaaataattaccaaggcatcacatgagcatgaagataaaagtcctgaaacagttttgcagtcggcaattaagttggaatatgcaaggttggttaagttggcccaagaagacaccccaccagaaaccgattatcgtttacatcatgtagtggtctactttatccagaaccaggcaccaaagaaaattattgagaaaacattactagaacaatttggagatagaaatttgagttttgatgaaaggtgtcacaacataatgaaagttgctcaagccaaactggaaatgataaaacctgaagaagtaaacttggaggaatatgaggagtggcatcaggattataggaaattcagggaaacaactatgtatctcataattgggctagaaaattttcaaagagaaagttatatagattccttgctgttcctcatctgtgcttatcagaataacaaagaactcttgtctaaaggcttatacagaggacatgatgaagaattgatatcacattatagaagagaatgtttgctaaaattaaatgagcaagccgcagaactcttcgaatctggagaggatcgagaagtaaacaatggtttgattatcatgaatgagtttattgtcccatttttgccattattactggtggatgaaatggaagaaaaggatatactagctgtagaagatatgagaaatcgatggtgttcctaccttggtcaagaaatggaaccacacctccaagaaaagctgacagattttttgccaaaactgcttgattgttctatggagattaaaagtttccatgagccaccgaagttaccttcatattccacgcatgaactctgtgagcgatttgcccgaatcatgttgtccctcagtcgaactcctgctgatggaagataaactgcacactttccctgaacacactgtataaactctttttagttcttaacccttgccttcctgtcacagggtttgcttgttgctgctatagtttttaacttttttttattttaataactgcaaaagacaaaatgactatacagactttagtcagactgcagacaataaagctgaaaatcgcatggcgctcagacattttaaccggaactgatgtataatcacaaatctaattgattttattatggcaaaactatgcttttgccaccttcctgttgcagtattactttgcttttatcttttctttctcaacagctttccattcagtctggatccttccatgactacagccatttaagtgttcagcactgtgtacgatacataatatttggtagcttgtaaatgaaataaagaataaagttttatttatggctacctatgtgtttgtaagcaggtatattgtatattagtgtattagtaatactagataaatgaattttgtctggggattaagattggatagttaatagattaatacaatcttttaattctgctctaatgctagcaaattggaaaatgtttaagtctttgacacttaaatttatctatatttttaacaaagttcttgaacttagtatggcaccggaacctgttttgaattcagtcaggtttttactcaagtaagtggttgattttttttaagtcaaactacactgaaacttttatccttttcttagattaatcttactttttaaatgtatttacaatatacagcaaggtgattatttcaagagaatcccaaagtacttgaataagggctattgtaaaatttaaaagaaatatttatatatacacatatatacacatacacacatgtatatatatattcttcataatggaggacaatgttttgcaatatataaatcattctatttttgtaaattgtatatcactttaattgaaaatgttctctactaattaatactgtgaaacaaaattgatgttgtttaactagaagttatgagtatcttaactgcctttattccttttcaaaaaggaaaaagctgtagaacattttgtagatgaaactactgtttaagattaatgaattaatattgtgaatgaaaatcaaaatccatactttaaaggtaatcatgttactaacaacctatttttgaattcataaaaatttctttataaatgatgttttgtgaacatagtaaaatagaccattatactatgtgtatgtttgatacagcgtcgccaaaactagtgttctttattagtgcctctcacaaaagatcctggatggaggagtaagatgaaatattatgctattatatgatgctgtttgtaaaggtattaatgtactagtaaggtgttaatgacaaggaattagtactattcctgttgtaaagttagattttgcatattgtatctatcaaaatatgtttgggtttagattttaagttgtctactgagcagatttctgcattggttttccagtcctgttaaaagtttagaaacttcatatgtgtcatcacagcttttgtaaagaaagtatccttaatattttatgacattctaccacaaa

SEQ ID NO: 65583 - DNA, 1266 bp, Homo sapiens
gcacaggtctatgtccggatggactcttttgatgaggacctcgcacgacccagtggcttattggctcaggaacgcaagctttgccgagatctagtccatagcaacaaaaaggaacaggagtttcgttccattttccagcacatacaatcagctcagtctcagcgtagcccctcagaactgtttgcccaacatatgggtgcccattgttcaccatgttaaagagcatcactttgggtcctcaggaatgacattacatgaacgctttacttaaatacctaaaaagagggaactgagcaggaggcagccaaaaacaagaaaagcccagagatacacaggagaatagacatttcccccagtacattcagaaaacatggtttggctcatgatgaaatgaaaagtccccgggaacctggctacaaggatgggcataattctaaaaatgaactacaaagggttaatttttattaaatgtatcaacaacctttgtgaagtggttagaatatggtaaatgaccccaaagtctattgaggtgagcttgagaaaaaaaagagaggagttttggaacaagtgcccatgatgagagaagaaactttttgtgatatttttctgcttgtaagtattatcaaatcaactgtatacatgcactatttccaaccatgatttcagaaagacatgcatgtcagagaagagtgaaatattcatgtcttaacttaagtagactgtttttaaacagctggtccagttttttttcctaacattgtaccatatctatcatctgtcaattactgttactttaaagctaaagattactttgatggcccagctacatttgcaatgatgtgcacgtaaacactgttaagaggttaaagcttgtatacaatctgttactgtgaaataactaaattgggctttaaaaaaatcttagtatttattgatcttcattcacatatacagttgaaatttaaaataacagatggttattccaatgctgctgaaaccttttctaaaaaatacttgttttgttggttgaatgtgatgagaggcgcttctgggcagtctctcttctctcccacccgtctttcctcctccgagtaccccttctccagctttgtactagccatgtaaaacccaaggttttctttaaaacatcagaagagatctcgtcctccatgccccaaaaaagccaactcattggaggtgttacccctgggagcagtgttgcatttgtctttttgtctttttttgctctttggaggatgcagaggc

SEQ ID NO: 65584 - DNA, 1006 bp, Homo sapiens
gacatacactttctgcttttcgttaatgatcaattctcttgaccataattcagggtctaattcttgaagcttttggagaactaagggaccaactggaccaagtcaaagaagacatggagaccaaatgcttcatctgtgggataggcaatgattacttcgacacagtgccacatggctttgaaacccacactttacaggagcacaacttggctaattacttgttttttctgatgtatcttataaacaaagatgaaacagaacacacaggacaggaatcttatgtctggaagatgtatcaagaaaggtgttgggaatttttcccagcaggggattgcttccggaaacagtatgaagaccagctaaattaaactcagacccaatcacctctaaaaaccaaaaccctacccctctctctccctctctcaatttctctgctctcttggaaacattttgctgattttgtgaattgccagcgttgtgtgttttctgggagcatcgaagctctgtttcggaagagctgtttcctccccccaccttttgtatttactttgagactaaagactgaagaataatctaaattcatactcagacaaaaaaaggaattctggaaagaaaaccattctggacactgtcataacacacatagatagattttcttctgagactcccggagtcttctcgagctacgagaccttcacagagacacgtggcagccacactcacccagcctctttatttcaccatcctggaaggaaactgtctgtctaatggtcacagagcactgtagcacttaacagattgccatggacaccagttgcgaagggaaatagtgccttactatatgtgggttgagctatgcagaagatacgtgcatgaaaaaacatctttattttctttatgtcgacctttcttttcttagattgattttgtgaggttttttttttttcctttagccttttctttagggggggagggtaaaaaaagcagtttgcccttaaaaaaaaaa

SEQ ID NO: 65585 - DNA, 2781 bp, Homo sapiens; identical to SEQ ID NO: 65310

SEQ ID NO: 65586 - DNA, 2548 bp, Homo sapiens
cggaagccttctctggggctgcaaggacctgagctcagcttccgccccagccagggaagcggcaggggaaagcaccggctccaggccagcgtgggccgctctctcgctcggtgcccgccgccatgtgggccgtcctgaggttagccctgcggccgtgtgcccgcgcctctcccgccgggccgcgcgcctatcacggggactcggtggcctcgctgggcacccagccggacttgggctctgccctctaccaggagaactacaagcagatgaaagcactagtaaatcagctccatgaacgagtggagcatataaaactaggaggtggtgagaaagcccgagcacttcacatatcaagaggaaaactattgcccagagaaagaattgacaatctcatagacccagggtctccatttctggaattatcccagtttgcaggttaccagttatatgacaatgaggaggtgccaggaggtggcattattacaggcattggaagagtatcaggagtagaatgcatgattattgccaatgatgccaccgtcaaaggaggtgcctactacccagtgactgtgaaaaaacaattacgggcccaagaaattgccatgcaaaacaggctcccctgcatctacttagttgattcgggaggagcatacttacctcgacaagcagatgtgtttccagatcgagaccactttggccgtacattctataatcaggcaattatgtcttctaaaaatattgcacagatcgcagtggtcatgggctcctgcaccgcaggaggagcctatgtgcctgccatggctgatgaaaacatcattgtacgcaagcagggtaccattttcttggcaggaccccccttggttaaagcggcaactggggaagaagtatctgctgaggatcttggaggtgctgatcttcattgcagaaagtctggagtaagtgaccactgggctttggatgatcatcatgcccttcacttaactaggaaggttgtgaggaatctaaattatcagaagaaattggatgtcaccattgaaccttctgaagagcctttatttcctgctgatgaattgtatggaatagttggtgctaaccttaagaggagctttgatgtccgagaggtcattgctagaatcgtggatggaagcagattcactgagttcaaagccttttatggagacacattagttacaggatttgctcgaatatttgggtacccagtaggtatcgttggaaacaacggagttctcttttctgaatctgcaaaaaagggtactcactttgtccagttatgctgccaaagaaatattcctctgctgttccttcaaaacattactggatttatggttggtagagagtatgaagctgaaggaattgccaaggatggtgccaagatggtggccgctgtggcctgtgcccaagtgcctaagataaccctcatcattgggggctcctatggagccggaaactatgggatgtgtggcagagcatatagcccaagatttctctacatttggccaaatgctcgtatctcagtgatgggaggagagcaggcagccaatgtgttggccacgataacaaaggaccaaagagcccgggaaggaaagcagttctccagtgctgatgaagcggctttaaaagagcccatcattaagaagtttgaagaggaaggaaacccttactattccagcgcaagggtatgggatgatgggatcattgatccagcagacaccagactggtcttgggtctcagttttagtgcagccctcaacgcaccaatagagaagactgacttcggtatcttcaggatgtaactggaataaaggatgttttctgttggacatgtactgaaaattaacacatgtagtagccttaaaattttagacttctcgaacatgaggctgttacagtaatttttttaacactgtgcattgtacttttctaccttaaaaaaatcagtgaggatatttatttaatgaacatcaattccttttaaattttcttagagaaatttctctgtggctcagttttaccacccataaagcggagacagtaatttatggttatcctttctgacccacaaagtatgaaaagttctgtaatctgtaaactcagttctgtaatctgtattattgagatgattaatataaagttgtattttcactgaaatgattgttttgctggttatgcttggtgatattttagcgggcttatttttgaaaggcatctgttacttcagtggcataaagtgccctcacactgctgtgcagccatcaccaccattcatctccagaatttgttctcagtcccaaactgaaactataccattcaaacaacagcgctccccatttccccctcccccgagcccatgacatctccttattattattttttttttgagacagggtgtttctctgttgcccaggctggagtgcgggggggtgatctcggctcactgcaacctccgccttccaggttcaagcgattctcccacctcagcctcctgagtagctggaattacaggtgcccaccaccatgtctggccaag

SEQ ID NO: 65587 - DNA, 3914 bp, Homo sapiens
tttcgtgcagggagaccacttagaggctgctgctctagcgcaggctcagggcactaggggcttgggccagagtggtgatgccagaggcgagaagatgctgctgagttctggctatgttttgccctggacccatccaaggacccctgcctgaaggtaaaatgcagccctcacaaagtgtgtgtgacccaggactaccagaccgccctgtgtgtcagccgcaagcacctgctccccaggcaaaagaaggggaacgtggcccagaaacactgggttggaccttcgaatttggtcaagtgcaagccctgtcccgtggcacagtcagccatggtctgcggctcagatggccactcctacacatccaagtgcaaattggagttccatgcttgttctactggcaaaagcctcgccaccctctgtgatggggccctgtccctgtctcccagagcctggagccaccaaagcacaagggcagaaagggagtgccttgcacagacaaggagttgcggaaccttgcctcccggctgaaggattggtttggagctctccacgaggatgcgaacagagtcatcaagcccaccagctccaacacagcccaaggcaggtttgacactagcatcctgcccatctgcaaggactccctgggctggatgttcaacaagttggacatgaactatgacctcctgcttgacccttcagagatcaatgccatctacctggataagtacgagccctgtatcaagcctcttttcaactcgtgtgactccttcaaggatggcaagctttctaacaatgagtggtgctactgcttccagaagcctggaggtctcccttgccagaatgaaatgaacagaattcagaagctgagtaaggggaaaagcctgttgggggccttcatacctcggtgtaatgaggagggctattacaaagccacacagtgccacggcagcacggggcagtgctggtgtgtggacaaatatgggaatgagttggctggctccaggaaacagggtgctgtgagctgtgaagaggagcaggaaacctcaggggattttggcagtggtgggtccgtggtcctgctggatgacctagaatatgaacgggagctgggaccaaaggacaaagaggggaagctgagggtgcacacccgagccgtgacagaggatgatgaggatgaggatgatgacaaagaggatgaggtcgggtacatatggtagtgcccacaagaaagaggacacaagttttgcacaaaattgcaagtcacttcctattcctgcatttgtatctaagactccaaggcaccaaggtcttttttccattgttgctctctatacccgacctaaggtttggaagacaactgcttgttcccagaggattctgattttgcatatgtttgtatgggaaaaagggtgttgtgtttttttttttgttgttgtttattttttggatagggaagtcattggcttaattagagcctccttcctttctgtgagatttttccaacaagcatgtgatttacgtggaattctgacagtgcagggagcccccaccctcttaaatgtcaaagaccctttttgattacccacactggtggttattacagcatggttcccagccttacagtgtctaagtgcttctcttgtgtcctgtagatgttgtgaaaaagaaaaaaacaaaaaatacaccacactgtactttttccccctgcccccgttactgccggtgattattattaaaaattagtttttttcacatcattatatctggcttcctataaacaacagccttaattcagtcaagactccctttggggaattcattttattaaaaattggtgtctggatacttccctgtacatgcataaatatgcatgcatgtacagaaagactgtatgtgtgtgccttgcacacacacccatacctctcagaaaaagtgggtatcttaaaaactcgaaaaacaatgataaatttctcagcttgtccagacctggaacaaaatttctggaataagaaatttgtattaaagtccttttttgcactaacagttggctcttgtagcctgcaggctgaggaagtctcttctctgtgcatcagcagagttactgaaagcctctgattgagaaaaaacctccgtctgcctaaatcacttttctcgcagaagccatgcgactcccacacgacacgggcagcttcacaagccatctctttcatttctgcttgaagcccccttggctgcagcaatcctgtctggccataggtttcttccttccttacctacttcaaggggctttttctaagggcatggcacacatatcttcctgtttctctggaggagtaccatggggttccttaaaagaagaaaatttctaattctgaactcaatgttttgcttttactccctttctactgacaaatcatgataagggcacaaaagctgtacagatttttttttttaaccactcaatcccaaatggaggcctacaaagaacatcgtaataacacatggaagcaaaccctgggtttttaagagccaaattctgtcccccccctccactccccccaagtgacaagatactaatgaagaaagttcttcaccatagtgtttgttttaactaaactcattggagtctagttccaaatttgggtagggtcatcatctctacattccttaggatttctctccctatcaagctggcccagatacaagtaccaaacagtagtctctgaagttcccccatttccttcagtaccagtctataagctactgtccgccactgattttcatctatcagggtgtcctaatcagaatcagccacccaagcaagcctctctggcccacatatctatctcttgccttcccccatgaacttcagcctgtccacacaaaagccacataaactcaagcaagaaatatgttcagccaaaacatgattatagtggcagctgaccaatcccccatcccaaattgaccatttagatgtaccaactcaccttaaattagcatgttccaatccagtcggcattgcctgaatacagtagcatcatacctatagttggtcttagataagaaatgaactacttgatatagcaaagtcctttggcttcgtaaataaccctgaggttttgtacttactttccccataggaagacagaccataggcaaactctgttttgggatctcaactccatcacctttgtttcaatattttttttctctcttgaacaaaactgagataatttagaaaacaggtgcttaattgcaataaaattactatgaagtatattaaaaatcacgacattgtaaaatctcactttagatcatcaaagaaaaccattgttactatctcctttgagcttaggaaaatgtacaagagaacaaattaaaattgaaaaattgatttcacttagaaaaacttctaggaacagggtgaaccactgattttaatttgcctaattatcttatgacaagtatcaaattaagatgacacttaaagatccttagcattaacttaatgatggagaagagtgctcaacagacagttcccagtaaggtaatgagatgccattttcagagacattctaagaagatattttgattcattaaaacattaaataaaaagccctcctcagattggaacccccaaatcgatggagccacattaataatacttttcatgcctcactttgacatgacagcattcgatttttttaaagatctttaatactttccatgagtactaaagattgtaatgagttaccttatccttagaagtagaatgtttgctttcttcttcttggaaatggtcctccaaaaagtccacttgtaccagtgacaagaagtcacttgtatagtgaccaagtacacataaaatactgattataaaaatattgtaataaaccacttcctcatttgatacg

SEQ ID NO: 65588 - DNA, 5352 bp, Homo sapiens
  misc_feature (1)...(5352): n = a,t,c or g
ttttttttttttaagatttgattttcttttatttgtcggcactaaaagacagatagctgtgatgaagagcaattggctggtagctcgtgcctcaccaagagtttagcaacgttaatcagtgaatgcagaacagcttccattctacctgaggcctagatctgagatcgctgtgaaacattaaagtgaccctcaccatacttgttttcccactcagatacacattttatttcatcaacacatccttgatttcctattactttttttccaatataacaaaatgttttagacgatatatatgaaaaaactaactgctgtaggttaggacctcattataaaatattggtgactgggcaccatcgttgacgaacgaccacgatatcctnaccaaagggagccaatgagctgttgggacaaacgcgtcaagggctgaaccaaaattgtgacgctctcagcgcaactttgatctggaactcttgacaggtgggcatccaacatccctgctccttgaccctctgcaggattccaggaagggctcccagtgaaggtcatcagggctccgtacacagggcaccgtggggggnagggcctatggtcacttcatagcctggggaatggctgtccatgtggggcactgcccatccactccagtggtggtgtgacctcagccacccgccacccttgcaggactcgggcatgccctggccacatgatcacgtaggactgttttctgggtggtaatagttgatttttaaaagcttagttggtcagatcatggactgtgaccctctgtgaagtgttagccccaaatatttgaggaagaagaatccagcagttttactacctaacaaagccacctttgaaaagcctcccaattttttttcttactaccaaaacacacagcatcatggagcatatcacattcagattgttccatctgattcatatgttttttctaaaattcaaaagatcttaaatcagtaagtagtttcatccatctgtatgtggtaaaagtctcaaaggtcccnaaaatcagtcctaaggcatgattcctttttactttgcccccataaatataattaagtgtgaagtgctgggctcccagcatttaatagtccccattaacctgcccaacaagaatcgtttaattagcaacttaagatattccagaggccaaaacacatttccttggggcacacgaggctgcggcagcgacacagcatcttctcctttcctttcaagccgttatacaggaacacaccgaaaatcaactgtgcgcattttggcctgtagacaagaaagtaacaccaaaacttgatgttcctggctatgcagactccttgagtgacgcctgtgggcatattacaggtgggtttctgcaattctctggcctctgttcattcacacgagcaagggcacctttctcagtctcgcagcccctgtgccggagcggatggcgtccatcaaggcttgccttgcgtctgcggtgttgctgagggtgcccgtgctgaacctggaggccgtccttggtgcagagagagcctgggagggtggagggggtggtgggggaatggctggtggggacagaagaccaaggtcttctagcagaggactttccgagccctgtgcagagagtgcggcatctcggaagctctggagctcctcagaagcagaggatgccaccttcctcaggctgcaggtgccgctgtgcccgcggatagctgccagcagtgcagatcgttcgccctctgcctccgtgtaggacagtttcgctggcctgccctccccggtgtgttctgccgtcttgcgtagtctgtccttccctcccgcagagtggatggcttccatcagggcagagtgcagggatgtgtcttttgggactggtctctggacaacaggtttgaattttttcttcggcccaaaaatgctgggtggccaaatactgtctgtttcatttccatctgtagagaacacactgggcttttcctctctttctaggagaatgtggctttctgtgccagaccctcctggagggtgggaaggctcgccgtggcctggggcgcgcacagagccattgaccagctccctgctgcaggcctgagtgtcagatgtgtgtggagggggtgggtctgtaccatcaggtgcgcgtctgggctcagatgctgagctggcctcctggctacttgtgctttgctttccactgaaaccacagctctgtcccacagaaacacgatccctctgggaagactgaaccagtgagaaacaggagcttctgtggatagcagcaggtctgtcctgagtagacaacttcctgtgtgggccaatgacctcccccctaggaggggctccccctgccaaatcttccccgtggttgttgggaggagtgacacagggccactgggcaccatccttccatccttgtgtctctgagtgtgggctggatgtcctgtcatctttcacagtgacaggtggtgcagccagcactggcgccttgcctgcataacccttctcggcataaccgtgtggcctcaccacatcagcatggacttttggggctcctatgcgcttggcaatggcagaggccacatactggctggacgttcttctctgaggcttgagaaatgtgacttctgtggtgtgagctgctggcaccctcacgtgacccatgcccatggtggggggctggtttctcccctcccctagggggttccggccctcatggtgggcagacttctgctggggcgatattggcttggggtctgcttggagtctgctctctggattctgcgtctgcgtgggcacaggggtggaggggggtcccctggcagagctctctgagggtcggcccaggtgtttttccacagagttgcacctccagaactctctgactttcccaatgggctgagattctgcttcaggcacagacgaagacagggaaatgatcctgatgccggtggcgtgaggactcaccaagttccccagctcgtcaatcttaatggctccggtggagagggacacatctctgtcgtaacatcgcatctctgactttggaggaatgattttatacgttgtgaggccgtgcttaagtctgtagcttttccctgggttttggcctcgttggtgccatgatgttggtgccaaggcagcgtttttatcgttgctgtccttttcattcaccggttgggaattcactctctctgtggcttgagtcctctccccgtcagcacagccatacactttgtctttcacttttgcatttaggttgtctgtgtgaagattcaacgcaaaattatgtttctcctgggcgccgtttccattagattcccatctttagagatgttagataaggccacacggattccttttccgatgtcatgggaagcggggtgcagggcaggtacttcctcccttgccttttcatggggctggctgtgctcagcttgaagtggcgccagggaggctctcctgctggcaacaccctccgagtcgaaagacccagcattgttgtttctattggaaaacaaccccgaatccacaggatcatctgaaacttcccctatgaatgttactgggattgcatctgtgtcgccgtgagggatcatggcatcctgtgggcagtggttggatgcaccatggatggagctggtgagggagctggtgtctgtttcatagctgtcttccatttcttccaggtcttcatcaagttctgcaagggttttacggaactctccagcaattaataggtcttcttcatcatttgaggctgtgacagctttttcagttctcagatgtgagttctcagagccattcttctcccacaaggggctcttctggggacccaggtctggggttccagcgaggtcctggtcactgcagtcttcctggtctgtggcccacttgtctttgtatttcatgctgtcctgctgcgagtccagagagacgatgtctgagggggaactcatcactcctgagtcctcggtcgtgtcctccgacgcaaaacagctgccaactgacacggtctcctccgcctctgacagcacctgcggggctccatccgggctgcagtggctgccagaccccaggggcaggcttaccatcgtgctcttcctgttctcctccttatcctcagtgcggttggggatcaggggactcggtggtggtggctgtggtggagggggagctggcgctcgccgcttcttcttctgtaaatcaatctgtgacccaagagataccttttccgatgccttgtcttgcacaggtggccctgaacctggaggaggaggggctcggcgcttcttcatctccgacttcacggacacccctgagatgctgcccagcgagagggatggacccagcgtaagagaacgtgagtgcatggatggggagttgggggtcgttaaacagcccttactattgcttcttttattaactttgaaaaatcccagaaattttttcttctctttatctgtctcatcattgccaagtgatgatttcctaaaggtttctcttctgttgtcccacgcgtagagctcctttatcccgagctcgttcagggacttggacagctccagctcctctccggcaatgttgtccctgaggagaaccacgtgctctgggctgacctcacactttgcacaaatgactgggagaatattctggagaggaacctcagggctcacatgcacaacagctttttgtgtccgcaggtaattcacgaccaaacgcacagatttctcaggcaccttagggggaccaggcttaaccttctcttcaggaactttttctttcagaaacacagtatgcacattcagggtcccaatcaaagtatttggcttaaaactcaaaggttgttgggtttctgaagaccgaatttcaagggcatggtgggatggattcaggtggttctgaaggcaaagttcaaccagtaggtccatcatcgcatggctcccattgagcacgctcctcttctccagcccactaggcaggaccacggtgacgtccatggtgctggccctcagcgcctccttcatgcgaaccaagttctgctgcgacccgagggccccatcgtgggggggcttctggtcactgtgcacatgcagagtggcagcctttccaggaggtgggggagcacgagccttcatcttcctcccggtcgggggcttggccgccgaggcgcgcggcgcgtccatggtgccgggggccgggacgcgggcggtgctccgggcccgccgagtcaggcgctggctaccgccgccaccgctgccgccctcattcactttttccgcgctgacccatcgtcctcccacgcgggccggcggaggacagcggcggagcgcggcggacggaaggggctgg

SEQ ID NO: 65589 - DNA, 803 bp, Homo sapiens
acgtacgtatgagcaaccggcctttatttcccgggacgacgatttcttctgagaaagaacgacaggttcagagacgccgctaggattaagtttaagacttcgcgagaacagaatttcttttggcacctcctctccgcgcgttcttggggtgaggctgggtaattgttcctgcagggtggtgggtgatagtggccagttgactgcgactgtgtttgggtggtgggaagcctgaagaaaaggttgtttcttaccggtcgctgcctcagggaggtagtgcggtagaattttccgctatgggtcattctcggtgtccgcggggaagggcgtgacaacgacgggcgtgacggcgaagcaacagtgtctcgagagcgctgccgcccggagggcgccaggagaagtgcgtccgagacgccgcgcggtgatgctcctgaaaacgtctgcccggcgtagcgggaacccagcatgattttcaggagtctctgttgcccaggctggaatgcaatggtgcggtctcggtcactgcaacctctgcctcccgggttcaagcgattatcctgcttcagcctcccgagtagctggaattgcgggcatgtgctaccacacctggctaatttttgtatttttagtaaagacggggtttggccatgttggccgggctggtctcgaactcctgacctgaggtgatctgtccgcctcagcctcccaaagtgctaggattataggcttgagccaccgcgcccggcctatttctgagtgtttattgtaaaaactatagtttttaaagtttgccagatgcaataaaa

SEQ ID NO: 65590 - DNA, 917 bp, Homo sapiens
  misc_feature (1)...(917): n = a,t,c or g
tttcgtcctaaatttgtgcaagaaatggcaggcttattctatctgaaggcttcaaaaaaagatacacaacatgtaaccaggttcaaatattctgggagatccccccaaaaaggaaataaccaaaataaccaaaaaaatgaagaaagtgcctaaaacatgatacagcattttagagccctttcagatacaaggcagagaaaggtgtaaagtagaaaatatccggatcttcagtaatttccaaaatggtccaattcctcagttggctgcagggcagctggcagatccttgctgctgctcctgggacagagccactaagtctgctcctcgggacacaagccctcaggccctgagctgagtgcacctctcccttccccttctcttttccttcgctccatttcccactccacaaaggtgtcaaagagacttggccaggcctcatcttcactgtagttgctgaggtcagggccaatcacctgagtgaagttaaggaacatgttccaagtgtcccgggagatgcccttgatccccgaggggttctctgttaggaagtttagccattggtccaataccggaggattgttctgggtaaagactagtttccacagggcaatggctatttcccgatgcagtgaccgctgcccttcttcagagtccagggccaaactgaaatgtaaaccggtagagatccttgaatttatcctcttgtttggcttctgttaagagggctaggggaaccttgcacagatttccgttcaatgctgttttgcacttattgntttgcaggccattcaaaaaattcctttcctgcaacaggaaagggaaaagggacatttattcattattaaattatatttttacagggcattntactngtggtttaggngcagggttttcaggccgntggtttgatttggatt

SEQ ID NO: 65591 - DNA, 2094 bp, Homo sapiens
agacgcaagatggcggctgtggtgctggcggcgacgcggctagctgcggggctcgggttcttggggctgttcgcggctgaggtttggacctcctgcgtatagacggtttagtagtggtggtgcctatcccaacatccccctctcttctcccttacctggagtacccaagcctgtttttgctacagttgatggacaggaaaagtttgaaaccaaagtaaccacattggataatgggcttcgcgtggcatctcagaataagtttggacagttttgtacagtaggaattcttatcaattcaggatcgagatatgaagcgaaataccttagtggaattgctcactttttggaaaaattggcattttcgtctactgctcgatttgacagcaaagatgaaattctgcttacgttggaaaagcatgggggtatctgtgactgccagacatcaagagacaccaccatgtatgctgtgtctgctgatagcaaaggcttggacacggtggttgccttactggctgatgtggttctgcagccccggctaacagatgaagaagtcgagatgacgcggatggcggtccagtttgagctggaggacctgaacctgcggcctgacccagagccacttctcaccgagatgattcatgaagcggcttacagggagaacacagttggcctccaccgtttctgccccacagaaaacgtagcaaagatcaatcgagaggtgctgcattcctacctgaggaactactacactcccgaccgcatggtgctggccggcgtgggcgtggagcacgagcatctggtggactgtgcccggaagtacctcctgggggtccagccggcctgggggagcgcagaggccgtggatattgacagatctgtggcccagtacactggggggattgccaagctagaaagagacatgtccaatgtcagcctgggcccgacccccatccccgagctcacgcacatcatggttggactggagagctgctccttcctggaggaggacttcatcccctttgcagtgttgaacatgatgatgggcggaggtggctccttctcggctggtgggcccggcaagggcatgttctccaggctctacctcaacgtgctcaacaggcaccactggatgtataacgcgacctcctaccaccacagctacgaggacactggcctcctttgcatccatgccagcgccgacccaagacaggttcgagaaatggtagaaatcatcacaaaggagtttattttaatgggcggaaccgtggacacggtggagctggaacgagccaagacgcagctgacatcaatgctcatgatgaacctggaatccaggcctgtgatcttcgaggatgtggggaggcaggtgctggccactcgctccagaaagctgccgcacgagctgtgcacgctcatccgcaacgtgaagccggaagatgtgaagagagtcgcttctaagatgctccgagggaagccggcagtggccgccctgggtgacctgactgacctgcccacgtatgagcacatccagaccgccctgtcgagtaaggacgggcgcctgcccaggacgtaccggctcttccggtagaaccgctccccggcctgacagacccagggagctgcagctggagcccgttcccgtgcgtgttagtttggacacgaatttagtctaaaaagctgtctggttgtataaacggtgcaaacaatgtcgccacagcacccacgcggtttgcattcttttggaactcaatgtgccgatcagtggagtcagtatcgagcctgaccaccgcaagccaggaagcaggtgaagtgcccagcgctggagtgcagcgtgccacgaggagggcggtcggtgcttccctcctcgggctgtgggcacatggggccccgcaggttccttggaggagccctgagctgggaggcagcaaaggctgacctatcaaagcctcccggaggccaccgtgctgggtaccaggactcacctctgacaagcaggagaaggtaagggcccggtcagctccaaggagcgcgctccacgcgcgtgcacacagcttccctggtaataaagagctggcatctttcttaaaaaaaaaa

SEQ ID NO: 65592 - DNA, 1245 bp, Homo sapiens
ttttttttttttggctatagagcatttattgcaaacaaaattgaggtaaaagaagctgacccagaacccacgcccgtccaggctggggaagtctctactcgccccacaccaggccccgagcaccgcgggcccgaagcagcccccagaggacagacgggccctgcgcactgaggtagctgcatcttaagcccccatgagtacaactgcccagggctgcccaattcccagaggggaggaggagagagaggcaggcagggggagccccggcttcaggtgggggcacaccccacaccctcaacaaacctcccagcctctcgggctgggcacttcctgcctggccacccagccagccatggggcagcggggtggccaccagaggcgggcgtgctggggtgcgaggtcactgctgctccaggcagtcctcggtcaccccctgggcagccagctcagccagcacgttctgcaggtagttggggtcgggatagccgtggcccgtaatgttgcggtccatctctgtcttgtggtggatctcgttccataccacggtgtccgtctcacccgtggtgctggacgtgcccactgtgaagatgagccgcctcttccaggccaccttcaggagctctaggacccttgcgggccctgggcgttgtctggaaggtagcactgggcggggaaaccctctggcagtgaaacggctttccgggattggggtgctcagggccctggataccatggggaatgctgtaaactatgaggatggtcccgcagtcctcgtggccggggagcgacatctggaaccgtaatacctccatctttccctggggctgggtccccgtcttctctccatagatggttttgcaggagggacactgcagacttccatccttattgccgttgcagtacatggccaggaggcacagcaggtggaaggcatggctgcacttggtgaggtggcccacagctagggacccgattgccttgctgtcagtcacatcgctgtatccagacgctgtggacagcttctccatgcagatgatgcagtcctcatctgggggcactttcagctcttccgtgtagttttttatgacctgctctggctctggctctggcttcggggtcgctccgaggctgaggaggacaagaggacggggctgagggcaccaccgcgctcgggctgcagctccggctcggcctgggcagggctctggctgtggctccgactctcaggacaagcggacgcgtggg

SEQ ID NO: 65593 - DNA, 2054 bp, Homo sapiens
ttttttttttttgagtggcaacttcacgacttttatttgtggtgcctgtgctttatctcgaaaataccttctccccctgccccagacagtgggcggggagggggcagcaaaaaatagaagacgtccctccctattgcacatggaccctatatacaggcccacctggctgaggctggcgggactcttggcacattcttggatccctgctcaggaggggaggggtgacggggtggcatcacacgtgagatggggacctccaggcggccactctggtcctggctactgatccttgcacttcttggtcctcagttccttcctggtcccgtctctggccctggtcccctctggcaacgtccccctgcttggctcggcctcccacctccatcctggcctcgggtggccccctcggctcctggggactctgctcccctcccagtccggaggtcccaggggggctatggcttctctgagacttcccccggagccctgtcactcgtgttcacacgggggaaggggtgcgtgtggcagaagcagctgtataaatacgggtgcgggaaagtccctccgggtcacttggagagtttgctgatgacgcggatcaacgctgcattctcatccttgaggcgctggttgtcagcgcggaggtcagacagggccttcagctcctcctccagctctgcggccttgcgttccagggccctgcgctcgaatctctccagttccaggagggctggcctctcagcgaagcgttcttgcctctgcgtggcccgctccagctccaccttgagctgcgccagccgcagcgtggtctcggtcagggcctcgcgaagccgctcgttctccctgcgcagctctgcatacagcgtcctaaagcctccgtctggctcttccgattctggctcaggttctgggttgaggtcccgctgccaccgctgcctgcgggccgaggggccgccctccagggtgctggactcctggctgcggtcagccggctccgcctcctccccctccgcaggccccctccactcctttccgaccttgcggtgctccctggccgcctgcggtcccggaccctgcccgtcgggcgcctctgctctctgggcagggctgtcagagttctccactccagggacgcggggccttcgggaagggtccaggctctgcgccggcttctctgactctggggccttccctgcagccttctctgcctccttcaggtctgtaagagtcacaccctgtgtggacctccgagactggcgcatgagacgggagcgagcttttctctgggattccgactcctcatcccgcacaggcatctggtaggacctccgtcggtcccgggagtccgctgggggcgccgtggaggctgtggggacgtttggcttcgctggggattcaggctccggaatcctggagggaggcgaggagttctccaagcaaggaggaggcttggtgacctcagacaggacagagggctccggcagcttcggggagggggtcggggtaattctggcaagacggagctccttggcctgagtggaggtcccttccagccaggaggaggaagccgagcgctgcagcccagccccaggggctccctccgctgtccgcctttcagggggacccagggcaccagaactccctgtcttcaggaggccaaagcgcctggagaagggggcctcttcaagcacgggactcttagggctggggtgcggcggggaggagacgccattgagggttctgggttctgcagggggtggttcggtgggaccttcttccccctcatcctcgtcctggatggggggccccccagccccaccaggccggcgctccttggacaagtcctggagggaaatcttctcgcgactgctcagacgacacacagagctccttctgtgtctgctgctagagggcgcttggggctcctggccccggctctggcaagtttctttttggttccgaaggtcctcgtgtttccgggccagttcctccaacaggctcagtacttccggacgcgtgtgtcgacgcgtgaattccggcccgatactcagaag

SEQ ID NO: 65594 - DNA, 1202 bp, Homo sapiens
  misc_feature (1)...(1202): n = a,t,c or g
ccggtagaagcccgcaattcttgtgtagacccacgcgtccgcggacgcgtgggtggaagagcaggcccaggagctgcccccagggactgtgctcacccggaactgcacccgctgtgtctgccacggtggagccttcagctgctccctcgttgactgtcaggagtgccccctggggaaacgtggcagcaggtggccccgggggagctggggctctgcgagcagacgtgcctggagatgaacgccacaaagacccagagtaactgcagttcagctcgagcctcgggctgcgtgtgccagcccgggcacttccgcagccaggcaggcccctgcgtccccgaagaccactgcgagtgctggcaccttgggcgtccccacctgcctggatctgaatggcaggaggcctgtgagagctgcctctgcctcagtgggaggcctgtctgcacccagcactgctccccactcacctgtgctcagggcgaggagatggtgctggagccagggagctgctgtccctcttgccgcagggaggctccggaggagcagtcgccctcctgccagctcctcacggagcttcgaaacttcaccaaagggacctgttacctggaccaggtagaagtgagctactgcagtgggtactgcccatccagcacccatgtcatgccagaggagccatacctgcagagccagtgtgactgctgcagctaccgtctagacccggagagccctgtgcggatcctgaacctgcgctgtctgggtggccacacagagcccgtggtgctgccggtcatccacagctgccagtgcagctcctgccagggtgggtctgggcagggaggggacggggcaggagcctgggcaaggacccagtgttgtgaaccagacccaggaacacacgtgtagctcctcactccatccttcttccttgagtccttccagtccacgtttttccttcttctcggtgttcttgttaatttcatctcctatcatgcatacttgtgggtgtctggggtagttgcacctagttcaaaccccagctcatctgtttcctttgtttccttgctcagcctccctgacatcatcnnnnnnnnnnnnnnnnnnnnnnnnnnnnnccaattgggacccccagttgggaggccagggggaaaatttgggttaattggaccccggaaccttcggggtttaggggaaccctccccccccct

SEQ ID NO: 65595 - DNA, 1738 bp, Homo sapiens
atggtaacgtggctttacagatttttacccacttcaaatatggccgccaagctccgttctcttttaccgcctgatctacggctacaattctggcttcatgcccgcctccaaaagtgcttcctctcgaggggttgtggttcttactgcgcaggcgcaaaagcaagtcctcttccgggcaaaatggcgatgggactaatgtgcggacgccgggagcttctgcgcttgctacagtccgggcgtcgggtccacagcgtcgcagggccctcgcaatggcttgggaaaccgctgaccacacggctcctattcccagcagccccgtgctgctgtcgcccacactacctcttccttgcggcttccggcccccgcagcctcagtacctctgctatctcttttgcagaagtccaggttcaggcccctcctgttgttgctgcaactccctcacccacagcagtacctgaggtggcttctggagagactgcagatgtagtccaaactgctgcagagcagagcttcgctgaactggggctggggtcatacaccccagtgggactgatccagaatttactggaatttatgcatgttgatctgggcctaccttggtggggggccattgctgcatgtacagtctttgcccgctgcctgatttttcctctcatcgtgacgggccagcgagaggcagccaggatccacaatcacttgccagagatccagaagttttccagtcgaatcagagaggccaagttagcaggagaccatattgagtattacaaggcttcctcggagatggcactttaccagaaaaaacatggtattaaactctataaacctctcattctccctgtgactcaggccccaatcttcatctccttcttcattgctttgagagagatggccaaccttcctgtgcccagcctgcagacaggtggcctctggtggttccaggatctcacggtatccgatcccatctacatattaccactggcagtcactgctacaatgtgggctgttcttgagctaggtgctgagacaggtgtgcaaagttctgaccttcagtggatgagaaatgtcatcagaatgatgcccctgataaccttgcccataaccatgcatttccccacggcagtgtttatgtactggctctcctccaatttgttttccctggtccaagtatcctgtctccggattccagcagtacgcactgtacttaaaatcccccagcgtgttgtacatgacctggacaaattaccttcccacggggaagggctttcctagagagcttcaaaaaaggctggaaaaatgctgaaatgacgcgtcagctgcgagagcgtgaacaacgcatgcggaatcagttggagctagcagccaggggtcctttacgacagacctttacccacaaccctctcctacaacctggaaaggataaccctcccaatatccctagcagccagcagcagcagcagcaaaccaaagtcaaagtatccctggcacgacacacttggctgacttatgttctgtgcgcattctggcaggaattctgtctcttcagagactcatcctcaaaacaagacttgacactgtgtccttgccccagtcctaggaactgtggcacacagagatgttcattttaaaaacggatttcatgaaacactcttgtacttatgtttataagagagcactgggtagccaagtgatcttcccattcacagagttagtaaacctctgtactacaaaaaaaaaa

SEQ ID NO: 65596 - DNA, 3561 bp, Homo sapiens
atggatgctgcgggaaggggctgccatttgctgcccctgccagcggcgcgcggacctgcccgcgctcctgcagccgccgccgccgccgccgccagcccgcccggcccctgcagcggcgccgcctgcgctccctccgcggccgccggagcgggcgccatgaaccccagctcctcggcgggagaggagaaaggggcgacgggcggcagcagcagcagcggaagcggcgccgggagctgctgcctgggcgccgagggcggcgcggacccgcggggcgcagggtcagccgcggcggcgggggccgctgccctggacgagcccgcggccgccggccagaaggagaaggacgaagcgctggaggagaagctgaggaacttaactttccggaagcaggtctcgtacaggaaagcaatctcccgggcaggcctccagcatctggctcctgcacatcccctcagccttcctgtggcaaatggtccagccaaggagcccagagcgactttggactggagtgagaatgccgtgaatggagaacacctgtggctggagaccaacgtctcggggagacctctgctaccttggagaggagaactgccaagtcagatttgcaaaatcagctctcaggaggaagtgtgcagtctgtaaaattgtagttccacaaccgcctgcattgaggagctagaaaagattaatttcagatgtaaaccaacatttcgagaagggaggctcaagggtcaacaagagaaaattttgtacgtcatcactgggtgcacaggcgtcggcaggaggggaaatgtaagcagtgtggtaagggcttccagcaaaagttctccttccacagtaaagagattgtggctatcagctgttcctggtgcaagcaggcgtttcacaataaggtgacctgcttcatgctgcatcacattgaagaaccctgctccctgggggctcatgctgctgttattgtcccgcccacttggatcattaaggtgaagaaacctcagaactccctgaaggcttcaaatcggaagaagaagagaacaagctttaaaagaaaagccagtaaaagagggatggaacaggaaaacaaaggtcgtccttttgtgataaaacccatctcttctcctctcatgaaacccttgcttgtatttgtgaatcccaagagtggaggcaaccagggaaccaaagtcctgcagatgttcatgtggtacctgaatccacggcaagtctttgatctttctcaggaagggccaaaagatgcgcttgaattgtataggaaagtaccaaatctgcgaattctggcctgtggtggggatggaacggtgggctggatcctttccatcctggatgaactgcagctgagccctcagcctcctgtgggggtccttcctctggggactgggaatgacctggctcgaactctcaactggggagggggctacactgatgaacctgtttctaagatcctgtgtcaagtggaagatgggacagttgtacagctagatcgctggaacctccatgtggaaagaaaccccgacttgcctccagaagaacttgaagatggcgtatgtaagctccctctgaatgttttcaataactacttcagccttggatttgatgcccatgtcacactggagttccatgaatccagagaagcaaatccagagaaattcaacagtcgttttcgaaataaaatgttctatgcaggggcagctttttctgacttcctacagagaagttctagagatctatccaaacatgttaaagttgtttgtgatggaacagatctcaccccaaagattcaggaactgaagttccagtgtatagtatttttaaatatacccagatattgtgctggcacaatgccctggggaaacccaggtgatcaccatgatttcgaacctcagcgtcatgatgatggttatattgaagtcattggatttaccatggcctctttggcagccctgcaagttgggggccatggagagaggctacaccagtgtcgagaagtcatgcttctaacttacaaatccatccccatgcaagtggatggggagccctgtaggttggccccagctatgattcggatctccctgaggaatcaggccaacatggtacagaagagcaagaggagaacatccatgcctttactcaatgatccccagtctgtcccagatcgtctgaggatccgggtgaacaaaatcagtttacaagactatgaaggattccactatgacaaggagaaactccgagaagcttctatttcagactggttaagaaccattgctggggaactagtgcagtcatttggagcgatacctctgggtattctagttgtgcgtggagactgtgatttggagacttgccgtatgtacatagaccgcctacaggaggacctacagtcagtttcttctggctcccagagagttcattaccaggaccatgaaacctccttccccagggctctctcagcacagaggctctctcctcggtggtgcttcctagatgacagatctcaggaacatttgcactttgtgatggagatttcccaagatgagatttttattctggacccagatatggtggtgtcacagccggcggggacacctccgggcatgcctgacctggtggtggaacaagcctcggggatctcagactggtggaatcctgccctgcggaaacgcatgctgagtgacagtgggctggggatgatagctccctattatgaggactcagatctgaaagatctcagccactcccgcgtgctacagtcaccagtctcttcagaggatcatgcaattttgcaggcagtaatagctggtgatcttatgaagctaatagaaagctataaaaatggaggcagtctgctaattcagggaccagaccactgttcactccttcactacgcagctgaaaccggcaacggggagattgtgaaatatatccttgaccacggaccttccgagttattggatatggcagacagtgaaacgggtgagactgcactgcacaaggctgcctgccagcggaaccgggctgtgtgccagcttctggtggatgcaggagcatctctgaggaaagacggactccaagggtaagacacctcaagaaagagcacagcaggcctggggacccagacttggctgcgttaccatagaaagccgtcagaactataaggtcattggccatgaggacctggaaactgctgtttgaccctggtattcgggcaaaagaggacatgagcaagcgtatcacatctgccctccctgcaattgggcagctcccctggaagaagctgatggaattcatatatctgtctctctcctgcaagattctacctgagaccatgccactagcttttaagggctaccaagatgtacaacagaacatgatagcccattgagaaggaggcaggatacctggagatttgtggaatacagtacgagttccacaaaatttgatccttattgcttccagcaagtagcatgaacttctgtgttcacctgtataatttattttaaagattcaaaggatgttcgtataaatggcactgctccatcctccaaa

SEQ ID NO: 65597 - DNA, 2580 bp, Homo sapiens
gaataccattaaacttcaaagaatcttcgcttgtgcttaaaaataatgctgtcaaattgcttcatacactttataagactttaggcaagaaacattactaatggtatcataaataagtattataactttattaaaatgaaaagacaatattcaaaataatgcaacaaaatgaataaaatcctttgtccaatactgtacacataatgcagaaatcagtgcatttttcttaagcatgttttaaccttcatttagttcatactaaaatataataagctttaaatagctcaaataatattcagcagtttaaactgtaaacagcttgtttaactgttaagagaacattgcagtaatgtacctctgttagtgagcaccttctcttctgtgcttatctcttcaagataaatacatggaaggatgtgaaaatcggaacaccaactatgtgtctcactgcatctaagtgaagcagccacagctgtgagagttttcaaagcagaaagatgctgatgtgacctctggaattcagacatactgagctatgggtcagaagtgttttacttaaaaagcaaacaatccccaggaaatactgaataggaaccagcaacacaaggccagcttgtgttgtatgtttattaatacagtctaaaaaaaaaagcaaaaccacaacacacatccccaaacaataactctcaatcacatagctaattgcttcattattttgtaaaactgacatcctaacactggcacctagaatacttttccatctgagtctaacgtaccccactgcctctaatacggcccgcactacgatgagctacttcagtgggtgggaccaagcaggaactgtaagggaaaattagtcactagttctattatcgttttatttttcaagatgtgtgacaggtacaggtgacaatatggttgccaagtaacctgctctccctccctcaacaagacgcaacatgaaacctggaagtatgaggccttggtatgatttttaacctaagcaggtacacccatggtaaagaatggataccctgccctccatggaaaagattgcctgcaaaaataaatggaacaaaatagaaaaggcctaaaagccagaaatcttcaaacttactaaacaaaaatattttttaatgattctgatctaaacaatactgtatcttcttccatttgctcaattttcagtctatcaggactcatttctccagcttgagtttattattctgaatatatattactctacgatagtaactaattggttaacctgcagctatggtctatggttataccacaagtttatatataggtatgtaatgtatgcatatataaaaagcttccccatcctcccctccccaccatcacatctttaaattatagacttgtaagacttttttccaacactaacaaagtcagggtttctcagcataacagcatctcacaactgctctaaaccttccacatgaagacagagagttcaactattttattttgcaatctaagggatttttctctgcacttcaatcaaactggaaaattgagaaccatttgctcctatgtaacctctgctgaaccatgaccccaaggtctaaggagaacccacataggataaatgtttacgcttcacgtggccacccagatccatttttgtttttgagtctggcttttctgtggctgaagatataccgcagtcagcaggtaatggctggatttgggcgcctccatttgtttcttctgcttccctaaaaaatttttcatatttgtccaggtatggtggtcgttcaggtagtaggtaataatgtgttgaactaaccttcttcccattttcaataatgggcagaatgcaaggaaccttactggcagatccttcgctgttctgtctttgcagtgctttgctgctgacatacttgggatcaggggcaaagctctgtgtcgggggcatgaccccattgaggtaagacggaaggcttttgggactcggtgtgcgcgagttactcggtgacaaaggttctcttggcggtactttgggaggcctgtcttcatcactataggtgctcgaagtaacttctgctgaccatcttctataatctggctttactggtctaggaggtatgggaactctggggggaacctcaggtttgtcttcatcggagttaggagaagctctgtgtatacaacagttggatatccttatggctggcttgttaaaggagccagctggtcccgaatgagaccttcttaatcttcggtgggtctgaggtggaggaggatttggatctgggacacctcccattttggtcagacacatagctgagatctgctgcagaaacagctggggtatcaaaatatgcatagttgatttgtccacacccacggcaacttcgcctgcccaggaacatcatatttgaaatcagaaagtgtagagtcttctaaaaggaagtctgtatctgagctagttaggaattccacctcacagtctgtgtcatccagagagagggcttcagagattggcaacggtggaagaggcctagaaccccgttcacaaagaggggcacaggggaaaagggaaggggagttttt

SEQ ID NO: 65598 - DNA, 2895 bp, Homo sapiens
gcctatagctgtgctgaatgcaaggagactttcagcgataacaatcgccttgtgcaacaccagaaaatgcacactgtcaaaaccccatatgaatgtcaggagtgcggagaacgcttcatttgcggctcaaccctgaagtgccacgagagtgttcacgccagagaaaaacaaggattttttgtgagtgggaagatcttggatcagaacccagaacagaaagagaagtgctttaagtgtaacaaatgtgagaaaacctttagctgcagcaaatacctaactcagcacgagaggattcacaccaggggagtgaagccctttgaatgtgaccagtgtgggaaagcctttggccaaagtactcggctcattcaccatcaaagaatccactctagagtgaggctgtataaatggggtgagcaagggaaagccatcagcagtgcctcccttatcaaacttcagtccttccacacaaaggagcacccttttaaatgtaacgaatgcggaaagaccttcagccacagtgcacacctctcaaaacatcagttaattcacgctggagagaatccctttaaatgtagtaagtgtgacagagtcttcacccagagaaactaccttgttcagcatgagcgaactcatgccagaaagaagccgttggtgtgtaacgaatgcgggaaaacgttccgtcagagctcatgcctttctaagcatcagagaattcactcaggtgagaagccctatgtatgtgattactgcgggaaggccttcggcctgagtgctgagcttgtccgccaccagagaattcacactggagaaaagccttatgtttgtcaggaatgcgggaaagccttcacccagagctcatgcctttctattcaccggaagagttcacactgggggagaagcccttacagatgtggtgaaatgtgggaaaaccttttgccccagaaagcaaaatttaacacagcacccagagaattcacacaggggagaagccttactcctgtattgttgtgtggcaagctttttgtcctcagtgcccatctcacccggcacttgagagttacaacccaggggacactttatcagtgtcaactgccccagaaagcttttcggtgccactcgagcctcagccgccatcggcgtgtacacaacaagcagcaatactgcctgtagccattgggtggcagcagagtcccagaatatgagaccgttactcggatgttgaaagttggaaactctcccacttgcacagtttctctccaaataaatgcatctaaagattgattagaaagtttgtgcgcatgtttttcattataacaatgaaaacacaaaagtggagaagctgtacaacgtcaggattcagaggtaggctctggagccagtctaccttgagttaaatcccacctctgccatctactacctaagtgaccttgggaaggtcagaaaaatctctcagggcctcggtgtccttatctgtaaaatgggcatcacctacctcagagggcttttctgaggattaaataaataaatgtgaagcacttagaactgatggccagcacatgagggctcaccaagtgtaagccacaaatacacatcagctatagcacaaatatacttgtgttacaagaaaggaattagtaatctgtgtttactgtagttaatgttcttacaatgtatcgcttttaatttaagttttccttttttacagtttttctccagcactttactcttcttaagtgcctggccttttttgtccctttatctctcctgggttttttcttaagccccagaaagccaaaaagaacatgtaaactcttcacctcaactagctacaaccttccactcctaacctcccaagcttctcacttaaagaggactccctatcccacaaacacatgctccctcttcctatgaccttcctccatttaacagtgttggttatgcaataagacacccaatttttcatgggagttgacaccaaaacacagctggattccatcaggaaagctgcattgatcagggtgttaaccgcatatgaaacaacccatatggaagacatacttaggggtcaaacctgtggtgtgtggaagtgaccactgggatgtcatcattcaccatttatccaggatggccgctcaccaggcaatttgctaggctcgggggcgggtagtatccatacactatgcactactgctctgaagcttctggaatcagaaatgaacccattttcatcgacgattgctgttagttgacaagtgacatcttgaaaatgccacattccctcatgtcacaggaagttctgggatcaccaaggattgttggagagtccagtgagatggaaccacacaaccaagttccctaccaagtgtcttgtcagctctggggtgtttgttccctgccactaagtggctcagtccacacctttgctgaaacacagtagtcttatgaaaaagcactggacacatactttgaatacctttcatattttaggtgctgaaaatggtgagggagtgaatgctctgcacccttgggcttttcaactcttgcacctggagttctgctggttaaagtttgttaaacttagttgaaactgggaacctgttggctaaccattggggccttacactgtttttcaaatggttgcaacatttaacttctcgcacatgggttcccgtcctctggagctctgtcttgtcggggagatgggcatgttgtataccaaaagagtgtacaaagtgttgcagggctgtgacacaatagggactctatggaaaactggcagccattgggtgtgggggcagtctgtaaatcagtcacctgtgttgctgcaggccaaggtagaaacgccctccgtgtgtgcatatttgttggttctctgattaaagttttgagtctaaa

SEQ ID NO: 65599 - DNA, 1738 bp, Homo sapiens
gaaaggaggttggggggggcaaaccttttttttttttggttccggggggttttgggggttttcttcggttttggtttttggttttttttttcaaaaaaaacaggacgtttgggggggcaaactttttttttttttccctaacaagtacccttgatctgaatgggcaccagcatttgtgtcagtattggtttcatcattattattattattattattactattattatttcccatagcccagttcagggatgcaaaggtctttaaaacttctggacaatctctggtacaatgaggtgtctgataactgataaatcctatgatgccagataggtgtaaaattttttagaattggcgtaatccattatagtgacttctagcttataaaattaacagataccatgatttcattttagtcatgtgctttgataacagaaaataattaattagcatttaatgtagttaacatattgtggtaaaagcaccattagatttgtttttttgttttttttttttaatttccttcagtttttaaagggatacaagtttaacaataaaaaacataaaaagcaaaaatagctcccctttttcttgcaaggctgttttttaccccaataatttagagtcctggggtgaaaggactagaaaatcaaaaatagaattttcaacaatctgtatcttacaaagatatttagctatccaatgaaattgcactttactcaattcaaaattcgattgttttgattgattcctgtcagtttctgtcaaaacagaccatcttccccatttccatgtgaatttttgcgtcattggtgaaattgttgaaaaaatgttgttgttgtttttttaaatgtaagtgcagcatttcaaaacttttaaaaaactgaacagtagtagtagtagtttgccattttcggaattgttctgcaatgtgagtggattcattgtccttgcgggccatgttatatacttaactgctgactgctgaaccaaaacaaactaaaggaacaaataaaaaaggaatataactgcattttctttttccaatatgttacagaaaaacattgccctttgactgtcccgttatatattgcagatctcagctactacaaaagatttagttctccatgtgcctcctcaatgctcaaggaggatcacacctgtgtgggtaaattcatgaaatactgtgaaacagccaggctccgtaaggaaagtgtgttacaacaggaagtcagtgagcaagggtagtcctccgctagccacgtcacctaatgctcacgctaccatggaaacacttcaaatgttacaaagcccaaccatttccagccccatatgagaaattacaacagtccctaaagtattttaaaaaaaaaaaaatcccaaaaggttatggcctttgctgtttgaccataatgcttgctgtttccatgtacaagttgatttgaatcggtttttctccccttccgctgatagtgaagttgtaactgcgctgggttgaggttgcgtccatgttacagagttgagaaggggtcaggtggtctgtctggtggatggtgggacgctgcaacttttatcccaggtaccaggattggtgacgtgggggaggctgcactcccttctgttgacgtggtttgaagctctgtgtccggcacggcagaggcacaggccgggcaatcgttgttggccgtggccgtggcaacattggggttggaaaggatgggttttgcacctgacctggtga

SEQ ID NO: 65600 - DNA, 1583 bp, Homo sapiens
gggctgaaatggaagagatgaatacatctgaggaagaagagtctccgtgtggggaggtgacgctgaaacgggaccgttccttctcagagcatgacctggcccagctccgaagtgaggtggcctctggcctgcagtcggccacccaccccccaggagggacggagccaccacggccccgagctggcagtgcgcatgtgtggaggcccggctcccgagaccagggtacctgtcccgcgagtgtctctgaccccagccaccccctactcagcaaccggggctcctcgggggacagacccgaggcctccatgacccccgatgccaaacacctgtggctggagttcagccaccccgtggagagcctggcgctgactgtggaagaggtgatggacgtgcgccgtgtgctggtgaaggccgagatggaaaagtttttgcagaacaaggagctcttcagcagtctgaagaaggggaagatttgctgctgctgccgggccaagttcccgctgttctcgtggccgcccagctgtctcttctgcaagagagccgtctgcacttcctgtagcataaagatgaagatgccttctaagaaatttggacacatccctgtctacacactgggctttgagagtcctcagagggtatcagctgccaaaaccgcgccaatccagagaagagacatctttcagtctctgcaagggccacagtggcagagcgtggaggaggcgttcccccacatctactcccacggctgtgtcctgaaggatgtctgcagtgagtgcaccagctttgtggcagacgtggtgcgttccagccgcaagagcgtggacgtcctcaacactacgccacgacgcagtcgccagacccaatccctctacatccctaacaccaggactcttgacttcaagtgacagccccaggtggccaggcctccaggaggcaccaggcaggccctgtatcaggctaggacgctctgagctgtgcatgtacatatatacatatatagatacatttataatatatacacacagtctatatatttatatacactgtttcctggccccagagctcatttgggttcaggcgcacttcaaaaccctccctgggggaggctgtttcttctcaggattccttgccagggaggaaggggagggaacagggtgggttttctcactgaagagagaaagcagaaggttctagatcctggcacagactgcatcccatgttcccatgctcttctccgtccccaggaatgcgaacggcagtttcccttccccagtggacgtctaggtggggacagggtatcttggctcccagctggaccagagtgccctgcttgcctctgctctccctttgtggggactcaggcagcagaggcatctgggaagtctctgagtaggcagggtcctcctgggaggcacccccacctgtttgaaaggtctggccaggcgtggtggttcaggcctgtaattccagcactttgggaggccgaggagggaggatcacctgaggtcaggagtttgagaccagcctggccaacatgatgaaatgttgtctctactgaaaatgcaaaaattagccaggtatag

SEQ ID NO: 65601 - DNA, 3115 bp, Homo sapiens
tttttttttacctaaaaagaaataaaatgttttactcatttacacaaatacacacactgaagtccaccctgggagctggtaaaacaatttcagtctcagacccgtctgttttccagggtcctccgagcctgggcttcctcaagagcgtggcccaagggccccacagcccagatccgggcagccccaccaccttcactgaggaggctccgaagctccgttcccgctgctccttacagacaggggaggcagatatacacaaacgcgcctcggcccagcttggggctggcgggggaggctgtgtcttcaaacctttgcccccagttgggtcagtagaaccaccagtgtcctccccttctacctcccagctccactttggaggctgaggaagcgagaggttttctaggcagatttggagccctggagattgagttcacagtgtatgttctgggggcgctggtgcagtcagcggtccagtctccagcctgcaggcgtgcacactggggtggacgatgggtggccccgcaggtgtacacatttgggtggccccggcccctataccccagtgttctctttgatccagtcccgaaacagagggagccttgtgtacacgcctggcttgttcctctgagcgcagccgtctccccagctcaccacaccggcctggaagatccgcccatccgcctccacgctggacaggggtcccccggaatcaccctggcaggagtccacgccgccgctgaggaagcccacgcacatcatgcgcggcgtgatctgctgcggcaggaggttctcgcaggtggtctggttgatgacgcggatctcacccttttgcaggatcagcgcgccagtgcctccatactgggtgtgtccccagcccgtgacccagatggccttgccggcagggaagacatgggaggcgtccggcaggcagatgggccgcaccatggagctgtactctgccggtttctccagctccagcagcgcgatgtcatagtcgaaggtgaagtcattgaagaaggggtgggagatgatgcgcttgagcctgcgctcctgcaccccaggggcgctgcgctggctctggtcgtgcaagcccaggaaggccgtccactgcgtggggtctgagtacctgaatcctctgtcatcgatgtagcagtgtgcggcagagaccagccagttgggagagatgagggaagcaccgcagatgtggccctggcccagagcatgcaggcttacctgccagggccactcgccctcatccgcatccgtgcccccaacaacacgagcctgtctcgtgaatgaccgcagcccacagtcgcagtccttctcatctgagccgtcgctacagtcctccttcccgtcacactcagggttgcccttgctcaagcagagcccattgaggcagcggtaggtgtgtttggtacaagtgacgacgttcaccttggggcaggaggcctcgtcggacccgtccccacagtcgtccttcccattgcactgctggcttttcgagaggcacttcccattggaacacctgaaggtctgggtccggacaactgcacccctgctcgtcgctgttgtctccgcagtcgttcaaactgtcgcagacccagaagaggggcttgcagaacttgttcttgcacgtgaactggtggccggcgtcgcaactgcagttgagctcatcgctgtggtcggtgcagtcggcccagccatcacagcgcagctccttccggatacaccgccccgtgcggcacgtgaactgccccgggcatgggtcactggagtcgtaggagaggtattcagctaagaagccggtgtcggtgtaggactgatctgagtggaagcgaactgtgatcttgttgctgttgctggtgacgacgaactgggacctctctccgcagtatttctccccattgatctccacgtagtccttggggcaggtgcccgcaggcacgccgggctccagcaggtagaagaatttgaagcgcaccttcacatgctggttgttgggcacctcaatgttccatgtgcagtcaatgttgggtgggtagtggcctgggtagtaggggctgttgaatgtcccctgggctttacgtaagcggcctccacagctgctcatcctaggcagctggaagaaggtggcctcaaagcccgggatgccgccgctcagtgttggttatcagtgtgatgagcaggacgttcgtgggagggagtggaaggtcaggttgtaggagggagggtaggtgccacacaactgcaccaggggcgtggggctccatggggctcatgggtgttgtacaccgtcaaccaggtgtctgccgcgctcgtcgcaggacgcaaggtcaaagctgcggaaggtgaggctcagcactgagtcggcgtccccccgcagggcccactggcagcgggcatgagcggggtaggggctgtcagggaagccgggcgtggtgaagcgcatcagctccacaccgcgggcgtgcaggccaaagctgcagctgttgtcctgggtcctctgtactgttttggagtccgtggggaaagccaccactgaggtgaccacaaaggacttcagggagcgcgcccgcgggggcagcatgactacgcgctcctcggccatgacgcgctcggcctcctccaccaggtgctgcgggatgctgaactcagaccagtagtaggcgatgacgctgccctcgctgaaggccgtcacagccgactccttgtggtaggggcccaggaatgggactccgctgtacagcagcttcagcgcgtccttcaccttgctggccaggcttacaaactcagtggagttggagttctcgtaggcatccacaaaattctcatttgtgatcctcatgtagccattgaagaccttctggacacgcacgtcccggtactgcaaatgccacaccaggaagccgatccccagcaagaccaagaggaggccgatcagcacggctgccagcaccacccagcgccccgggccatgcttttccaccttcttgacgttgttgactggcaggaactccacgccttcctccaagccattcactttctcgtgccgggagttgtacttgagtcccgcgccgaagtccttcgggccccctccgcccttgcgacgaaa

SEQ ID NO: 65602 - DNA, 3977 bp, Homo sapiens
gttaggtccttgggcagaaaatgatcatttaaagaaggaaacctcaggtgtggtcttagcactttctgcagagggtcctcctactgctgcttcagaacaatatacagataggctggaactccagcctggagctgctagtcagtttattgcagcgacgcccacaagtctaatggaggcgcaggcagaaggaccccttacagcgattacaattcctagaccttctgtggcatctacacagtcaacttcaggaagctttcactgtggtcagcagccagagaagaaagatcttcagcccatggagcccactgtggaactttactctccaagggaaaacttctctggcttggttgtgacagagggtgaacctcctagtggaggaagcagaacagatttggggcttcagatagatcacattggtcatgacatgttacccaacattagagaaagtaacaaatctcaagacctgggaccaaaagaacttcctgatcataatagactggttgtgagagaatttgaaaatctccctggggaaactgaagagaaaagcatccttttagagtcagataatgaagatgagaagttaagtagagggcagcattgtattgagatctcctctctcccaggagatttggtaattgtggaaaaggatcactcagctactactgaacctcttgatgtgacaaaaacacagacttttagtgtggtgccaaatcaagacaaaaataatgagataatgaagcttctgacagttggaacttcagaaatttcttccagagacattgacccacatgttgaaggtcagataggccaagtggcagaaatgcaaaaaaataagatatctaaggatgatgacatcatgagtgaagacttgccaggtcatcaaggagacctctctacttttttgcaccaagagggcaagagagagaaaatcacccctagaaatggagaactatttcattgtgtttcagagaatgaacatggtgccccaacccggaaggatatggttaggtcatcctttgtaactagacacagccgaatccctgttttagcacaagagatagactcaactttgggaatcatcctctccagtttctgcaaaagaaaagctcctccaaaagaaagcctatcagccagacctagtcaagcttctggtggaaaaaagacaattcaagtccttccttggcgacctctcaagtgcctctgataaattgctagaggagaaactagctactgttcctgctcccttttgtgaggaggaagtgctcactcccttttcaagactgacagtagattctcacctgagtaggtcagctgaagatagctttctgtcacccatcatctcccagtctagaaagagcaaaattccaaggccagtttcatgggtcaacacagatcaggtcaatagctcaacttcgtctcagttctttcctcggccaccaccaggaaagccacccacgaggcctggagtagaagccaggctacgcagatataaagtcctagggagtagtaactccgactcagaccttttctcccgcctggcccaaattcttcaaaatggatctcagaaaccccggagcactactcagtgcaagagtccaggatctcctcacaatccaaaaacaccacccaagagtccagttgtccctcgcaggagtcccagtgcctctcctcgaagctcatccttgcctcgcacgtctagttcctcaccatctagggctggacggccccaccatgaccagaggagttcgtccccacatctggggagaagcaagtcacctcccagccactcaggatcttcctcctccaggaggtcctgccaacaggagcattgcaaacccagcaagaatggcctgaaaggatccggcagcctccaccaccactcagccagcactaaaaccccccaagggaagagtaagccagccagtaaactcagcagataggagccaggctgcatctctttgaaaggtgtgagatcttcctcctaaacctgatgcatgtgtgtccctgtactttctatgtaaaaaaatcagtgttgatcttctcttgcaaaagaaagtaacatgatcaattatttataagaagacataatacatgataaggaattacctaaggcagggcagcaagtagattaggaatcaatgtctttgtacaagaaggaaaaatagagcaaaaatccaagggggagaaactcattaaaatgagctctcattttttaagctgcctttgaaacaaaagagttgaggataggagatagaatggaattttaggggggttgcctaatttttttaagcctcaattcaaagattatatagcaaaagtgaaacttcttgtttgatattttcattcaaaactttcccaccctgaagagtcattgatcagatattagattatataagaagtctgttgccagggagccagtattcatgtatatttggcttgtgtgtttatttcgtgtattgagaatgaacacctttactttgcctcattcctagtaccctccctggagttcagatttttttttaaaattttgtatgtctcgtctgattcaatctctctgcttttattttatggtcctagttgtactatcaaatccaattacttttttttaggtccccctgattttttttttttagagcaagagttcttaacatattacatttttattatgaaaaataagaaagttaggtaaaggaaagaaaagtctaactagagctattttgcaggctttagtgtttagggagagaaagaaagtgtgggttaatagccttcaagatagaagatgccctttcatctctgttaagtgtcctcctttagaaacttgagtagaaggaaaactgaccagagtagactgcttccttaagtcttctgggttccaactgtttgtaatatcagcatccaagatgatacgagggaagcacaatgctttggactgtgatttgagatttagaaataaattagatatattattgaggcttagaatcctcaaactttgtattttatacatttagccaataaggaattaatatctggggaaataaatttaggcaaatatttcttttttaatgttttattacctgcttctcctgtgttttagttcaacatttgggcttcttggcctgattttcatacaatctcaatttacgaagctgtaaagaggaagatatttgttctaatctcactcttctaataggaatcaggcaaatgaaagtctaccagacttttaaaatgggctgtttttatactctctaggtgttttgtgttgtaaagaccttattaaggtcaggtaaattggtctgcttgctgttgaaatttgccttctagcaaacatatgtgctttctgttccaccttgctgtttgctgccaaacccaatacagttcaattgggaaacaaaaaaaaaagaaaggaatacatttcctccccaagtgaacatcttctaatgctgcatcaaagctgccctgaagctgcactgaacttctcttgttctctttatctggggtgagctttttaaaaaaacaaactcaaaacactattgaggcatataacgtctcttataagaaatgtagcatagtgtggaatcttaatttctctccagtttcaaacactccagaggaatgcaatagataagacatacttgctgtttatctaaagcaactgtaatattggaagatcagtccttctgtattatattgtataatagttgctataacactacttgcatgtcttcatggtaaattatataaatatttataaatatatagagagacatatccttatatagagtcattctttgtcattctccatttgtaatttcgagatcacagatggcgaaattccttttctattgtgtgcctcatgtacacttgggccttgcctatcttcattttcttgaactatgttcttggcatgtgacacctcagagtcttcttgccttccctgtgtacaatgcaagggtgggcagtatttaacaagccaagaa

SEQ ID NO: 65603 - DNA, 2215 bp, Homo sapiens
ttttttttttttcctgagacagcagagcataagtccttttaattatgtgtttgaaaaatgtcacaagtcaaaaaaggaacacaaggcaggctccggctccctccacccccgtgaggagcccttgtccatttcagccttgcactcagaaagaccccggggggtctgtgtacgttccacgtgcttcatgtttcgtggtatctgtcagagccttaaaacagggcccacccactactgtgaaatttcaaggaaataactgattcagttaaataacagtcccaaggtagacctggtctcacaggtgaccacccgcttaaatccagagccttcttttctgtccaaagccactgaaatttgatctcctccttcacacattcccaggtccccaatatgccacccaccttctgacaggtggctacaggtctacactaatggaagctctgctaaaaacatctccacccaaccctcctgccaacgaggtcagctggcaggcatctgctaagcccctaaactggtcagcgcaggttatgcgcccattccgagacccaaacaatactccaggacttcgcacctcctcctcgagaggcaacggagagaactgctcttacttcaatctgacagtcaagggagagcacacaaataaaacgtcccatctggaagaaatcagggaagctggggaaatgaggctgttcatcaacttttaagagctcaaacttggctgtgtaactttcagacctagcttatggttggggaccacctgaactggcccccagggttgcctctctctcaacacaaggtgcatactgaacccttctgcagtgtagtacacgttgctgccgcaagtgcaaaggccacgagggaaagaccttttaaccagagcaaggggaatctgaaatgccagaagggggaaggtcggttcgcctgaagacctcttctggcctgtgtggaaaggacggccccttgtcaaccctggggaagcactgcagatgtgaagcggtttggccactcttgggcactgactgagggtgatgaacgaggaagggagcaagagctgaaggcgaggagagcgctaggaggcagggaacctggagccaggggctgcctggcagggctttaggctgaagcccccaaagcgtagttcccttcactggctcaaacataaaaggaaccaaactgtttggggaaaaaggccaccctctggcctttcaaaacattctctcacaattctatgccatatgagtgcaggcttaattcgtccagtgaattctatgcaaatgtttcaagaagctgctgttaacaggaacaatgtgtacctggtacacactgatcctatgggggtgggaggagagagagggaaggaagcaaagaggagccgcctcccttcctactgtgctcttcagatctgtcagtggggccgggcgcagcagatggccccctccccagaggcaggggagagtcctccaccccctctgcagcctccaggagcattctgacttccaccagcaggcactccagttattatgcatctagacatatggatctacacgaggaacccccggcgcagccaagctctgcgctggctcccgcacaggcgaagcgcgcgcagcagcacaggagccccgcccctgcagcttgacgagctgagctggggtccacaggaaccacgccccaaggagcgtttggggatggtagtggggagacaggccattggcttccccctctttctaaggaagtcagcctcactctactccttggggatttcgaacatgcagaggctcttgtacttttgcagaagctcattcttggtcctgacttgctcccggaggctctgcagctgctgctgctgctgttcggggctcaggtggatgccgggcatggtgctgatgagcttgcgcatctcctggaacttgcttttgagggcgttcaggtcctggtggacctccgggctgtccttgtccatgcatttgatgatgttgtgaaccaaaggtaaaaaggagtagttctcttcctccctcgcgcgggcaggtgactgaggccgtggcgccggcgactgctgcggttgaggcgcagggaccggcggcggctgaggaggcggcagcggcttggtgtcaggcagcgcctggtcggacgttggcggcaatacatcctccgcctgtcgcccggctgccaccccagcagaggccatggctccgggggtaggttagccagaggtcgggtc

SEQ ID NO: 65604 - DNA, 1555 bp, Homo sapiens
gacccccggggttttcccctccccgccgtgttaaaccgccggccccggaattgaattagggggccccaaaaaaaaaataatacctttcccgcccccggcactaaaatttggttctttaaaacggccccccccttttttttttttttgatgctgtgacttttattctaatacacacattgatttgattaaaccaagttcagggataaggcaaatatacattcttgttcccgaaaacatcccaggcagtttcagcgtctttcagcacagatgaggtagggttggggctgcaatgtcatgcctaacctgggcttcagatctggaactagttcatgtggaaaatgcaaatgaaacctctgaagcaatgctgtaaaaaacaagaacatttccatccgagccaagtgttctcccaaggacaatgtcttcttcctagggggaaaaagggaacccaaagcttcccttcttggggccaaaatatcccactgctggtcccaggaaatcgctcagggatggggaacactttctgggggtcttctcccggtacttttttccatccaaggtggtacaggaattaaggtttgtaattacttgttgtgcctttaggaatggaataaccacgtacaactgcatcttcagaggttgcatggaaaatccctaatggaactatattacagaatcttaaaacttcatgcaaaactgcctcagtataaggcattttgcatttgtcgtcccaagaaggcttcccattagggcccataattaaatcaatctctttctgaacttgtccttgaatattaggataaagggccatgaaaagaatcgcccaccgtagcacattggttgtagtttcagttccagcaatgatgagttcacccactgagaaaattaggttttctttggagaaagtagatgatgggtcatttttaccttgatccatctcatctaaataagcatcaacaaaatgctgaggtagctgaggctttctgttgactgaagctttttcaatgagtctggagagaaaatcatagactacagctgtcatttcctaaacagctgttgatgttttccaaaaggcaggatgccaatccatggaaaggcattatacaagaagactgaggcactggcagctagttccacattttcactaaataactcaatcatgtgctgaaaatcggtgtcttcataagtgaatcgttctccaaaaatgatcagattggttatgtttgaaacagcattcgttattaactgtttaaagtcaaaaggtctacctttgtatgtttcaatagcatcattgaaaaatttggtttcttccaagattttagattcaaaagacttttggccatatccaaaatatcgaaaactgtttacagctaatcgtctgtgatcaacccatcctcggccatatctggaattgagtaagcctcccatttttgtcatcttcatgaataaaggaaggcatggtctgtctgcaaaaatttcgctttgatgaacaaggcattcctttactacatcatagccatttacaaccacagttgatatgcctccaagatctagactg

SEQ ID NO: 65605 - DNA, 973 bp, Homo sapiens
agcggccgcgatgggtggcgccatggtcctgctctatgccagccgggcctgctacaacctgacagcactggccttggccccccagagccggctggacaccttcgattacgactggtacaatgtgtctgaccaggtgggcatacgcatgtctgccacctccttagtagccgtggcaccttggccccagctggcctgggccctgtcccactacccctttggcgtgactgcagactggcaccagcccctgccttcccacaggcggacctggtgaatgacctggggaacaaaggctacctggtatttggcctcatcctcttcgtgtgggagctactgcccaccaccctgctggtgggcttcttccgggtgcaccggcccccacaggacctgagcaccagccacatcctcaatgggcaggtctttgcctctcggtcctacttctttgaccgggctgggcactgtgaagatgagggctgctcctgggagcacagccggggtgagagcaccagtatgtcgggcagtctaggctctgggagctggtatggtgccatcgggcgtgagccgggctggtatgggggcagccagacgaagaccactcctctgctcttctcccaggtgccaggaccaggcggccaccaccacagtctctactccaccccacagacgtgatccccctccctcccccacagaatacccaggccccagtccccctcaccctaggcccctgtgccaagtttgtctgccgcttcttgcccaggatcctgggggtcgtggctaccccctcctctggccggctccttgctgctcctgtcatagtgagcttgtgccgtccccctaggatggggggcatggccctggctgccagatgcccacagcaccctggcatgacctgccacctctgcttccacaccggagccagctacctctcctgtgcctgccactcaataaacagtgtctgcgccccacaaaaaaaaaa

SEQ ID NO: 65606 - DNA, 3219 bp, Homo sapiens
  misc_feature (1)...(3219): n = a,t,c or g
atgcccgccatgccctccagcggccccggggacaccagcagctctgctgcggagcgggaggaggaccgaaaggacggagaggagcaggaggagccgcgtggcaaggaggagcgccaagagcccagcaccacggcacggaaggtggggcggcctgggaggaagcgcaagcaccccccggtggaaagcggtgacacgccaaaggaccctgcggtgatctccaagtccccatccatggcccaggactcaggcgcctcagagctattacccaatggggacttggagaagcggagtgagccccagccagaggaggggagccctgctggggggcagaagggcggggccccagcagagggagagggtgcagctgagaccctgcctgaagcctcaagagcagtggaaaatggctgctgcacccccaaggagggccgaggagcccctgcagaagcgggcaaagaacagaaggagaccaacatcgaatccatgaaaatggagggctcccggggccggctgcggggtggcttgggctgggagtccagcctccgtcagcggcccatgccgaggctcaccttccaggcgggggacccctactacatcagcaagcgcaagcgggacgagtggctggcacgctggaaaagggaggctgagaagaaagccaaggtcattgcaggaatgaatgctgtggaagaaaaccaggggcccggggagtctcacaaggtggaggaggccagccctcctgctgtgcagcagcccactgaccccgcatcccccactgtggctaccacgcctgagcccgtggggtccgatgctggggacaagaatgccaccaaagcaggcgatgacgagccagagtacgaggacggccggggctttggcattggggagctggtgtgggggaaactgcggggcttctcctggtggccaggccgcattgtgtcttggtggatgacgggccggagccgagcagctgaaggcacccgctgggtcatgtggttcggagacggcaaattctcagtggtgtgtgttgagaagctgatgccgctgagctcgttttgcagtgcgttccaccaggccacgtacaacaagcagcccatgtaccgcaaagccatctacgaggtcctgcaggtggccagcagccgcgcggggaagctgttcccggtgtgccacgacagcgatgagagtgacactgccaaggccgtggaggtgcagaacaagcccatgattgaatgggccctggggggcttccagccttctggccctaagggcctggagccaccagaagaagagaagaatccctacaaagaagtgtacacggacatgtgggtggaacctgaggcagctgcctacgcaccacctccaccagccaaaaagccccggaagagcacagcggagaagcccaaggtcaaggagattattgatgagcgcacaagagagcggctggtgtacgaggtgcggcagaagtgccggaacattgaggacatctgcatctcctgtgggagcctcaatgttaccctggaacaccccctcttcgttggaggaatgtgccaaaactgcaagaactgctttctggagtgtgcgtaccagtacgacgacgacggctaccagtcctactgcaccatctgctgtgggggccgtgaggtgctcatgtgcggaaacaacaactgctgcaggtgcttttgcgtggagtgtgtggacctcttggtggggccgggggctgcccaggcagccattaaggaagacccctggaactgctacatgtgcgggcacaagggtacctacgggctgctgcggcggcgagaggactggccctcccggctccagatgttcttcgctaataaccacgaccaggaatttgaccctccaaaggtttacccacctgtcccagctgagaagaggaagcccatccgggtgctgtctctctttgatggaatcgctacagggctcctggtgctgaaggacttgggcattcaggtggaccgctacattgcctcggaggtgtgtgaggactccatcacggtgggcatggtgcggcaccaggggaagatcatgtacgtcggggacgtccgcagcgtcacacagaagcatatccaggagtggggcccattcgatctggtgattgggggcagtccctgcaatgacctctccatcgtcaaccctgctcgcaagggcctctacgagggcactggccggctcttctttgagttctaccgcctcctgcatgatgcgcggcccaaggaggggagatgatcgccccttcttctggctctttgagaatgtggtggccatgggcgttagtacacagagaggacacatctcgcgatttctcgagtccaaccctgtgatgattgatgccaaagaagtgtcagctgcacacagggcccgctacttctggggtaaccttcccggtatgaacaggccgttggcatccactgtgaatgataagctggagctgcaggagtgtctggagcatggcaggatagccaagttcagcaaagtgaggaccattactacgaggtcaaactccataaagcagggcaaagaccagcattttcctgtcttcatgaatgagaaagaggacatcttatggtgcactgaaatggaaagggtatttggtttcccagtccactatactgacgtctccaacatgagccgcttggcgaggcagagactgctgggccggtcatggagcgtgccagtcatccgccacctcttcgctccgctgaaggagtattttgcgtgtgtgtaagggacatgggggcaaactgaggtagcgacacaaagttaaacaaacaaacaaaaaacacaaaacataataaaacaccaagaacatgaggatggagagaagtatcagcacccagaagagaaaaaggaatttaaaacaaaaaccacagaggcggaaataccggagggctttgccttgcgaaaagggttggacatcatctcctgatttttcaatgttattcttcagtcctatttaaaaacaaaaccaagctcccttcccttcctcccccttcccttttttttcggtcagaccttttattttctactcttttcagaggggttttctgtttgtttgggttttgtttcttgctgtgactgaaacaagaaggttattgcagcaaaaatcagtaacaaaaaatagtaacaataccttgcagaggaaaggtgggaggagaggaaaaaagggaaattnctatagaaatctatatattggggttggtt

SEQ ID NO: 65607 - DNA, 3698 bp, Homo sapiens
  misc_feature (1)...(3698): n = a,t,c or g
aagctggaccgggagttcctcaagggttgcaagcttatattcaaaatcgctttgctgncggggggcgccctcaggaatactttaatagaaagtgatctgaaatacaaagagaaacatgtcaaggaaagaggaacctgccatgccgtacctgacacgcctcagatcctgctggcgaagactgtcagcaacctggtgtctgagaacaagtacaaggaccatgtcaagaagcacttggcacagggctcatacacaacactaccagagacccgggacactgttcacgttaaggaagtgaccaagcatgtcagtgatacaaattacaaaaagaagtttgtcaaggagaaaggaaaatccaactactccatcatgctggagccaccagaggtgaaacatgctatggaagtggccaagaagcaaagtgatgtcgcttacagaaaagatgccaaagagaacctgcattacaccacagtggctgatcgaccagacatcaagaaggccacacaggcagccaaacaggccagtgaggtggagtacagagccaagcaccgcaaggaaggcagccatggcttaagcatgctcggtcgcccagacatagaaatggccaagaaggcagtcaagctgagcagccaggttaaataccgagaaaatttcgataaagaaaagggcaagacaccaaaatacaatccaaaagacagccagctctacaaagtcatgaaagatgctaataatcttgcaagtgaggttaaatacaaggctgacctgaagaaacttcacaaacccgtgactgacatgaaggagtctctgatcatgaatcatgtcctgaatacaagccaacttgccagttcttaccagtacaagaagaagtatgagaagagtaaaggccactaccacaccatacccgataatctggagcagcttcacctaaaagaggccacagaattacagagtatagtgaaatacaaagaaaagtatgaaaaggaacgaggaaaacccatgctggactttgaaacaccaacgtacatcactgccaaagagtctcagcagatgcagagtgggaaagagtacaggaaagattatgaagagtccattaaaggcagaaacctgactggcctggaggtcacgccagctttgttacattgtcaaatatgcaactaaaatagcaagcgagaaagagtacaggaaagatctagaggaaagcatccgtgggaagggcctcactgaaatggaagatacacctgacatgctaagagcaaagaatgccactcaaatcctcaatgagaaagaatataagcgagacctggaactggaagtcaaaggaagaggcctgaatgccatggccaatgaaactccggattttatgagggccaggaatgctactgatattgccagtcagattaagtataagcaatcagcagaaatggagaaagccaatttcacttctgtggttgatactccagagatcattcatgcccaacaagtcaagaatctttcaagccagaaaaagtacaaggaagatgctgagaagtccatgtcgtattatgagactgttttggacaccccagagatacagagagtccgggagaaccaaaagaacttcagccttctccaataccagtgtgaccttaaaaacagtaaaggaaaaattacagttgttcaagacacgccagaaatactgcgtgtaaaagaaaatcagaagaatttcagctcggttttatataaagaggatgtctcaccaggaacggctatcggaaagacacctgagatgatgagagtgaaacaaacacaggaccacattagctcggtgaagtataaggaagcaataggacaaggaactccaatccctgacctgcctgaagtgaaacgtgtgaaggagacgcagaagcacattagctcggttatgtacaaagaaaacttgggaacaggcattccaaccactgtgactccagagattgagagagtcaaacgcaatcaagagaactttagctcggttttgtacaaagaaaatttggggaaaggaatcccaacacctatcactccagagatggagagagtcaaacgcaatcaagagaactttagctcggtgttatacaaagaaaacatgggcaagggaactcctttacctgtcactcccgagatggagcgagtcaaacacaatcaagaaaatattagctcggttttgtacaaagaaaatgtggggaaagccaccgcaacccctgtcactcctgagatgcagagagtcaaacgcaatcaagaaaacattagctcggtgttatacaaagagaacctggggaaagcaacccccacaccctttactcctgagatggaaagagtgaaacgcaatcaagaaaactttagctcggtattgtacaaagagaacatgagaaaagcaactccgacacctgttactccagagatggagagagctaagcgcaaccaacaaaacattagctcgggttctttattctgatagtttccggaaacaaatacaaggcccagctgcctatgtattggatacccccgagatgagacgggtgagggagacccaacggcacatctcaacggtgaaatatcatgaagactttgagaaacacaagggttgcttcacaccagtggtgacagatcctatcactgaacgagtaaagaagaacatgcaggacttcagtgacattaactaccgtggtattcagaggaaagtggtagaaatggaacaaaaacggaatgaccaagatcaggagactattacaggtttacgtgtctggcgtactaatcctggttcggtttttgactatgatccagcagaagacaacatccagtcccgaagcttacacatgattaatgtccaagctcagcgccggagccgggagcagtcacgatctgccagtgcactaagcatcagtgggggtgaggagaagtctgagcattcagaagcaccagaccaccacctttcgacttacagcgacgggggtgtctttgcagtctcaacagcttacaaacatgcaaaaaccacagagctcccacaacaacgatcatcttcagttgctacccaacagacaacggtatcttccatcccatctcatcccatctactgctggaaaaaatcttccgtgcccatgtatgactatatggctgctgatgcagatgaggtgtccttcaaggatggagatgccatcataaatgttcaagcaattgatgaaggctggatgtatggcactgtgcagaggactggcaggaccggaatgctcccagccaactacgttgaagctatttaggcatttcaaagcatcacacttgtctgcaggacttacagatcctgcagtcaatgtttcggtttaaactctccactgttacctaagttctcaagctgcctatggtttttctgtgtcaatgtgatttatggtagtaccatcctttctcctttgggttttaaaataagttgcagaacagacactttaaaagcttctgcaatattatttctgtgcctagagtctttctccattataaacatgttttaacattatttcttttctaaaacagggattttgaatatgccaaacacattaaaggaaaaatagcagagatgttcaccttttccttgctgattgctaatgcttattatttctaattcagttctgaagttataaacttataatcaatacaaaccagcaactaataaaacctctaattctgcaaaaaaaaaa

SEQ ID NO: 65608 - DNA, 1832 bp, Homo sapiens
ttttttttttttaagtaagaacaaaagctttactcgtgctcggcaacagcaaagcaggaggcagaggggagatgacggcccctgtcccatttccctccatggaaggcaccaggcggggaggtgggtctgctgggatgggcaggtcagcggaacaaaaggctcctgttgtttatgggcccaggcacagtggggcaggagcacgacccagaaagtagtcctgagccacaagtcagagcggagaaaacatctctgtggtcccagtcaagaggcctccgaatgaggcgcctggactgggagcaaagctctggtcgagaacatgaccttcccgggcctgagtcccactgtggtgcccgggccgtgcacccagcctgcggcagagagggcggcgtcccccacaaagcctgccaggctgagcccttgcaatggccgtggctgggccaggaccttggcctggagcctgctccttgacacccagccagcctagcacccgccttcagcaacaggtaatggagcccggatggcagctccctcccaggtgcgcaagtgctggggtggaagcctgttcccgtgggatcaaccttggggctgggtcggggggaggggcactgcggccctggccatcagcctggctgtcttcgttctcccaaaacacccatcaccgcagcccaccaggggctgggagagggggggctgcaggctagccagagggtctgccaggtgcctgcatctcactggtgtggccgtggcacctgagggagcccactgagcccatagggggctctggttccccgcgcctgggacagagccaggcagccctgggtcggggtggttggtgtcaccgagaggtcggggcgccctgtttctgcctgggacaccagtccgtgtctgggtacagaagacaatggatagacttaaaccgtgtggggtcttgatgcaggctgaagcctccagccacgttcaccacgttctgtgggttctcaggacccccatggctcaaggtaacctgctggagcagggtgtcgggcggcagcctctgcaggttctccaggtgagagtggaagagggggctgtgcagcaggcgggcgcccaggagcccctccacgatgtagccaactgtgcagtcatccggcagccgcacctgctcagctgtgctcatgaagctgcccaggctggcccatgggctcatcttgagggcaaggcctctgctgaggcagaacccggccccaccagtagcaaaccagaacttgaccgtggtcacagttctgccaccctggaccctctcggtggcctcaatggggtggtccaggctgggccgccccaggtagacgtcctggctgggtgagaagctggagagcaggtgcaggaggctccttgcgttcacataattgtcatcatccacgtggcaaaaccacttgcgcccggactcaatgaacttgtcatactccacggacatcttgcagcagagggcctgacgagtgcgcaccgccgagcagttggtgttgatgacacggtcgccgccctggagctcgagctcagggtcgtccccgtcggtgaagataaacgtctgctggcgggcccgggagatcccaggtgcgcagcagcagccgcaggcgcggcccgtggttcttccgggtggtcttgacggcgatgaagacgtcgtcaggccgcaggctgggggcagcgggccgggacgggggcgcgcgcggggccggggcgggggtccgggccggggcgggcgcgcggggcagcggcagcggcagtaacagcagcgcggccagggccgcggccagcgcgaggcaggcccggcacagcgccccacgcgcgcggctcat

SEQ ID NO: 65609 - DNA, 1022 bp, Homo sapiens
ttttttattttttatttttttaagcacgggatcctgtcttcactcctacacactgaacatatccattcggatgctattgaaattaccatctaggccagaagcaggcttagccttcacttccaaagaattatctaagtcttctagcttctggctcagctccactttccagactccatctgaaccaactttctgtgggtagtgaggtttgaacccttgagggtgctgcacaaacttgaggtatccgttgaaggcaaggaaagggaaggaggagaagaagggggagaagcagctctcctggcagacgcttggaaaaggatattaggccaggacttcatggagaagcaagaaagatgaggataggtgttattagaagaagctgcagactgcgaggtagatgtggtgttaggattaggggagcagactgagtgaggtaataatctaacatgctctttggcatttctcattgcttgtttgattgttttctctttgtgcaagcttgactggaggtgttggctaagtgcttcattcccactgatagccacatcacaggcaagacactgatatttgctgactgggacacgaagcactgtctcttgtgggtcaatcaaaggctgaccgaaataacagaaggacttttgatgatttactcgcggcgtcttcatcaagtaacatcaactggcaacttctgcatataaactcatacttgacgaatggaacaacgtaagtgtctgaaaagtctgcacttttggattctaactggggttcttcttttgtgctttctgtagcagtacttttgtcttcctttgtttctgaagcatcgttggagttttgcggctggtcactttctactttggatgtctttgcctgaactggtttctgctgctgttcttgctgttgcttttgctgcttttgcagggactcctgcaggttctgctgatactgttggtactgctgcaacagtgcacctggggacagacctgccagtgtctggggcattgtagggccataaggctcgtgccgaa

SEQ ID NO: 65610 - DNA, 2011 bp, Homo sapiens
aattctcaacaacccaggaatgctgccaaatctctctcaagacctgccacagaaactcagttttcaaatatggggatggaagatgttcccctcgccaccagtaaaaagctaagttccaatattgaaaaatctgtaaaagacctccagcgctgcacagtgtctcttgcacggtatcgagttgtagttaaagaagagatggatgcctccattaagaaaatgaaacaagcctttgctgaattggagacgctgattaatggatcgagaagtggcgttgcttgctgaaatggacaaagtgaaagctgaagcaatggaaattttgctcagccgacaaaagaaggctgaacttctaaagaagatgactcatgtggctgttcaaatgtcagagcagcaattggttgagctcagagctgatatcaagcactttgttagtgaacgtaaatatgatgaggatctgggacgagtagcccggttcacctgtgatgtagagaccctaaagaagagcattgattcatttggacaagtgtctcatccaaagaacagctattcgaccagatcccgatgtagctcagttacatctgtgtccttgagtagcccaagtgatgcctctgctgcttcctcttccacctgtgcctctcctcccagccttacaagtgctaacaagaaaaactttgcaccgggagagactcctgcagccatagcaaactccagtggccagccctaccagccacttcgggaggtattgccagggaacagacgaggaggacagggctataggccacaaggccaaaagtccaatgaccccatgaaccaagggcggcatgacagtatgggtcgttacagaaacagctcgtggtattcatctggttccaggtatcagagtgctccatctcaggcaccaggaaacaccattgaaagaggccagactcactctgcagggaccaatggaactggagtcagcatggagcccagccctcccacgccttcattcaaaaaggggctcccccagcgcaaacccaggacctctcagactgaagccgtgaactcttgagagaaaatccagttggcctctctcctctatccacacaattcaacttgataactggactttaggaaacttacagttagatgtaataacaaaaagaagtttatgcgtatcactttttgtgccattctaagtatttttggtttcttgtctccttatttcctctttaccatttttggaggggaagctattttttttccttgatctttcccagtgatatggattgaatctggttggtcatttccaccaggaatcagaggcagctgttaccaggtttcggccttccagttgatccctccactgtccaggctgtctcaggaggaggtgaatcagagctagtctgtcacctttccaatctaagccgaagccacaggtgcctgacaggttcccttctaacaactatttgaccaagagaggcaatcagggggttgtatactgcactggattcgccagagaagggaaaatttaattagtgaaaaggaaagaacactaggaaacatttgagaacctgcctctatcccagaatgtgctggagatttgacactcaaatcagtgtttagtcttctgcttggcaccatagcttaacctgcagtttcttcaaaatgcccaatgccttgtttcctattaccttagattgcaaaccagtctagggaagtctatgagaaagtagcatttaattaaagtttaaaaaaaaaaaggttgggcgttgtggctcatgcctgtaatcccagcactttgggaggctgaggcgggtggatcactaggtcaggagttcaagaccagcctggccaacatggtgaaaccctgtctgtactaaaaatacaaaaattagctgagcatggtggcgtgtgcctgtaatctcagctactcaggaggctgaggcaggagaatcgcttgaacccaggaggcggaggctgcagtgagctgagattgtgccactgcactccagcctgggagacagagcaagac

SEQ ID NO: 65611 - DNA, 553 bp, Homo sapiens
gtctgcctatctgaggacctgtaccccgatatcaatgtcatcactggcatcctcaaggattatcttcgagagttgcccaccccactcatcacccagcccctgtataaggtggtactggaggccatggcccgggaccccccaaacagagttccccccaccactgagggcacccgagggctcctcagctgcctgccagatgtggaaagggccacgctgacgcttctcctggaccacctgcgcctcgtctcctccttccatgcctacaaccgcatgaccccacagaacttggccgtgtgcttcgggcctgtgctgctgccggcacgccaggcgcccacaaggcctcgtgcccgcagctccggcccaggccttgccagtgcagtggacttcaagcaccacatcgaggtgctgcactacctgctgcagtcttggccagatccccgcctgccccgacaatctccagatgtcgcgccttacttgcgacccaaacgacagccacctctgcacctgcccttcagggagatgggggtcattaaaggaaactgaacattgaaaa

SEQ ID NO: 65612 - DNA, 1264 bp, Homo sapiens
cggcacgaggaagatttaggtaatctctgggaaaacacaagatttacagactgcagttttttcgtgagaggacaagaatttaaagctcataaatctgtgcttgcagctcgatctccagtttttaacgccatgtttgaacatgaaatggaagaaagcaaaaagaatcgagtggaaataaatgatttagaccctgaagtttttaaagaaatgatgagattcatttacacagggagagcaccaaaccttgacaaaatggctgacaacttgttggcagctgcagacaaatatgcactggaacggctgaaggtcatgtgcgaaaaagctttgtgtagtaacctctcagtagagaatgttgcagatacccttgtccttgcagatttgcacagtggcagaacagttgaaagcacaagccatagactttattaataggtgcagtgtacttcgacaacttgggtgtaaagatgggaaaaactggaacagcaaccaagcaaccgacataatggaaacatcaggggggaagtccatgattcagtctcaccctcatttagtagcagaagcctttcgagcactagcatctgcacagggtccacagtttggcattccacgcaaacggctaaaacagtcctgaaatcttccatgaacagttgaaaaatggaattgactttcactcctccaggtccagaaggattctaatacacaaaccataagcaagagttgtttctgttattttgtccacagaacagaagctgaaaaagcatattgcttgcatttcaggtggataatttatggtttattcttcagctttaaattagactgattaattcacttcaaggccttaaattatcttcaatgacttctcttgttcatataatactttaatttttttttattgtgccttgtcattttgaccaaggctatgcaggattgcactagctccataatgcagtaatattgataactgaagatactaagtttcaaaaggatcttccattattttgcaaaaagaaaaatgaattttatagggtttgtcctatgctatctcaaagtttaagttctctttaaaagcacttgtattggagattaccagtaatatctccaatctaagttctataaatatgggagaaccctcttaccttcaaggtaagttatggcaatacactgcttcaattctaatttatttttcatttcagggggcaaatatgcaatgagttggcctagatttttagtgacatttatgatgtttgtcttgtatgttaactgtcca

SEQ ID NO: 65613 - DNA, 1455 bp, Homo sapiens
atgaaagtattatctgaaggacagttaaagctttgtgttgttcaaccagtacatctcacttcatggctccttatattttttattctaaagtctatctcttgtctaaaacctgctcgacttccaatttatcaaaggaaaccttttatagctgcttggaatgctccaacagatcagtgtttgataaaatataatttaagactaaatttgaaaatgtttcctgtgattggaagcccactggccaaggccagggggcaaaatgtcactatattttatgtcaacagattggggatactatccgtggtatacatcacaaggggtccccattaatgggaggtctcccacagaacataagttttacaagtacatctgggaaaaagcttgaccaaggtattaattatttacatccccgctggaggatttcagtggacttgctgttatagattgggaatattggagaccacagtgggcccggaactggaactcaaaagatgtttacagacagaagtcaagaaagcttatttccgatatgggaaagaatgtatcagctaccgatattgaatatttagccaaagtgacctttgaagaaagtgcaaaagctttcatgaaggaaaccatcaaattgggaattaagagccgacccaaaggcctttggggttattatttatatcctgattgccacaattataacgtttatgccccaaactactctgggtcatgcccagaagacgaagtcttgaggaacaatgagctctcttggctctggaacagcagtgctgctttatatccttctatcggtgtctggaaatcccttggagacagtgaaaacattttgcgcttctccaaatttcgggtgcatgaatccatgaggatctccaccatgacatctcatgattatgctctgcctgtatttgtctacacaaggctaggggtacagagatgaaccttttatttttccttttctaagcaagatctagtcagcaccataggagaaagtgctgccttgggagctgcaggcattggttaatttggggagacatgaatttaactgcatccaaggccaactgtacaaaggtgaagcagtttgtgagttctgatttagggagctacatagccaatgtgaccagagctgctgaggtatgcagccttcacctctgcaggaacaatggcaggtgcataaggaagatgtggaacgcgcccagttaccttcacttgaaccctgcaagttaccacatagaggcctctgaggacggggagtttactgtgaaaggaaaagcatctgatacagacctggcagtgatggcagatacattttcctgtcattgttatcagggatatgaaggagctgattgcagagaaataaagacggctgatggctgctctggggtttccccttctcctggttcactaatgacactttgtctactgcttttagcaagttatcgaagcattcagttg

SEQ ID NO: 65614 - DNA, 1296 bp, Homo sapiens
  misc_feature (1)...(1296): n = a,t,c or g
ttttttttttttgggaatgctctcacctttatttctctcaatatacccgtgatacagatatttcatatgtaacaaagataaggatgtgtgcaggtataaaacagaggcagaatcatggctaaaacatctagcccagcaatgaactcattatccctgaggggtaaggggcgggggaggagaggagtcacaggcagttcacccacacctgggaaaatcgatgacttcatggagaatgaatgactcggggggattcagatcatgaagtcatgagaagaaaggcctttcttcccagggatgatgtttctcagtatcaataatcagttgtcgggtttttttcttctatttcttccagcagcttaattgaagttccatcaattnaaagtccatctattttcaaacctgagtgtcccggagggtgcccactggaacatgtcaaggtttcaaaacagcatcttcactcccactagaaccccaagggattctgaccccaggtccagagtgacgaggctctgggttgcagctgagggcagagcagaggtcttcacaactgaacggagggatggaacatccccacaaccacagacatctcaagttgcacagtggtttcctcaaagcctcacacaggaacttcattcccttaactcctatgtgattcagccccagatccaaacacaacaggcttgatttttcttggagaagctttgtgagatcgcagcagccatcgctagttatgtcgcagttccaaagcaccaaggtctgcagtttacactcggggtacctcaagccctcacacagaaacttcacccctgtattcccaatggggttcttggccaagcacaggtgtgtcagctcccggctgacaaccaacacagcagcaaggtccttgcaattggcttctgtaaggtgacagttttccaacgacaacctctgcagaaagcacttggggtgtctcaaagttgtgtacagcaacttagcaccctcatccagaagctcattgtcggagaggtttacgcacgtcagggactggttgacttcaagggccaaggagagatcagcccactgctgagtggtagcggaacaagacaccaacccgagatatcgcaggttacattctggatgtctcaagacctcacacaatgcgggaaacatatcatcctggtcattgccttgaagggtcagatacgttacagtcttgtgacctcgaagagctaggcagaggttccgatgagcatcagctggggaaatgtttttgaacaccactctctggagatgacaggtgtcagaggctatttgttc

SEQ ID NO: 65615 - DNA, 672 bp, Homo sapiens
ttttttttttttgtggtaaacaaaagctttattattttttctttcattaaaaaaatggagcactgaagagaaacagagtttggacccctgggttcaccccacactaagcaaaatagccccagataaagatggcgcagctcacgcagaaaatgaggttgacgtccaggagggtcttcaccaaggggttttcttccagggaaactatgatggcttctgctctggccgggagctcttccttgcccttctcctgtattccacagagccacaggatggccttcaccactttggactgctttggggtcatgtcacagctgtgggttttagacgtgttttcttgaaccatctcgaactggacgctgctgctgctgctggcctctggcatcccgttctgagagagggtaagagacaagggagctgctggtggtgcttgttccttctggaccacggggtcgtgacgagtaaaccaggtcaggtggctgaccatctccttggagggtggctctgtgaaccagctcacggtggagacagtgatgagggtgaccgtggacaggatcatggagaagtagaggtagtgaatgctcttcaccaggaccgggcgctcatctggctggtcgcatcgaggctgcacgtaaataaagtccaggaccagcctaaccaaggcccaggagcagg

SEQ ID NO: 65616 - DNA, 908 bp, Homo sapiens
cgcgcccgacccacgcgtccgttttaatcacacctcaatctgttgtagtcataagagtaattatattgatgagaagccaaattaaaattaaaaatgtggcaaagacttccaattctagtcagttcttaatgtaattcctactgaagaaaacacctggaaatacaaaaaatgtggcaaaacttgtaaccaatgcttagcatttttgcacatgatagtatttatatgtgagactacttgtacaaacataaaaatatacaaaagctattgtctacttgaaatttatagttaataaaagcattataaatgtaatttctgttgaaagaccttttagaaaatataggccattaaagtgaagaatagtcttaagacagagaatacaaagataaagagggctctagtacctgtacttgtatcccagaacttactatatgcattttgtactagaggaaaactctgaagcagttgcttaaactttgttcaacatcagagaatttatattggagagaaatcctacaaatgtaataaatgtggaaaaacctctgttcagaaactgcaggttaagaaaccagaggccaggcgcggtggctcacgcctgtaatcccaacactttgggaggccaaggagggtggatcacctgaggtcgggagttcaaggacagcctgaccaatatggagaaacctcgtctgtactaaaaatacaaaaattagcaggacatggtggtgcatggctgtaatcccagctactcaggaggctgagacaggagaatggcttgaacccaggaggtggaggttgcggtgagctgagatcgtgccattgcactccagcctgggtaacaagagtgaaactctgtctcaaaacaagataaaaagaaaagaaacaccagagaatttttactagaatataatttg

SEQ ID NO: 65617 - DNA, 1091 bp, Homo sapiens
ttttttttttttgcaagttataaaatgtttattgatatacattttgtcttttataaaacttccgttggccacattgggccactgtgcaccacagtgccagtccccaggtggccagggcggagccagtgtccactttcgggtgggggctggagccaagaggctgtccaggagctgcccagtgggtcctcatggcctgcgggatacctcaagtgctcccggaggcagcctaggactggctcgtcccggagtcagaaaaggcaggtcaactacccaaggcggccaaaggcccttcctgtctccagagccttgacataaccagaaatccccccatcaaagtcaccaaatgactcgacggggggaagggaggttgtttgcagaaagacttagctacaaggcatgtgaaccagaactttcttccagacaccatttccttcacatttgctcactgataatgccttaagaggatcgaatctctggaacagccctgaatggcagggatgaggctgctggcctggtgctggctgggacacagtcaaggagggctgacccaagaggcagaggtggctaggctgggtgttgacctcctctcttttaccaaccagcctagggcaaggaggggccccaccacctgggggcaacttctgtacaagaggtctctaggggagcagaatgggtgggggagccgggcaggggccacagggtctgtttgctggtggctgcccagtctcccagccacccctggagtccccagcccagggagaaggaggcccgaggagaggaaacagatctttcttctcctgtatggactcagaagcaggtgcccattcctgtcccaaggcgaagggtcttggaggccgcttcctgcccctgcctcctccaggcgctggagtctcaggaggcgttccccgggggacactgcatctccatggtgactgtgttgggcgtgctgcccccggcctcccccagctcagcgccgtcccgcaaggcccgctgggaagacaccctgagccgctcccaacagccgttgggctttgtcccttccgggccagaaggtaaccgttggggctggcgctggttggtgtgcagatgca

SEQ ID NO: 65618 - DNA, 2001 bp, Homo sapiens
  misc_feature (1)...(2001): n = a,t,c or g
cagcgtggcggaattcctggaaagttccaggaagactctgggtctgtggactgggctctggggccattttggggaattttccaggctgattttggctgtatgcgattttatctttctgcacagacatcagaccctgtcctcaggatgtgatggggcccctcccccatctcccatcctaccagcctgtgtccaggtgggggtggggcagggcagacaacagggtccctgtgtctcgggcagcaatgctgccccctttcctgccccaacatccccagcagacacaagagatggagactatgagctgctctcgtggctgggtctcgggggtcctgcaccctcaggagctgacgctgacgcactccactgcctgtcaccaggaacctacctcgcgccatcttcatctccatcccactggtgaccttcgtgtacacgttcaccaacattgcctacttcacggccatgtccccccaggagctgctctcctccaatgcgggggctgtgaccttcggggagaagctgctgggctacttttcttgggtcatgcctgtctccgtggctctgtcaaccttcggagggatcaatggttacctgttcacctactccaggctgtgcttctctggagcccgcgaggggcacctgcccagcctgctggccatgatccacgtcagacactgcacccccatccccgccctcctcgtctgtgcccatcaaggtgaaccttctcatccccgtggcgtacttggtcttctgggccttcctgctggtcttcagcttcatctcagagcatatggtctgtggggtcggcgtcatcatcatccttacgggggtgcccattttctttctgggagtgttctggagaagcaaaccaaagtgtgtgcacagactcacagagtccatgacacactggggccaggagctgtgtttcgtggtctacccccaggacgcccccgaagaggaggagaatggcccctgcccaccctccctgctgcctgccacagacaagccctcgaagccacaatgagatttttgtagagactgaagcagttgtttctgtttacatgttgtttattgaggaggtgttttggcaaaaaagttttgttttgtttttttctggaaaaaaaagaaaaaagatacgactctcagaagcctgttttaaggaagccctaaaatgtggactgggtttcctgtcttagcactgccctgctagctcttcctgaaaaggcctataaataaacagggctggctgttcgctcgtgctatggggagtccctgatgggcacagacgggagtggctggggcgtacctcggtgggtgcacacatgttgctggccaggaagatgccgtggcaggccctggaggaggctcttgacattagggggctttgctgcttgacacaggcgctccctaccatggcacccagagtccccctgccctaaagggatgtcgaggatggggtagcagctcagtccgcccctaccccaggcccctcgatgccagtctgagctcggccacccaggagagctcaggggctccaggctgggattgtctttcttcccgtaaatcaccacagagtgaaggtcaggacttcagagcccacagtctcaccctggcttacaggtggggaaaccgaggccctgagataggatggaacagacgtggccactgctgttggtgcctcggcctctctgtccccagaaagcacagagcagcatgtcctgggggctttgaggcctgcagggaactccaggggcttcatgtacagcaggcacacaccccagcccttccacggtgcccaggagattggaccttcagggagggcaaagggcgcctgcctggccaggggcatgagggtttggcaggagccacccaacccaggtcctccagaggccttgctggacaggaagagggtgaggcgtgagcaaaatagtcaccacggatgagacccagcgtcccgaattcctccacatggactagtgatgtcgaacaaannnnnttgtccta

SEQ ID NO: 65619 - DNA, 1118 bp, Homo sapiens
attctatcccggtccacagtttaggaaccatggacaaaagtccaaggaccagaggcatggagttttcattagaaggttctgaattcatctaatggctggttatttttacagatgccaagtttacaaaacatacaagtgcacagacaggtgtgggaggtagctcgaaacatacagagtgttcgcaacactagagacgtcttctggctgccatcaggggactcggaggtagggtaggcttggtgaggcccgtggcttgtgtccgtggcacagcctcctgcaaaggggctgccctgctcccctgttcccatggtgccaggccgtgctccccaggtgcctccggggtgctgaagatcttttcatagtactcgatcagcagttcagtgaacatgttcaggggcacaagggcactcagggaggagaccccctgggatggccagatcaaattcagcccgaagacacaggccaggttagagctgttcattttgttgaagatgctctcccgggacaccgcatgcaggaagcccatgaggtagcggaggacgacgtagttgtgctctgggaggctccgtaagatctggcggcagccagtgacacgcaggctgctctccacacaggtgatcccaagaatctgctcgtaggcctggaaggtcagaagcggctggggcagctctcgcaggaaggtcttcaggatcacggcagggatgtgaatgtccccgtagtcgtcaaagttcacgggcttccccttggttgtagagcctctggatctcgcggacggtctgcacgctggcggatctccggaacaggccctcggtgcgcaggcactattgcagactgacgccaaactgctgtgtgggcagcgggggccgcggcggtggtgtcttggtgggaggcggcgtccggccctcgtgcaggctctggagcttctcatcgtccgcaaaacttcgggagggatgaccagctggtcgtatttaaggtgttcgtggagctcactcaggtagttgaaatagatgactttcttcccaaacttgtgctgatgaggggcttcaagatgttccacaggaccttgatgaagctggtggggtgcaccacgtagagggccttcaagttcttcttgtacc

SEQ ID NO: 65620 - DNA, 897 bp, Homo sapiens
gcgtacctctgccctttgctgccctgtttctcctcctccccacaggccgcaacaccctggcccagcctcccattccctgctggacgccctctccccaggccgcacagggctggttcctccgaggcacctggcttccagtgatggacctctggccctgccccaacctgcgcacttggggcctgacaggcgttccccgattcatccctccaggaacaagaaaaccaaacactgcatttcctgcaataagtgtgtgtccggcttcgaccaccactgcaaatggatcaacaactgcgtgggaagccggaattattggttcttcttcagcactgtggcctcagccacagctggcatgctctgcctgatcgccatcctgctgtatgtcctcatccagtacctcgtgaaccccggggtgctccgcacggaccccaggtatgaagcagcgccaggaccctgaccaggaggacctgggccagagaagcccctcggggtgcaggacaagactgccagtctcagccccaggcatggctgcacccgcactgcacacggcccgggtggcgagacagggaggacttgcctgcccttgttccagaacattccggagccaacacggtgtgacatttttttcaaggatgagctttgccagctccacgtggaagtccctaaaactcctccttccacttcgaagcgtgactgatgcctccagggcctcacagccgcttctgaagcacttcctgaaagccagctccaccctggcgaggccctgacctcagcggacccaagcccaggacgatgcctgttgcgttcttctccccctgtagcaagtcaccttccccagcagcctccatgttgtctgggctctccctgtgggggatgccaggggagagtgagagagcacag

SEQ ID NO: 65621 - DNA, 1093 bp, Homo sapiens
gcccccgctgctgcggttccagcgggtcctgtgcgggccgcccagccgggagggggtcccgggaggggtcggctctcctggtgctgatgatggcagagccttacagggacttccccgctgagcaaggtccccaggcagcagggtggttagcggcgtggggctgcctatcaccctgctgtcgtcggcgctgggcgggccccacaggctgctggagtagctggggcaccccgccccacagcagctcactgctccccttgccacccaggcacggggcgttccagtggccagcgtcgctgcgtaccaggccatgggagctgcccgctgcgctgagccgcggctggctggacgcgctgctggactgccagctggaagtgggtggcagcgcctggccttgggctaagaagcgattcacttcttcttcaccagcgaactcggccaggatggtagtgtttcccaggacgcacatgtgcagagacttctggggccttggcagcctcctccttggagctgtaccggaccacagcattgccttgagtcagattcaggtggaatgtgataagaggcccatgttgcaaacacaatgtccgcagtgtagaaccatcaatctggggagtgaggtttcgaagaacgagccagctgctggttcttcctgaggtgtcggtgctccaggcagaacccgaggagtaggagctggtccagccgagggggctggcaccccaggtggaggagggcttgggattggttaaccctggaggtggcctcgtgggtgcagtactgtttctgggcaccttccatagttcatgagacagagaggcttgcgtgtgggaggtagggccagaggaccacgtcgatttgatgtctgacagtttacctagaaaggcagagagatggagcatatgcagtcttgagacaaagaagaaaactcactgctgtgtttggggagccacacagagtgctctctaacaccagcagactgtgtgataggcaaagaaacaccaagtcaagcccctggcaaactcaagtaaccacaaattcccagaagtgttttgcctctaagttttcaaaaccttgcagagcccctgtcttgacgaaa

SEQ ID NO: 65622 - DNA, 7150 bp, Homo sapiens
  misc_feature (1)...(7150): n = a,t,c or g
gaattccagagggcccgccctttcggcagaacacacctcttctttggtgccttctctgcatatcaccacactgggtcaagagcaagccatcctttctggggcggttcccgcatcaccatcaactgggacagccgactttccctccatacttactttcctccagcccacagagaatcatgcctccccatctcctgtgccagaaatgcccactcttccagcagagggcagtgatgggtcccctcctgcaactagagacttgctcctctcaagcaaagttcctaatcttctttccacatcttggacatttccccggtggaaaaaggacagtgtgacagccattttagggaagaatgaagaggcaaatgtgacgattcctctccaggcctttccaaggaaagaggttttgagtcttcacactgtaaatggatttgtctctgatttcagcaccggtagtgtctcatctcccatcattacagcaccaaggacgaatccccttccttcaggaccacctctaccttccatactctccatacaagccacccagactgttttcccatctctcttggctttttccagcaccaagccagaggtttatgcagctgctgtggaccattctgggttgccagcttcagctcccaaacaggtgagagcatcgccctcctccatggatgtatatgattccttaacaataggagacatgaaaaagccagcaaccacagatgttttctggagttctctttcagcagaaactggatctctttccacagaatcaataatatctggcttgcagcagcaaacaaattatgatttaaatggacacacaattagcaccacaagttgggaaactcatttagctccaacagctcctcccaatggtttaacttcagctgccgatgccataaaatctcaggatttcaaagatactgctgggcattcagtgactgcagaagggtttagtattcaggatctagtcctcggtacaagcattgagcagcctgtgcaacagtcagacatgaccatggttggaagccatatagacctctggcccacaagcaataacaaccattccagagacttccaaacagctgaagttgcatattactcacccacaactcgacattccgtgtctcatcctcagctacagttgcccaaccagccagcacatcctcttttgctaacctcaccaggaccaacttctacaggtagcttgcaggaaatgctttcagatggaacagatacaggttctgaaatttccagtgacatcaattcatcacctgagagaaatgcttccacaccattccagaacatcttgggatatcactctgctgctgaatcttctatatcgaccagtgtctttcccaggacctcctccagagtgctgcgggcttctcagcaccccaagaaatggacagcggacacagtatcatctaaggtacagccaacagcagcagctgccgtcacattgtttctgaggaaatcaagtccacctgcactgtctgcagccctggttgctaagggcaccagcagcagccctttggccgtggcctcaggaccagctaagagcagttcgatgactactcttgctaaaaatgtcacaaacaaggccgcatctggcccaaagaggacaccaggggcagtccatacagccttcccattcacaccaacctacatgtatgcaagaacaggacataccacgagcacacatacagccatgcaaggaaacatggacactgcctctggcctgttgtctacaacttacctccccaggaaaccacaagccatgcacaccggcctcccaaaccccaccaacctggagatgcccagagcatccacgccacgcccactgacagtcacggccgcgctgacatccattacagcctcagtgaaggccacccggttgccaccattgcgagcagaaaacacagatgctgtccttcctgctgcatcggctgcagtggtcacgactggcaaaatggcatccaacctggagtgtcagatgtccagtaagctcctggtgaagacagttctctttctcacccaaaggagagtgcagatcagtgaatccttgaagttcagtatcgccaaagggctcacacaggcattgcggaaggctttccaccagaacgatgtctcagctcacgtggacattctggaatattctcataatgtcacagttggttattatgctaccaaagggaagttggtgtatttgcctgctgtggtgatcgaaatgctgggtgtgtatggagtcagcaacgtcactgcagacctgaagcaacacaccccacacttacagtctgtggcagtacttgcctccccatggaatccccagcctgcaggctacttccagctaaaaacagtgctgcagtttgtgagccaagcggacaacatacagtcctgcaagtttgctcagacaatggaacagaggctgcagaaggcattccaggatgccgagaggaaagtcctgaataccaaaagcaacttgacaattcagattgtgagcacgtccaatgcctcccaggcagtcaccttggtgtacgtcgtgggcaatcagagcacattcctcaacggcaccgtcgccagcagcctcctcagccagctctcggctgagctggtgggattctacctcacctatccgccgctaaccattgctgaaccactggaatatcccaaccttgacatatcagaaacaaccagagactattgggtaattacagtgctgcagggtgtggacaattcgctggtgggcctgcacaaccagagctttgcccgggtcatggagcagcgcctggcccagctattcatgatgtcccagcaacaaggccggcggtttaaacgggccaccaccctgggaagctacactgtgcagatggtgaagatgcagcgtgtcccaggcccgaaggacccagcggagctgacttactataccctgtacaacgggaagcctttgttggggaccgcagctgccaagatcctgagcaccattgattcccaaaggatggccttgacccttcatcacgttgtccttctgcaagctgaccccgtggtgaagaacccgcccaataacctgtggatcatcgctgcagtgctggcgcccattgccgtggtcacggtcatcatcatcatcatcactgccgtgctctgcaggaagaacaagaacgacttcaagcctgacaccatgataaacctgccgcagagagcaaagcctgtgcaaggctttgattatgccaagcaacacctgggccagcaaggggcagatgaggaggtcatccctgtgactcaggagacagtggttctcccactgcccattagagatgctcctcaggaaagagacgtcgctcaggatggaagcaccatcaagaccgccaaatccactgaaaccaggaagagcaggtcgcccagtgagaatggctctgtcatcagcaacgaatcagggaagcccagctcagggagacgctcaccccagaatgtaatggcacagcagaaagtgacaaaggaggaggcaaggaagagaaatgtgccagcgagtgacgaagaggagggagcggttctatttgacaactccagcaaggtggccgctgaaccctttgacacatcttctgggtctgtgcagctcattgccataaaacccacagccctccccatggtgccccccacctcggacaggagccaggagtcatcggcagtcctcaacggcgaggtgaacaaagccctgaagcagaagtcagacatcgagcactatcggaacaagctgcgcctcaaagccaagaggaagggatattacgacttccctgcagtggagacgagcaagggtctgaccgaaagaaagaagatgtatgaaaaagccccgaaggaaatggagcatgttttggatccagattcagaactctgtgctccattcaccgagtctaaaaacaggcaacagatgaagaactctgtctacagaagccggcagtctctgaacagcccgagtccaggggaaaccgagatggaccttctggtgactcgggagcgaccccggcgtggaatccgcaacagcggatacgatactgagcctgaaatcatagaggaaaccaacattgacagagttcctgagccccggggctattccaggtctcgacaggtgaaaggccactcggagacctccacactgagctcccagccatccatcgacgaggtcaggcagcagatgcacatgctgctggaggaggccttcagcctggcatccgcgggccacgcaggccagagccggcaccaagaggcctacggctcagcccagcacctgccctattcggaggtggtgaccagcgctccggggaccatgacgcggcccagggccggggtgcagtgggtgccgacctaccgcccagaaatgtatcagtacagtctgccccggccggcttacaggttttcccagcttcctgagatggtcatgggctcaccgcctccacccgtacctccccggactggtcctgtggctgtcgcttctctcaggcgatccacctcagacatcggcagcaagaccagaatggccgagtctacagggcccgagccggcccagctgcacgacagcgcctccttcacgcagatgtccagaggccctgtgtccgtgacgcagttggatcagtcggctttaaattactcaggtaatacggtgccagcagtgttcgccatcccagctgccaacagacctggcttcaccggctacttcatcccaacgcctccctcatcctataggaaccaggcctggatgtcctatgcaggagagaatgagctcccgagccagtgggcagattcggtgcccctcccagggtacatcgaggcctacccccgatcacggtacccccagagctctccctccaggcttcctcgtcagtacagccagccagccaacctgcaccccagcctggagcaggccccggcgccctccacagcggcctcgcagcagagcctggcagaaaacgacccgtctgacgctcccctgaccaacatctccactgcggcccttgtgaaggccatccgggaggaggtggccaagctggccaaaaaacagacagacatgtttgagttccaggtctaacgccttagccctgtgggactctggacttccaaactctgaggactcagcctttgggtttcccatgcctacgtgttaggacttgagacatagcaatgggtgagtctttctcaccctccatttctgaaaaggtgaactatggggcttctgggaacaggaaactcttgaacgactagattcttggctcatccaactgattgtgggtcaagtccctggcttggggccttatgtttgatactctctcatgtcaaatgtttgaactttgggcatgtgccctatggaagcttagtcacaagaggcactagctaatctacagattcctatccaatgccacattttaataaatcaccggaagcgggagaatgtagctcttatcttcggtgacctctgcatgttaactctgtttctgtgttaaaggcaatgcaggagtgtggattaagcaccagactgtattctcattcaaccatgaccgtgcgcattaaaatcagtttgtaagggagacactgactccagccaagaaacctgagccccttttttttaggttcatattcaaagtcaaatgaactggatgaaagtcagtaccaatggctgtgcctataaatagacctgattctttgtttccctcgtcaattaaacaaaggccaagaaagagagaagatgagagggaatggtggatttgcgttgacagattttttaaaaggtgtttgccattttgggaattaaagtcccctacaagttaggatctaactgaaagagaatcggtgctaagagcttttaggatcctacaaaagaaacacagttatttgtgaaggtttttctttgccttgttttgaaggtggcctgagaatggagcttctctttttcttgggataatagatacatcaacttttacaagaaaatctctgtctcttcaacaatgatgtccagtgtgtgctgctgagtggtacaaaaggaaatagtacttgattcctgttagaaacaggagtggtagaaccacagtcttcccaggccgcagcctctgtttatagaagcttctgaatgtagaaaagctgttgaatttcatttaaatgtaaataaccttttaaaaagcgtatggagttagccagttccccctagttaatggacataggaagacatttgctgaaatggtagggtggccactttgtgaccatgatgttgcaagttgccctccctggcatggtgagttggcttccagagctgtgggtagaggacatcgcctcacggcactgaggcaccagccgctgcctacccatcaatgcaagcaaaacagctactgactttgtgtagcagggagattggggactctggttccctcgccaagtgtggcaagcctggtgcaagtgttggggggcttacttgggtatctgttgggagaattgaggtcctgtcctgcttttcacccccatgacccatctagccttcagcctgtatcccattttccttcctgaagcccccatccttcccattgtccctcaacgagtttcctttggcctttacctgaaagaagatagtagaaatttaaaagttgagagaagactagaaatggaactgattagaaggggaggttcaaactgtcaatgcacagacttttcaaagaagttgtttatattttcccaatggcaaactgccctttctggaatgttcagagatgatgtgtcatggaaccttcaaacaagtctcttgttcggatgataataggtagtgtccttttagtatgctggttgatctttcatagtgttagtgttttgttacttaaaaaggaaatcagcttataaataaaatgtatttttgtaattcccgtgtgtatatatggtatatttctatcaatggccagttgttgtagtccaaaacctaaatcagtttgcaaaacactgtggacagtgcgagattttattgacaggttaacacaatgcctacgtctatccacatagggcattcaatgcacttgaatgaaccaaaggagccaaagaaactcagcctgttcatgcaaatgggtatgagtctggataaaatcagctacattgtccnggctttatccantaattaatattt

SEQ ID NO: 65623 - DNA, 1651 bp, Homo sapiens
tgcggccgccctcgtggctgagtacctcgccctgctcgaggaccaccgccacctgcccgtgggctgcgtttccttccagaacatctcatccaatgtgctagaggagtccgccatctccgacgacatcctgtcgcccgacgaggagggcttctgctccgggaagcacttcactgagctggggctggtagggttgctggaacaggcagccggctacttcaccatgggcgggctctacgaggcggtgaatgaggtctacaagaacctcatccccatcctggaagcccaccgtgactacaagaagctggccgcggtgcacggcaaactgcaggaggccttcaccaagatcatgcaccagagttccggctgggagcgcgtgttcgggacgtatttccgcgtgggcttctacggcgcccacttcggtgacctggatgagcaggagtttgtgtacaaggagccatcgatcacgaagctggcagagatctcacaccggctggaggagttctacacggagagatttggcgacgacgtcgttgagattatcaaagactctaaccctgtggacaagtccaagcttgactcacaaaaggcctacatccagatcacgtatgtggaaccgtactttgatacctacgagctcaaggaccgggtgacctactttgaccgcaactatgggcttcgcacattcctgttctgcacgccgttcacgccggatgggcgcgcacacggggagctgcccgagcaacacaagcgtaagacgctgctcagcaccgaccacgccttcccctacatcaagactcgcatccgtgtgtgccaccgggaggagacggtgctgacgccagtggaggtggccatcgaggacatgcagaagaagacacgggagctggcctttgccaccgagcaggacccaccagatgctaagatgctacagatggtgcttcagggctctgtagggcccaccgtgaaccagggtcccctggaggtggcccaggtgtttttagcagagatcccggaagaccccaagctcttccggcatcacaacaaattgcggctctgcttcaaggacttctgcaaagaaatgtgaggatgcgctgcggaaaaataaggccctgattgggccggaccagaaggagtaccaccgtgagctggagcgcaactactgccgcctgcgggaggctctgcagcccctgcttacccagcgcctgccccagctgatggcacccaccccacccggcctcaggaactccttgaacagagcaagtttccgaaaggcagacctctgagcccacaaggaccaaagctgtacctagaggaaccagcacccgggcctcagctgtctgtgctgcgaggggagtctgccctggtgcccactgggctgtggggtgaccacactgtacttggggctgggccctctgcccctgtgtccccatctgtgtgcactgatgcttcctcccttttttaatttaaaatggtttttataagcaaaaaaaaaaaaaagggggggcccttttaaaggaaccaattttaacgcccgggggttgggaaggaaaaatttttttaagggggccccaaaattaaattccggggccggggtttaaaaacggggggaggggaaaaacccgggggttacccaatttaatccccttgggaaaag

SEQ ID NO: 65624 - DNA, 1790 bp, Homo sapiens
agtgaaatccatgttttatacttcagatgagaattgagctccgggccctaggcaagatctcagaaggagaggagctgactgtgtcctatattgacttcctcaacgttagtgaagaacgcaagaggcagctgaagaagcagtactactttgactgcacatgtgaacactgccagaaaaaactgaaggatgacctcttcctgggggtgaaagacaaccccaagccctctcaggaagtggtgaaggagatgatacaattctccaaggatacattggaaaagatagacaaggctcgttccgagggtttgtatcatgaggttgtgaaattatgccgggagtgcctggagaagcaggagccagtgtttgctgacaccaacatctacatgctgcggatgctgagcattgtttcggaggtcctttcctacctccaggcctttgaggaggcctcgttctatgccaggaggatggtggacggctatatgaagctctaccaccccaacaatgcccaactgggcatggccgtgatgcgggcagggctgaccaactggcacgctggtaacattgaggtggggcacgggatgatctgcaaagcctatgccattctcctggtgacacacggaccctcccaccccatcactaaggacttaaaggccatgcgggtgcagacggagatggagctacgcatgttccgccagaacgaattcatgtactacaagatgcgcgaggctgccctgaacaaccagcccatgcaggtcatggccgagcccagcaatgagccatccccagctctgttccacaagaagcaatgaggactgcccagtggaggaggggcgatgtggctggggagctagggagagactctggaggtggtgggtctctggggagacccctaatgaggaagttgaggtaatgcttaacattgttgctgtgagaatttactgccctgtgtttcccagagccattttggctcaattcaagtctattcaattcaagttaactctagcccagcccagatcaactcctcctacaaatattattggatgataggccctagaacccaataaaggagctccaaatgtcgttgggtggggaagcaaaatgtagagaaacatttaaagcacactgtaataataaatgcaattataaactatatggaggagggtgcagaggagcgaatgtgtctggtgtgtgatgtgtgtgtgtgcagtgggggtatcacagagagtatgacatctgagttgagggtagcaggtgcctggagtctcaggtggctgctcacccatctgtgcaggtgtctctggggctgctggtctcacctgtggtctgcagtagacacaattggctgagcaggatatgtgatactgtgtggttggtgtggagttttgaagaaggggctgtgtttgggccacgtaggctctactcagagacctgaaaccacttcagaatggtgcatatgtcgaaagagctggctgggggccttgcccaaaccaactgaggtcttaaagtccggggaaaaaaagtctgggttccaactagaattctagaaatatttctagaacacacagagagggaataagtccctctatcacccttattaccaagccttgtggttccctgtgattttagataatgtctgatatttttctggctatttgcctagtaggatttaaaaaatattttcaaagtgaagctgagagagaatcttggaaacacacatacctgttgatcatgggccctgcagaattggcccttgggggctttatttggttacgtgtgcctgggtggtctttacc

SEQ ID NO: 65625 - DNA, 1447 bp, Homo sapiens
atggtggagaagggccccgaggtctcagggaagcggagagggaggaacaacgcggccgcctccgcctccgccgccgccgcctccgccgccgcctcggccgcctgcgcctcgccagccgccactgccgcctcgggcgccgccgcctcctcagcctcggccgccgccgcctcagccgccgccgcccccaataatggccagaataaaagtttggcggcggcggcgcccaatggcaacagcagcagcaactcctgggaggaaggcagctcgggctcgtccagcgacgaggagcacggtggcggtggcatgagggtcggaccccagtaccaggcggtggtgcccgacttcgaccccgccaaactggcaagacgcagtcaagaacgggacaatcttggcatgttggtctggtcacccaatcaaaatctgtcagaagcaaagttggatgaatacattgccattgccaaagaaaagcatgggtacaacatggaacaggctcttgggatgctcttctggcataaacataatatcgaaaagtcattggctgatttgcccaactttacccctttcccagatgagtggactgtggaagataaagtcttatttgagcaagcctttagttttcatgggaaaacttttcatagaatccaacaaatgctttccagataaatctatagcaagtctggtgaaattttactattcttggaagaagacgaggactaaaactagtgtgatggatcgccatgcccggaaacaaaaacgggagcgggaggagagcgaggatgaactggaagaggcaaatggaaacaatcccattgacattgaggttgatcaaaacaaggaaagcaaaaaggaggttccccctactgagacagttcctcaggtcaaaaaagaaaaacatagcacacaagctaaaaatagagcaaaaaggaaacctccaaaaggaatgtttctttctcaagaagatgtggaggctgtttctgccaatgccactgctgctaccacggtgctgagacaactagacatggaattggtttcagtcaaacgacagatccagaatattaaacagacaaacagtgctctcaaagaaaaacttgatggtggaatagaaccatatcgacttccagaggtcattcagaaatgtaatgcacgttggactacagaagagcagcttctcgccgtacaagccatcaggaaatatggccgagattttcaggcaatctcagacgtgattgggaacaaatcagtggtacaagtgaaaaacttttttgtaaattatcgacgccgcttcaacatagatgaagttttacaagaatgggaggcagaacatggtaaagaagagaccaatgggcccagtaaccagaagcctgtgaagtccccagataattccattaagatgcccgaagaggaagacgaggctcctgttctggatgtcagatatgcatctgcctcc

SEQ ID NO: 65626 - DNA, 897 bp, Homo sapiens
tttccaggagaaactgccagcattgcccaaagacttggctttgatgtaggagccaagttcttttactcattgatttggtcacttactctgaataaactcaggtttctggattgcttaccaaataaagtgctttggcccactacctgaataaaggcaaacctgcaattgagtggagccctgatcttttgatggagagctgagcgtccatatacagcatgtgaaatagtggctgtttattgaaggtgttttgcatgtggctctgggctgcagactctaagttagatgtcttcagatgctttcaagcctttagcatttctcagatcctcacccacctgtcctgagtcggcatgtccgggactctctccacttctaccatgttcctagttactctccggcgtggagtctctgatgtctaacgaaggcagagctgcaccggaaggccttcccacactcgctgcattcgtagggtttcacgcctgtgtgggattctctgatgctgactaagggatgagctctggttaaacgctttaccacactcattacactcataaggtttttctccggtgtggattatatgatgccgaatgagggctgagctctcactgaagaatttcccacattcattacatttatatggcttctccccggtgtgggtcttttggtggattatgagattggtactctggctgaaggccttcccacactcgctgcacttgtagggtttctccccagtgtgagtcctctgatggtttgtgaggtttgcactctggctgaaggccttcccacacgcggcacatctgtagggcttctccccggtgtgaatcctctggtgctgaatgaacgctgcgcagtaactgaaggccttcccacactcgctgcacttgtagggcttctccc

SEQ ID NO: 65627 - DNA, 3788 bp, Homo sapiens
tttcgtgcgggctgcggggagctaagtccccagattggaggaggctggctctggtcttcgatgcacaggagtggccgttatggaacgcagcagcagcgtgcagggtcaaagacagccggccccccatgtcagtggtctaggatggccagtgaaggcaccaacatcccaagtcctgtggtgcgccagattgacaagcagtttctgatttgcagtatatgcctggaacggtacaagaatcccaaggttctcccctgtctgcacactttctgcgagaggtgcctgcagaactacattcctgcccacagtttaaccctctcctgcccagtgtgccgccagacctccatcctgcccgagaaaggggtggccgcgctccagaacaatttcttcatcacaaacctgatggacgtgctgcagcgaactccaggcagcaacgctgaggagtcttccatcctggagacagtcactgctgtggctgcgggaaagccttctctcttgcccaaaccacgatgggaatgtgatggaattttactgccagtcctgtgagactgccatgtgtcgggagtgcacggagggggagcacgcagagcaccccacagttccactcaaggatgtggtggaacagcacaaggcctcgctccaggtccagctggatgctgtcaacaaaaggctcccagaaatagattctgctcttcagttcatctctgaaatcattcatcagttaaccaaccaaaaggccagcatcgtggatgacattcattccacctttgatgagctccagaagcctttaaatgtgcgcaagagtgtgctgcttatggaattggaggtcaactatggcctcaaacacaaagtcctccagtcgcagctggatactcctgctccaggggcaggagagcattaagagctgcagcaacttcacagcgcaggccctcaaccatggcacggagaccgaggtcctactggtgaagaagcagatgagcgagaagctgaacgagctggccgaccaggacttccccttgcacccgcgggagaacgaccagctggatttcatcgtggaaaccgaggggctgaagaagtccatccacaacctcgggacaatcttaaccaccaacgccgttgcctcagagacagtggccacgggcgaggggctgcggcagaccatcatcgggcagcccatgtccgtcaccatcaccaccaaggacaaagacggtgagctgtgcaaaaccggcaacgcctacctcaccgccgaactgagcacccccgacgggagcgtggcagacggggagatcctggacaacaagaacggcacctatgagtttttgtacactgtccagaaggaaggggactttaccctgtctctgagactctatgaccagcacatccgaggcagcccgtttaagctgaaagtgatccgatccgctgatgtgtctcccaccacagaaggcgtgaagaggcgcgttaagtccccggggagcggccacgtcaagcagaaagctgtgaaaagacccgcaagcatgtacagcactggaaaacgaaaagagaatcccatcgaagacgatttgatctttcgagtgggtaccaaaggaagaaataaaggagagtttacaaatcttcagggggtagctgcatctacaaatggaaagatattaattgcagacagtaacaaccaatgtgtgcagatattttccaatgatggccagttcaaaagtcgttttggcatacggggacgctctccggggcagctgcagcggcccacaggagtggctgtacatcccagtggggacataatcattgccgattatgataataaatgggtcagcattttctcctccgatgggaaatttaagacaaaaattggatcaggaaagctgatgggacccaaaggagtttctgtggaccgcaatgggcacattattgttgtggacaacaaggcgtgctgcgtgtttatcttccagccaaacgggaaaatagtcaccaggtttggtagccgaggaaatggggacaggcagtttgcaggtccccattttgcagctgtaaatagcaataatgagattattattacagatttccataatcattctgtcaaggtgtttaatcaggaaggagaattcatgttgaagtttggctcaaatggagaaggaaatgggcagtttaatgctccaacaggtgtagcagtggattcaaatggaaacatcattgtggcccgactggggaaacagcaggatccaggttttttgatggtagtggatcatttttgtcctacattaacacatctgcttgacccactcctatggcccccaaggccttgggccctaacttcagatggtcatgttgtggttgcagactctggaaatcactgtttcaaagtctatcgatacttacagtaatggggggcagggggatacccgcttccatggtcttgcactataaactggaatggatttctcaatgcgggaccagattatgactagagtttttatgccagaaggaatcattggtgaactttccaaggttatttctgaatgtaacaatttccttaaaaatgacttatccaatttctgtatttcacctttagggttaaaaaaaactcttctactgaatctataaaaactgcagttttacatctgtgaactatggcttaagggacaggatttatgtagctaaactaattttgcaaatcaaacagacacttaaaaaaactagcatatgtaaaggtattcgttaatcctgtgaatggtagcttttgcacagaacttccaaaagcaaaacaaaaacaaaatctattgtagttatatacttcatttaacctaggtcacaagacccagggaatcttctaacctcacttttacagtaggtattactcttgtgacatttttttggttatcaacaactaaatataaattactttggaaaaagtaaggctgtcttgcaaaatgatcccagctctgattagcagccctctggagttcagaacttaagtatcagtgcaaatttctcaacctttctgggttagacaaagatccttttttgtgtgttcttttcaccacccctttggctcaccttgtatcagcaaacaaagtacttcttcagggaaacctgaaatttctaatgccttgaaaagcatattacaaaagtaatgctaccttttgggaaacaaactgccccgttaactccagatcattgcactggaatgtaatcaagaaagttagtcatgttttatgtaccatgttttcacacgtgtctcttctcttcgacttcctgaaagcgaaagctttacctcctgcaaatgtcagcacatgtagtaggacaccagtatcctaggacagagagccataagtagccctttggaggactgatggtgtcaaccaaaggcatgtgattgattaatgattcccccttagaaaagccaagtgtttacccaaagttgtgttatccttgaaagcatttacaggttaagggcatgttatggttatttatcattgtttaatgaatagtagaggtgtccaagggacctatgtatacatgattagggtaagatagaatgtattatatatatatatatatatacacacaccacatatatatagctgaatctttggtgtattgaaataggcagcactctgaaagacagaagcttcgtccagccactcttcagcacattcctttactaagcagtttaaagccgtcctagtggagcaagccctaaagcagatttaatttttgccattttccaagaatgacggtggtggcttttagtcagaaaatggccttctgtgctttcaaaaaaaaaa

SEQ ID NO: 65628 - DNA, 574 bp, Homo sapiens
tctggatcgaccagtcaggggacatcgagattgtgaaccataagaccaatgaccggtgccagctgaagttcctgccctacagctacttctccaaagaggcagcccggaaggtaagcaggaccagccacctctaagcaccccagggggcccagggcagagtctgcacctacgctggtcctgccaatgtccacaggtgacaggagtggtgagtgacagccagggcaaggcccattacgtgctgtccggctcgtgggatgaacaaatggagtgctccaaggtcatgcatagcagtcccagcagccccagctctgacgggaagcagaagacagtgtaccagaccctgtcagccaagctgctgtggaagaagtacccgctgccgtgagtagggctggcaggggccccgccacaggcaaaggagagggaaggaggtcagtggacagaaagcaactgacaggcacaggaggtcgggagggttcagtccacacatgggcagagaacagtattatgcagccgacatcccagtgtgaaggcagacaccgaacagtaaataaatgtgaacctatgtatgcaccaa

SEQ ID NO: 65629 - DNA, 3438 bp, Homo sapiens
gcgccggagttcccgaatgacgatctatggtcgcttcgccattcgcgctaagccatagtggaagatgtcaggcttcagaacctctagtaaagcagtattaacggccattacaccttcagcagcaatgccttcctcggccatggcggtgggatacggatgaagctgaatcttgaacgcacccaagcctccgcctccgcgcgactcggtggaggcggtggcggccaagcgggatacgggcggcgggagctggggaacaggcatggacgtttccgggcaagagaccgactggcggagcaccgccttccggcagaagctggtcagtcaaatcgaggatgccatgaggaaagctggtgtggcacacagtaaatccagcaaggatatggagagccatgttttcctgaaggccaagacccgggacgaatacctttctctcgtggccaggctcattatccattttcgagacattcataacaagaaatctcaagcttccgtcagtgatcctatgaatgcactccagagcctgactggcggacctgctgcgggagccgctggaattggcatgcctcctcggggcccgggacagtctctgggcgggatgggtagccttggtgccatgggacagccaatgtctctctcagggcagccgcctcctgggacctcggggatggcccctcacagcatggctgtcgtgtctacggcaactccacagacccagctgcagctccagcaggtggccgctgcagcagcagcagcaacagcacgcagttccagcagcagcagcaggcggcgctacagcagcagcagcagcagcagcaacagcaagcagttccaggctcagcagagtgccatgcagcaagcagttccaagcaagtagtgcagcagcagcagcagcttccagcagcagcagcagcagcagcagcatctaattaaattgcatcatcaaaatcagcaacagatacagcagcagcaacagcagctgcagcgaatagcacagctgcagctccaacaacagcaacagcagcagcagcagcagcagcagcagcagcagcaggctttgcaggcccagccaccaattcagcagccaccgatgcagcagccacagcctccgccctcccaggctctgccccagcagctgcagcagatgcatcacacacagcaccaccagccgccaccacagccccagcagcctccagttgctcagaaccaaccatcacaactcccgccacagtcgcagacccagcctttggtgtcacaggcgcaagctctccctggacaaatgttgtatacccaaccaccactgaaatttgtccgagctccgatggtggtgcagcagcccccagtgcagccccaggtgcagcagcagcagacagcagtacagacagctcaggctgcccagatggtggctcccggagtccaggtcagccagagcagcctccccatgctgtcctcgccgtcaccgggccagcaggtgcagaccccgcagtcgatgccccctcccccccagccgtccccgcagcccggccagcccagctcacagcccaactccaacgtcagctctggccctgccccatctcccagtagcttcctgcccagcccctcaccgcagccctttccagagcccagtgacggcgcggaccccacagaacttcagtgtcccctcacctggacctttaaacacacctgtgaaccccagctctgtcatgagcccagctggctccagccaggctgaggagcagcagtacctggacaagctgaagcagctgtcgaagtacatcgagcccctgcgccgcatgatcaacaagatcgacaagaacgaagacagaaaaaaggacctgagtaagatgaagagccttctggacattctgacagacccctcgaagcggtgtcccctgaagaccttgcaaaagtgtgagatcgccctggagaaactcaagaatgacatggcggtgcccactcccccaccgcccccggtgccaccgaccaaacagcagtacctatgccagccgctcctggatgccgtcctggccaacatccgctcacctgtcttcaaccattccctgtaccgcacattcgttccagccatgaccgccattcacggcccacccatcacggccccagtggtgtgcacccggaagcgcaggcttgaggatgatgagcggcagagcatccccagtgtgctccagggtgaggtggccaggctggaccccaagttcctggtaaacctggacccttctcactgcagcaacaatggcactgtccacctgatctgcaagctggatgacaaggacctcccaagtgtgccaccactggagctcagtgtgcccgctgactatcctgcccaaagcccgctgtggatagaccggcagtggcagtacgacgccaaccccttcctccagtcggtgcaccgctgcatgacctccaggctgctgcagctcccggacaagcactcggtcaccgccttgctcaacacctgggcccagagcgtccaccaggcctgcctctcagccgcctagccaagactgcagggatggcccgcagcctcatcggggccaaggacacacgcctcctgtcagacacttctaggtgttggcttccttagagagcctggggttaggttagctttcctgcttttatcttctgccttggggacctgccaaacgaaatcccacacctgtacagaactgggataggcgcagtggagcgggttgcttggggggcgttggccgacttcttagagaaggccctccatgtgacttcctcccaggagccagatgcgatcctcaggctgctctcaccgtggcctgtccacggtccaggtccatctcagcagcgtgagggtgcactcagggtgttgttagagcgtctcgtgtgtgctagacgcacccctactcgttcctatagaacacagaggacataggaaacccttaaaacacacatgggattctctggtcacagttttgggttcaggctatgctgctttgggcaggtggagcaccccccgaggaagcctgcaagtccagggcacaggctgccttttggagggagggctggcccataggtgctgctggctccccgccaccagctgggcctcagccctcacggcattcctgctgagcaccgtggggcacccagggagcaggggcgtcagggatcctgctgccggcacccctgtgccgctggcatgagggccgtgtccccactgtgaaggatgaagagcaaggccctcaggacccgtgtcctcagagcaccacacactgagcacccagagacagcgggcctggcagcgggccgggccatgcagggagcgcctccctatgttgcctgccactctgggcaccggccagcaccctctggtgagaagaggtcccccctttttatgtgcactaccccaccatctgtgattataataaatttattattcctgtgttaaaaaaaaaa

SEQ ID NO: 65630 - DNA, 783 bp, Homo sapiens
ttttttttttttaattatgaatgctcttttattaaataattatgacacaaatgacagccaaaatatttattattggttaatataccagtggaaaatctctgacctaaaacaaatttttgagccactggaaaagtgaactttctcacagaaatatttaatgttgtcaaaagaatactctgttttaacaataactccattaatttattactttaaaagatgcacagtgctgcttttacacattaaaatttcagtgacatcaacaacataactatatgttaatattttgaactaacatttcaaatgtagactgaccacatgtttgatttaaagcttaaagaatcaatgttcccttttgtgaagatggcttttgttgtcattagattctactgattttttaggaatagagctgctccacactgaatccactggtcttggttgcccccacatggaacatcaatattggtaaccacacgatccctttcagcacttgtgtaaacaggcaaagagatgcactcatccggagaatatggaccacatgcatcctgtggaatccagcccataaaacaagggagcactgatgacacgctgggagaatcaagctgattttcagaaagttgatttccatcaaaactacatccttctagtaacaagccactgatcttaatttgtagctttgcttcttgcagtcgacccttccatgaggctacaaattttaggctatccacagaacgacccacttgcccttgcagttttcttgcgaagagcatttaagaaatgtgttgg

SEQ ID NO: 65631 - DNA, 2098 bp, Homo sapiens
ggcacgaggaaacaactcatggtttggtccacgtcactataagaggcttacccaaaggaaacagaccagttatactaacatatcatgacattggcctcaaccataaatcctgtttcaatgcattctttaactttgaggatatgcaagagatcacccagcactttgctgtctgtcatgtggatgccccaggccagcaggaaggtgcaccctctttcccaacagggtatcagtaccccacaatggatgagctggctgaaatgctgcctcctgttcttacccacctaagcctgaaaagcatcattggaattggagttggagctggagcttacatcctcagcagatttgcactcaaccatccagagcttgtggaaggccttgtgctcattaatgttgacccttgcgctaaaggctggattgactgggcagcttccaaactctctggcctgacaaccaatgttgtggacattattttggctcatcactttgggcaggaagagttacaggccaacctggacctgatccaaacctacagaatgcatattgcccaagacatcaaccaagacaacctgcagctcttcttgaattcctacaatggacgcagagacctggagatcgaaagacccatactgggccaaaatgataacaaatcaaaaacattaaagtgttctactttactggtggtaggggacaattcgcctgcagttgaggctgtggtcgaatgcaattcccgcctgaaccctataaatacaactttgctaaagatggcggactgtgggggactgccccaggtagttcagcctgggaagctcaccgaggccttcaagtactttttgcagggaatgggctacatccccttggttctctgttacagtaccatctgccagcatgactcggctcgcccgatcacgaacccactcaacctcgagtagcctcggctctggagaaagtcccttcagccggtctgtcacccagcaatcagtcagatggaactcaagaatcctgtgagtcccctgatgtcctggacagacaccagaccatggaggtgtcctgctaagcagatgctcctcccctggaccattgcaagtccatccttcaaatgaccactccataatataacatttcatccagtaaactggcctctactatctttaactcatgcatggccactgaacctctctctagtagcctggatttatcattctctctgcctgcccacccccttttttgtatagcccaagaaccacttccatgccatactgtaacattccaacatctttagctgatcagatctctccatatcctctcttgccagctttttcccgtgctcccccaactatgtatcagataagattctttgatcccgactctgtgtgtgcgagcacgcgtgtctgtgtttgtgtgtgcatagttctgtggttttagacacgctttcttgtagtgcttctgcaaaaaacaaaaaagggacttattttgcattctcaatggtgtttttaagggaattaggcagaacagatttctagattgggtaggccactgcattctcttttgtttgcaaattggtcaacaaaatttgcaaagtgatttcaggagagagcagctttgaggaatgtggaaaatcataattgccgtctggaccattgattgattgtgaccagtagcagaagggtgcctgttacatagagaggctccttctgtccaaatgaatttctgtatactcttctataaataaaagggaggaatatattctgctggaagcccatgaaccatcgctgaggttctgatacaacatagagttttttccaaggagtgaatgtggtttaattactggactctcttagcacaggaaggtggaaacaaaatgccaggcctctgctctgaagagcaaaactgctgtcgctgcagtatctgataccagacatccacatatccacaagaagtgcctcttaggtctgtgacagagagtgtgtctccattcctcagttcccagaaaggggagaggtttggcctaaaaagcatgtagatgggggagaaatgggtggggggagaggaacagccattaacacagtatcatgtttaacaagtatagccttgatttcag

SEQ ID NO: 65632 - DNA, 2125 bp, Homo sapiens
atggccggcggcagcgacagcagcagcagcagccagtattcgggaaaggcagacagtggctttgaagcgtatgttgaatttcaatgtgcctcatattaaaaacagcacaggagaaccagtatggaaggtactcatttatgacagatttggccaagatataatctctcctctgctatctgtgagggagctaagagacatgggaatcactctgcatctgcttttacactctgatcgagatcctattccagatgttcctgcagtatactttgtaatgccaactgaagaaaatattgacagaatgtgccaggatcttcgaaatcaactatatgaatcatattatttaaattttatttctgctatttcaagaagtaaactggaagatattgcaaatgccagcgttcggggcctaagtgcaagtaacacaagtagccaaggtttggggaccaatatctcaattttattactttggaagatgatatgtttgtattatgtaatcaaaataaggagcttgtttcatatcgtgccattaacaggccagatatcacagacacggaaatggaaactgttatggacactatagttgacagcctcttctgcttttttgttactctgggtgctgttcctataatcagatgttcaagaggaacagcagcagaaatggtagcagtgaaactagacaagaaacttcgagaaaatctaagagatgcaagaaacagtctttttacaggtgatacacttggagctggccaattcagcttccagaggcccttattagtccttgttgacagaaacatagatttggcaactcctttacatcatacttggacatatcaagcattggtgcacgatgtactggatttccatttaaacagggttaatttggaagaatcttcaggagtggaaaactctccagctggtgctagaccaaagagaaaaaacaagaagtcttatgatttaactccggttgataaattttggcaaaaacataaaggaagtccattcccagaagttgcagaatcagttcagcaagaactagaatcttacagagcacaggaagatgaggtcaaacgacttaaaagcattatgggactagaaggggaagatgaaggagccataagtatgctttctgacaataccgctaagctaacatcagctgttagttctttgccagaactccttgagaaaaaaagacttattgatctccatacaaatgttgccactgctgttttagaacatataaaggcaagaaaattggatgtatattttgaatatgaagaaaaaataatgagcaaaactactctggataaatctcttctagatataatatcagaccctgatgcaggaactccagaagataaaatgaggttgtttcttatctattatataagcacacagcaagcaccttctgaggctgatttggagcaatataaaaaagctttaactgatgcaggatgcaaccttaatcctttacaatatatcaaacagtggaaggcttttaccaagatggcctcagctccggccagctatggcagcactaccactaaaccaatgggtcttttatcacgagtcatgaatacaggatcacagtttgtgatggaaggagtgaagaacctggttttgaaacagcaaaatctacctgttactcgtattttggacaatcttatggagatgaagtcaaaccccgaaactgatgactatagatattttgatcccaaaatgctgcggggcaatgacagctcagttcccagaaataaaaatccattccaagaggccattgtttttgtggtgggaggaggcaactacattgaatatcagaatcttgttgactacataaaggggaaacaaggcaaacacattttatatggctgcagtgagctttttaatgctacacagttcataaaacagttgtcacaacttggacaaaagtaacacagaagaaccttactatgataatctacttggaatgtggataaatgtaaaaagaagaaaagttagaagagcaatatgtttccttctctgtaacagtgtcctaacagtgaaaatcagagttatttgttaatttttaaggaaattatatacttaatatgtattgattaaaagaaacatttcagaaataaaaaaaaaa

SEQ ID NO: 65633 - DNA, 1693 bp, Homo sapiens
ttttttttttttgaagtaaagagaagttgactttattaacagcaaaggtttgggggtggggaacaaacaagtgaaaggctcacaaacagaccactagaaaagtgctttgctgctcacaataatggtgtctgaacccagccctgaatgccctgggactcagtcactgtcactatcagcttcactggaatcagaagctgcagcttcactggccattctcctgggccgaatgctcgctgccactggggaagggactggcgctgcggctgtggctccggctccgctggccacccccattgctgccgctgtctgaatcattgtcactgccaccttgggcctgtcctctgtcctcatcatcagagtcggcatcgtcctcagaatcagcatcactgccaaagatctcctctttgtcacgggcagcccgggcctcatcctcgctgctctcgtcctcaccaattgccactcttgtcactggcctcgtccctgtcaccttcctcccgttcactctcgctgcccgagtgctcatcttcactgccctccttctcactgctgctgcccttctcctgctcctcatctgagcccccagcttctttctcttctgtctccatctcctcttcctcttcctcctccggttcgtggttttctagctgggccttccgtgcctcctgaggcttccagttccttctcattcatgtcccgatgtttgaccacaagccaaggcgttggtgcctgactgaaccccagccttggcccggcgcttactaaggcggaccagatccaggctaatcagataggagtgtgctgagtacctggtttccaactcattgtagtaaaccccgtcaccctctcggaagatgaagaagtagttttcctcatagcccttgctagctttgttcttcacgttccagttgtactcccgagcaattttgtagtcatacacatcatctggtgcatagtccatctcctcctcctggtcccgctttcgtttcttcaacgtctcttctacaggcaggaaataggccacaaactggttcccttcctcatccatcatgcccctaatcatggcctgagacatcatctccaacgcagctgcaccactcgtgtccttgggggctgggtctgagtcaaagatcacctgagcacatggattgatccacattgatttctgggcatcctcaaaagtcttctcaatggctgtgatctggctatccctgtctttgtatatttcttcctcggtaaactgctgcttcacagaaaccccaatcttgacctcaggcttctcattggagatgccataacggttgaactcagtggagatgtactctgtctttcgcatccatggcaccaccttcgcgtgctgctgggatctcttggagctggtgggggcctgaatctcctcttccaaaagtttctcatcagctggatctagaagaacattggggtcgatgcggtaggtgtcaggattgatgagatcgatggtgacccccaggtctggctcagtcaggaggtcatgtttgtgctgtttctccaaggaagtggctttgtactggacgaacctgttctggtcgaaggggtaggtgatgaacttggggtcgaaggggatatcagggaggctattgcagtacttgactcggcagaccactccagacctgtggccatcctcccgctgggcctgggtctggatggtgggcgccat

SEQ ID NO: 65634 - DNA, 1231 bp, Homo sapiens
  misc_feature (1)...(1231): n = a,t,c or g
agcaatggagatgggtcttgaggttccagaatctgagatcaatcacctcttttgtatttttttcaaatgtcaccttttcagggccgggcatagtggctcacgcctgtaatcccagcactttgggaggtcgaggcgggtggatcacctgaggtgctggcattgtaggtgtgagccaccacgcttggccacattttgcttaattaaaatgaatcaaattagacactgcagtgtacttgttatctaggtccaagaatcattaaaaacctttgtttcttttatatatacacatacatatctcaaaacatagttatttttactttttaagttatataaataatatacattttcaatataggaaaatgggaagatacagataagcagtggtcttatatatatccttgcagctttttcccttcggacatacatattttgttacagtaattcctgcatctcaaaaataatacaaaaagtgaaaataagtttagaccagccttaaccttagctcaggtgctaatttatatataaatctatgtgcattcatttcaattttgacttacaaaatctaaagtgatgctgttataatactaaaagattccactttaaacagcagcagtttcagaataattaaaaatttgattcaggcatgaggctgataaagaacgaagttttactttttttcattaaaataagtagctttctactattgcatcctttgaagagaagaatgttctgctggtttggccacaagctctttagatggttacttttagtaaactcttcattcatcctggcattcttgaaaatattcgtcaaacatagaggaagactcatcttcacgttcctttggttctttaaattctaggtcttctccatattgaatggcaaaatcaatatgctgcaatacaatgttcatgctttcttcatctgactgatcgtaaggtaaaaatcgaaccatgctgtagtcatcaatcagtccacatatagcgttagtcagtttcttgaattttttgcttcttaagtcacttgtagaatcttctaataaagaatacatgtctggatctaaaaatttctcaatttccttttttgcttttttactcagcagatccatttttgtcatgatgttgacttgcggaatttctagagagatcatgggcactcagggctgcccagatggccagaaataaacctggaatgactccaccatgaactgnggaatccaccaggaaaactc

SEQ ID NO: 65635 - DNA, 981 bp, Homo sapiens
  misc_feature (1)...(981): n = a,t,c or g
ttttttttttttactgggaaggctagttgtaaacataaacattctcactgaactactggccccccaaaacctaacctatctcacaatcaataatcatcttttgactataaaatcataaaaacttgtactctgtggctcttttgtctcgatgatttttcagagaaaaaaattagctgtgttaagtagtttcactgatttatccatcttgaatagctgccagttctggaacttcatacatcctcagaacgtcttcatagagcaaataattatgtaggcttctgggaagtggcagctgactaatataactgtcagaccgtagacgttctgattttagactggaccgaatttccaaacgacaaagatgggtcagggatggaacagtggcaatatgttgctgtagaatccaagcgtttgaggcacgagcagagagcatcctttcaacagctggtgcaagtgtcttccaattagtaaactccaaagtgaagataagggtgtcaatgctgactgagtcaatccaagaattgcacagtagaatcagtgggtcaaatccagcaaccagaagatgtggcaaccactccttatattttgcttgtgctttaattgcatgatttacaaattcatatatatggttccatggtcccaatgagcaacctttcctcaaaaagtagcgaaatatcgaaaacttctcgtacttcaggcagtatgccaaatgaagttcatttatctgggctccatatttcaaaagaatgttcacaattccaaagaactcacagctccactccttttggaaagccatgcacacaggagaactgaatccaaaaacaaggcacgcctgggcgtctgggctgtagccattccggagtaatatttnctaggcaatcttcatgtcccccaaacactgctgagtaaacagggcttactctcgtgcggnttccgacagggcggtctatnnaggggntcatgggggggggggggggggcg

SEQ ID NO: 65636 - DNA, 1274 bp, Homo sapiens
ttttttttttttactacaaactgtttaattgtttcttatcccaataactttacaaatatagaaccacatgctagtctgggggtgctgtgcagtgagtcactacaaactcgctcaggcacagcttaatgccgctgagatccatctaggagcagtcccagcggtggcctcagccacgtgaggaagagggctttggaggagggctgccaagtgtggccaggggacccggcctcaggtctgtggaggtgcttcaacagcacgatgctcattctctgtccgtagtgtctccatatactttctcatcttctccaccatccaggagggtaggacaaaggatttcaattcctctagcttcagatccaggcatcctctgtaatcatcactggccgcaaggtcccggatgtcctcctcgatgaggaggtaggccatcttgccccctgttgcccgcatgtgatgctgctcagccagccagtgcttatcctgggggtcagctgcatacttaaagaggtgtgggtgcttgatgtagattcttcctctggtgccccccatccccagggctttgttggctcgagatcccaacacaaaggtggtagattcattcaggcgagctgggtcccacttggggccttcccggcgaattggttcacaggattttggtttccataccatgccggcggctgcccggtcgcttgacaggatgtgtccaggaggccgtcctttcctctttttaggaagggggcttcctcgatgggcacattcttcttctgcctgacggccacgctttattcctggaagctcatgggtcaatctgggtattactttttctccatctgaaaagagcagtttagcctgctccaggcagctccgacaggcttcctggatcagctgctctgcgtccacctcctccccaacattgtctcgcacgttcagtgctgccttctggaagaacttcatgtacttgttgaagacagtctggatctcctcgttgatgctgggctgcaggacagctcggaggagatccatggagatggcaggatctgtgaaacttgttgtcatctgtgagcggcggcccctccgctgcacctgccggtgctttatcattatgttccaagggttcgtaagaaccagctgccccgctgcgcccgcatcccccagctccaagccgcccctctcggccccgctgggtccccgcggctgctcggcgtcgccagtggctcccatggcgcctccggcccccacaactccgctggactctgtccggacgcgtgggtcgagcg

SEQ ID NO: 65637 - DNA, 2748 bp, Homo sapiens
tgaagtcttgctcgtgtttgagttgtttgcttgtgttcaaaactaaggctacttgaaatgtgcatatttaccatgctaaatttatagctctaatatttgatgactaatatgttaaaggtattatctaagtgagaaagaaaaaagtccatctctgcaaatgttagatacggtacatactttgaatatccagagtttgtaatatgttatatttggacaggttccctgaagaatttgacaagacgtcatttcacaaagtgcgccattctgaggatatgcagtttgccttctcttatttttattatctcatgagtgcagggcagccactgaatatatctcaagtctttgatgaagttgatacagatcaatctggtgtcttgtctgacagagaaatccgaacactggctaccagaattcacgaactgccgttaagtttgcaggatttgacaggtctggaacacatgctaataaattgctcaaaaatgcttcctgctgatatcacgcagctaaataatattccaccaactcaggaatcctactatgatcccaacctgccaccggtcactaaaagtctagtaacaaactgtaaaccagtaactgacaaaatccacaaagcatataaggacaaaaacaaatataggtttgaaatcatgggagaagaagaaatcgcttttaaaatgattcgtaccaacgtttctcatgtggttggccagttggatgacataagaaaaaaccctaggaagtttgtttgcctgaatgacaacattgaccacaatcataaagatgctcagacagtgaaggctgttctcagggacttctatgaatccatgttccccataccttcccaatttgaactgccaagagagtatcgaaaccgtttccttcatatgcatgagctgcaggaatggagggcttatcgagacaaattgaagttttggacccattgtgtactagcaacattgattatgtttactatattctcattttttgctgagcagttaattgcacttaagcggaagatatttcccagaaggaggatacacaaagaagctagtcccaatcgaatcagagtatagaagatcttcatttgaaaaccatctacctcagcatttactgagcattttaaaactcagcttcacagagatgtctttgtgatgtgatgcttagcagtttggcccgaagaaggaaaatatccagtaccatgctgttttgtggcatgaatatagcccactgaccaggaattatttaaccaacccactgaaaacttgtgtgttgagcagctctgaactgattttacttttaaagaatttgctcatggacctgtcatcctttttataaaaaggctcactgacaagagacagctgttaatttcccacagcaatcattgcagactaactttattaggagaagcctatgccagctgggagtgattgctaagaggctccagtctttgcattccaaagccttttgctaaagttttgcactttttttttttcatttcccatttttaagtagttactaagttaactagttattcttgcttctgagtataacgaattggggatgtctaaacctatttttatagatgttatttaaataaggcagcaatatcacctcttattgacaatacctaaattatgagttttattaatatttaaaactgtaaatggtcttaaaccactaactactgaaaagctcaatgattgacatctgaaatgctttgtaattattgacttcagcccctaagaatgctatgatttcacgtgcaggtctaatttcaaagggctagagttagtactacttaccagatgtaattatgttttggaaatgtacatattcaaacagaagtgcctcattttagaaatgagtagtgctgatggcactggcacattacagtggtgtcttgtttaatactcattggtatattccagtagctatctctctcagttggtttttgatagaacagaggccagcaaactttctttgtaaaaggctggttagtaaattattgcaggccacctgtgtctttgtcatacattcttcttgctgttgtttagtttgttttttttcaaacaaccctctaaaaatgtaaaaaccatgtttagcttgcagctgtacaaaaactgcccaccagccagatgtgaccctcaggccatcatttgccaatcactgagaattagtttttgttgttgttgttgttgttgtttttgagacagagtctctctctgttgcccaggctggagtgcagtggcgcaatctcagctcactgcaacctccgcctcccgggttcaagcagttctgtctcagccttctgagtagctgggactacaggtgcatgccaccacaccctgctaatttttgtatttttagtagagacgggggttccaccatattggtcaggcttatcttgaactcctgacctcaggtgatccacctgcctctgcctcccaaagtgctgagattacaggcataagccagtgcacccagccgagaattagtatttttatgtatggttaaaccttggcgtctagccgtattttatgtcataatacaatggatttgtgaagagcagattccatgagtaactctgacaggtattttagatcatgatctcaacaatattcttccaaaatggcatacatcttttgtacaaagaacttgaaatgtaaatactgtgtttgtgctgtaagagttgtgtatttcaaaaactgaaatctcataaaaagttaaatttttgtctgaaaaaaaaaa

SEQ ID NO: 65638 - DNA, 4917 bp, Homo sapiens; identical to SEQ ID NO: 65230

SEQ ID NO: 65639 - DNA, 1858 bp, Homo sapiens
gtgatattttacaggaagatcaccatacttcacagaaagtggaggaaccatcacagtgtctggcatctggaacagctatctctgagctaataatagaagacaataatgcatctcctcaaaaactaagggaacttgatccttcacttgtgtcagcaaatgacagtcctagtggcatgcagacacgctgtgtctggtctcctttggcttctccgtctacgagcattttaaagagaggactaaaaagatcccaagaagatgaaatctcatcacctgttaataaggttcgccgtgtctcctttgcagatccaatataccaagcaggattggcagatgacattgatagacggtgctcttattgttaggtcccattcttccaatagttctcccatagggaaaaagtgttaaaacttctcctacttacacatctaaggtttcagaaatggccaaagaatccataccatgcccaacagaaagtgtttacccaccattggtgaactgtgtggcaccagttgacatcattttacctcagattacatcaaacatgtgggcaagaggcctgggacaactcattagagctaagaatataaaaactattggtgatttgagtactcttacagcatctgaaataaaaactcttcctatccgttctccaaaagtgtccaatgtaaaaaaggctctcagaatatatcatgagcagcaggtgaagactcgtggactagaagagattccagtttttgatatttctgaaaaaacagtaaatggaatagaaaataaatctttgtcacctgatgaagaaagacttgtctcagatataattgatcctgttgctttagaaattccattatccaaaaaccttgtggcacagattagtgctcttgctcttcagctggattcagaagatcttcataattattcaggaagccaactatttgaaatgcacgagaaactaagttgtatggcaaactctgtaataaaaaatctacagtcacgttggagatcaccatcccatgaaaattctatttagtattttcagagaaaattgaaggtttttttaaacatcactggatttcttgattgaggaaacaagttctgaaataatagcacaatttcaaagaagagactctttgcaaagttgataacatttcaaaccctgaaggacagtgacttattatgtaagttcaatgttgtaagttcattatgtaagatccttttttttttcataatatgtattcttggctgctatgcgtggtttttcaggaaatttaattatcttactgagatgtgaaagcaaaactagtaacagaacttacattttatttcatgctttcttaaacccgtgcatattctggtgaaacatgtaaaatactttaagtaaaattgaacatttttatttgaatttttgctgaactgataaaggtgtttatatttttgtttgttggtttgtttaattcatgtttgttgggactgaggtttaggaagtttgttactggttaaaaacctcaaatgaaatgcgaaagaatttgaatttttcctgcatatgtcaactttggacagctttcaagaaaaatgagaaaagtttcaacttctggcggttaaaatattaatgcagaatttactaagattttattcatatgcattagcaaatattcatgcagcagcagttgactgaaaatttattcttatgagacgtatagtattcatttttaaatgcatgattgtacattatgtatagacgacaatgtttttaatttataaatttcattctttgttaattgcatgggtttttctgcagcttattgtgaataccttggttctgttcaatagaaacattttgtatatattgaatactgaaatatca

SEQ ID NO: 65640 - DNA, 2049 bp, Homo sapiens
gcataattcggacgagtggtcctgacgccctttgggataggggatggtagggcaaggcccctcaagcaggaggcagcaacaggactggaatgacgcggtccagggagggtggaggcccagcagacctttgtgccctggagggagccaacccaccctgacacggagacactggcagaatagaccagagtgcggcaaaggtttcgcggacagctccgcccgagtcaaacacctccgcacccacagtggcgagaggccccatgcctgcccggaatgcgaccgtaccttcagcctcagctccacccttcttcgccaccgcctcactcacatggagccccaggacttcagcttcccaggctatcccctacccgctctgatccccagcccacccccaccttctctgggcaccagccccccgctgacacctcgaagtccctcacactcgggtgagccttttggcctgcctggcttggagccagagcctgggggcccacaggctggggagccacccccaccactggcgggcgacaagccccacaagtgccctgagtgtggcaagggcttccgccgaagctctgacctggtgaaacaccatcgtgtgcacacaggggagaaaccctacctctgtcctgaatgcggcaagggttttgctgacagctcagcccgagtcaagcacctccgcacccaccgtggtgaacgggcccggccaccaccaccatccactctgctgcggccacataacccacctggcccagtacccatggcccctcgaccccgagttcgggcccagccttctggacccagccagccccacgtgtgtggcttctgtgggaaggagttcccccggagctcagatctggtcaaacacaggcgtacacacacgggggagaagccatacaagtgtgcagagtgtggcaagggttttggtgacagttctgcccgcatcaagcaccagcgtgggcacctggtcctgacgccctttgggataggggatggtagggcaaggcccctcaagcaggaggcagcaacaggactggaatgacgcggtccagggagggtggaggcccaggagaccaaagggaggggctctgccgcttagcagagaagaaagggcctgggaggtggtgggagggagaaggaagggaagaaaggggaggaagaatagatagaaatagggattggagacagtaaccttgaagctcaggaaactgtcctggctgggctgagtcaggaccttgccaggacgggctgtacccctggcttctagaagactgcctagcacacagtaggcattcaatacttgttgaataaataaactggctttcacctaaggactcaaccctaaattcctgctgcctcatctgttaagaactgacactttccccttgctgggcaggtagtacacacctgtaatcccagcagtttgggaggctgaggtgggagaatcacttgagcccaaaagtttgaggctgcagtgagctgattgcaccactgatgcctcccaaccttgctctgggagaccaatgcctgaaccagggtttgtttaccttctgagctgcagagatggggcttctggaatttaaggtaacaggatgaggcaggggtatcttgatcatccggatggggcaaatactgctgtgtggcatggtggtacccacccctatggaggggcactcttggacagagcccagacctttgtgccctggagggagccaacccaccctgacacggagacactggcagaatagaccagagacagaaggtgctctcatggtatccagcctggatgccaagcccaagtcctggtggatagcagaggccagctgtttgggaaaagggcaggatgctctgaggcctggcagccacatttccatgtgtctttttaccaataaacggcttctcttctgaggcttggacagtgtgtgtgtacacacaggcatgaaaaaggtggagaggggtctctgcgcgcaaaactcagactgtaaattttgtgtggttcccttgctctttgagcccattaaataaaaaggttgttttggcgtaaaaaaaaaa

SEQ ID NO: 65641 - DNA, 1538 bp, Homo sapiens
  misc_feature (1)...(1538): n = a,t,c or g
acgacgacagtggcctgcacttcttcctgacggcaccatcttcctcgtgctctgcatgggactctacctgctgctgtccaggctggagtatgccaggtactacatgaggcctgttcttgcggcccatgtgttttctggtgaagaggagcttccccaggactccctcagtgccccttcggtggcctccagattcattgattcccacacaccccctctccgccccatcctgaagaagacggccagcctgggcttctgtgtcacctacgtcttcttcatcaccagcctcatctaccccgccgtctgcaccaacatcgagtccctcaacaagggctcgggctcactgtggaccaccaagtttttcatccccctcactaccttcctcctgtacaactttgctgacctatgtggccggcagctcaccgcctggatccaggtgccagggcccaatagcaaggcgctcccagggttcgtgctcctccggacctgcctcatccccctcttcgtgctctgtaactaccagccccgcgtccacctgaagactgtggtcttccagtccgatgtgtaccccgcactcctcagctccctgctggggctcagcaacggctacctcagcaccctggccctcctctacgggcctaagattgtgcccagggagctggctgaggccacgggagtggtgatgtccttttatgtgtgcttgggcttaacactgggctcagcctgctctaccctcctggtgcacctcatctagaagggaggacacaaggacattggtgcttcagagcctttgaagatgagaagagagtgcaggagggctgggggccatggaggaaaggcctaaagtttcacttggggacagagagcagagcacactcgggcctcatccctcccaagatgccagtgagccacgtccatgcccattccgtgcaaggcagatattccagtcatattaacagaacactcctgagacagttgaagaagaaatagcacaaatcaggggtactcccttcacagctgatgggtaacattccaccttctttctagcccttcaaagatgctgccagtgttcgccctagagttattacaaagccagtgccaaaacccagccatgggctctttgcaacctcccagctgcgctcattccagctgacagcgagatgcaagcaaatgctcagctctccttaccctgaaggggtctccctggaatggaagtcccctggcatggtcagtcctcaggcccaagactcaagtgtgcacagacccctgtgttctgtgggtgaacaactgcccactaaccagactggaaaacccagaaagatgggccttccatgaatgcttcattccagagggaccagagggcctccctgtgcaagggatcaagcatgtctggcctgggttttcaaaaaaagagggatcctcatgacctggtggtctatgggcctggggtcaagatgaagggtcttttcagtgtttncctgttttacaacatgtcaaagccattggttcaagggcgtaatacaatacttgcgtattcaaaa

SEQ ID NO: 65642 - DNA, 670 bp, Homo sapiens
ttttttttttttaataaaaaaaaaaaaatgtgtttttttttggcaacgacagaaacgtagtgcagatatatttttgcctgtgctgctcaactgttttttttttctgatactgaaaataatattaatattcctgttgataagactttgtaagatgttagggagctgataatggaggggggtgggaatccttcaaaggcaatttcttaggcacttgcaagggcttgggggagggggaggcagttgtgatgacctcagaaatactcactttttattaatgctaaatatgttagaaagaaatgatagcattcagcattttattcttcttaatctattaagctgtgtaactccctgccccaaaccactgaaaagaaaagtaaccttcaggccaggcgcggtggctcacgcctgtaatcccaacactttgggaggctgaggcgggcggatcacttaaggtcaggagttcaagaccagcctggccaacatggtgaaaccccgtctctatcaaaaattagccgggcatggtggcacgtgcctgtaatcccagctacttgggaggctgaggcacgagaattgcttgaacccaggaggctgaggctgcagtgagccaagattgtgccactgcactccagcctgtgtgagagagtgagactctgtctcaaaagagaaaaaa

SEQ ID NO: 65643 - DNA, 4539 bp, Homo sapiens
ttttttttttttacaaggtggaaaattatgtatttatttacacaaatatgcacagaacacttgtatctttcaaaagtcacacttaagacatagtaaaagcatgttgtatgaaccatgtattcttaaggattgagcaaactgcaggctgcttgctgccttttaggtttgctagtccctgatctacttgaaacagatgttgcttgccccaacactagtttaattataagggcagcctgtgagaaagtttcaatagacatttttctcacctatattgcacgtttttctgaagcccttgtgcaagtgtgtgtgccatgtgtagttctatttacatataaacgctactttaaaagtttatcaaaatcatgagtttttacaaaagtttttaatgctcttctgcattatatgcagcattgcaaatctgcaaagtagtaaaactataaagcacctttaggtttgcaccagttattacagaaatggggatttgtgaaaaggatgtaatttgatgtagaagggcaaagtcctttaatgactggcattcaagaggattacttaaaacaatttgtaagttcatgctaacctcttccctatatttatactactgggacctggggaaggatccatgacatggaagtatcttgagtgtgccttttaaatttgagcattactgctaagaatgttctgtaaaggtgcatagttaagcagctatcccttaactcttggagaaatagccatagggaaaccaatcatttaggtaggagaaccatggggaaaaaaatcagcattttttctggagtttggaatcagtttcaccaactggtctcactttgaggcaagcctgttttcccccatttgaaaacaagggctactaccataagatttactggccttttgcaaattgtcagtgatgtgcaaagctgcctaatgcagtgcctggcatatgttataactgctgtatgtattagaacttttcaatgtgtaggccaggaaagcattttgactagtatattttaagattggattgtatcaggttgggcttgggaaaacctgcaggtataagtcagttacagggaagtgtcagtgggtggcactcttacatcatggtcggggaacgtggactatgatgaggtgcttgttaaaagcaaatatagtagatatgttaatgtgttggataaaataggttgtatgtccagctggcatttagttaccagaaatcctttcaaattttgctagtttatacgctgtaggtagaaagtatttttatcttatggtttctgtagcacttggtactcaacaaggatacttgtttccaaatatcagatcactttgagaatatattgtgacaggcagatgtccttgaggctttactactcctattcaggcctaaaagtttatagtggaattctttaaccactgatttcctcacttgacaaaggctacagagaatatgaagatttcttgtcaagtcttttgaaaagacctaagcataaatatgccactcatgagtgtagtaaagggtaccgcatttatgtcaaatgtgggtatttaatatgatttcagacaccactgattcaattaaaaggggttctcagttcaaatgtaaaaatgatcttttgtaaaatcagcatagaatgattttgagaaataggtaggggatagatgaggcttagaataagtcactccagtgaaattagggtagaaaatgttcatttaaggattatcacttccactacactgaggcctctgaaaatgttcacaaatttctcaaaagcagcagggggtacacaattttttaccacaacacaaagcaaaaacagatcttgccatttgttgtcatctctgctgagtgctaatagtgggggttcaaagttttccatttgtttaaatgctgctttgaagtttccatgaagaattacagtttggtgacactttttatccaaggtacaaaggctgagactttggtataaacaccaggagaatccttgactccacagccatacccccaggaggtcaccccatacaccacccagctctctccgggccgttcacacatgagtggtcctccgctgtctccctggcagctgtccacgcgtttgtgttcatggaggtttccagcacaaagcattctccctgtaaaccgacccttataacgttcttcacaaaaccttttaggaagtaagggaatggctgcttgttgtagtgttcttgaataggctcgtcctgtgtcaccccatcctgttatgtaacagttggatgctgttttctgtggcctctctctccagagtggtaaacaggctggcaaaacattggctgctgaatctggcacattgctcttctggtccttgtaatctaaccaaggctatgtcataatcactgccggtcggttcgatactcccgatgaatcaccatctgttgaacttcaatttcttcctcaaactcctctggtaccagagtatgataatctccaaccctaacagcatagctcctagtgctgttgccatacctcttgaaacagtgtgctgctgtgaggacccagcagctactcaggagcgtagccccgcagaggagcctgccatctccatgggatgacttcagccggagggaaacctgccaaggccaaccaccccttaaagaatttttcccaccaatgatccgcttctgccgacggtgcagtaatctcaagccacaaacagatgagagggactctttattactgttacctgaggccttcttgccaaaataatcacaaataactcctgcatcttcactgtggcggcagttgtgtcttccaatatcttgcttgatacagtcagccaaggacctctcatttcctgtgcacttcacattatccacatggatgggtccttttccttctccaaagtaagccatggttcttgctctggcaggacccttgtagccaagctgacgacagatcacagctgcatccttatcagtccatccatcatcacagattgttccccactggccattgataaaaacctccactcgtccttctttcttattttctccatccatcagtctgacaggaaaacccagagagagcctgtgtccctcgccgccagggtagcaggcaatgctaacatcttcgcggtggctgcagtcatgccttccccactgtcgcctggaacactgaagaaatctggtttcctttcctgagcagctgacgtcatccaaccatatgggccctgtgctttcttcaaaatggttggcagatgcttgtttaccatatttaaatcccaattgtcgacaaaccacgtatgtattcagctcagtccagccatcatcacagacagttccccactggcctctgtaatatacctccaagcgaccctcatggctgcctttcccacctgcaagtctgatgaccccatctgttagaggggtacaggacactccagcatcttctttatggccacagttatgctctccccaggagctctttggacactgctcaattgaaagctcattcccagtgcagcgtacttcatccaacataactgggccagacccttccccaaaatatgcctgatgccatgctttggcaatgccactgaggcccagctgcctgcagatcacttctgcatcggcatcatcccattggtcatcacaaacggttccccactggccagcatggtagagctccacccggccttcatgcacactgctgcctccagcaaggcgaatgatggggaacgttgggccatgggaaaagctacacgtgacagcagctgccatcttctgaggacacaccccaccctgccagatgtctttttcacaaagcagtatattttcttcatctcctcggcaacggacattgctccaataaatgggaataaggcccagtccagaaaacggggtttgttttgctattccttttcctcccagctgcagctggtgacaaatgactgatgcatcagaatcatcccagtggctgctacagacagtgccccaaactccacttgcatatacttccactgtgccttcaaactcatttttgccgccacgaagtcgtactgatccgtgtctgcagtcgcagtagccccagtccaccttgccacgggcgtctccgtagaaacaccagggtctgcccgcgccgtcggggctccgacaaaagttgtggcgctgtcctcgcagctgagcccagctcgctgggggcgaccgctccaggaagggtggcacctccgcccaccgcagacacggggcgccgaagtccgtcacgctgacccatggctcgccggcggggcagccccaggggtgcggccggggcgtgtgcccggcctggagggcgtgcgggcgctgggcagggagcgcccgcggggggcgcgggaagcgcgggagaggcggcggcggacgcgtcgtcgggggccgctgctgggtgggaaggtaataggggtagtgcggacccgcagggggcgaatggcggtggctgtggtggagggaatcattgaggacagaatcaaagccgaccacttcggggagcgcccctaacatcagggctagcacgaagcgggcgagcgtcat

SEQ ID NO: 65644 - DNA, 4063 bp, Homo sapiens
ttttttttttttggaggagtgaaaacctttattttggaaaaagtcaagccaacattggatatggttcaagaaaaaaaaacaacaggaaggagccaaaacttaaccatgaaccattaggaaagggggccttttgataaaaccgtcgaaacacatcactattctgaggaagcaagaggttttgcgttgtttcgtagtaagacacagcccttctgtgggcacccaaggggctctcatgtcccagtcccaggccccaagtctctgcgggaggggaggagcaagaacggggttagcaaccgttaatctcgaggggtcttgaggtgcagcccagcgccccctgcagagttactctctgagggtcgggggtcagtgctgggtcagcagcggccatcccgggggctttaggggccaaggttccaggcctggtcacccagcagggaccctccaggagaccggggccgaatccgccgagaatttatgtcttgcaacgggcctccttgacctttggttttcccaaaaccgagacagaggcccaatgcgttgccccaagctgaggaagaagagcttgctttgagtttaattgtaaagtaactgttaggtgaggagttggtgggaaaaacccagctatggggacagaggagagggaggcttagtgcggcaacaaggccccgagagggcgtctttgctccaggcttggtgggatgcaagcacagaggtgcctaggggaaggagctgcgccggcaggaagggaaggcgggcaagagggcagggcaggagagcccgggagtggggaaaccaggtgaggccagctcagggctgagccccagagggccctgcacaggtgacgccagctcagggctgagcctcagagggccctgtgcaggtgacactagcttcatggctgatccccagagggccctgccgcaggtgatgcccaactcagggctgagccccaggaggaccctgcacaaagcaggcagcagcgttgtgtcctggctttccaagcttgggctctgtttagtgatgagtggggaggggtgggaggacagggtttggtgccggcgtgcagggtgggctagcccagcgccaccttcctggagactgtctggtggaagacaccgcggagcagggccctggtagctggggacacggaacaggtggctctcgccgtaggccacgtcgtactcgggccgtcttgccggtgaccaggacgcggatgtggggctcattcacctggcggcccacgaccaccacgaagatctcgatgcctgcccgctgggcttcctgcacggccttctcgatggcagcgggcgtggcgccctgcgagttgccatctgagaagagcagcagcctcttcttggcagcgccggacgaggcctcgcggtagaagcgggtcacatagcccagggcatcgttgacgtcggtggcgtcgttgataaagtccatggcatcgacggcactggccagggccgtgtagttctgcaggaactgcagcgacgcccgctctgggcgctgctggcccgtgccgctgtactgcaccaccgccacccgcacgtcgtgggcggggtccgtcctgcccgctgtgaggaagcgctcggccaggcgcttggcgaagcgcttggtggtgtcaaagttgtggctgcccacgctggcggagccgtccagcaggatggtgatgtcagccggggaggagaacgtgatggggcaggtgtaatctggacacttcttgtctatgcagatctgggcggtgacattcttcaggaaggcatcctccagcagctctgcatagttctccttgaccagcgagaggccgggccggccctgggatggtgccaggccttggcaagaaatgacattgagctggtctgagcctgggatgaagtcaaacacgtctttgatgcccacggagaccacctggatgccggggctgcagagcacgttgagcggtgtggtgtccctctgagtgtctgagcgcccgtcagtgatgaccagggcgatgcggttgttcgggctgggcggcagcagctggtcccgcgtgtactgcagggcctcccccgtgaaggtgccgcccgccatccactgcaggctcttgatggcttccttgagctcctgcacgttccggatgctggggctgcgcaggctcacgtgctcctgcatctggctgtggctgtactgcaccacacccgcgtacgactgccctggctcgaacttgaccagctcgtcccggctcagccggtcgatgaccttgacgacgaagtccttggcaatctcgaagttctgcaggccaatgctctctgagctgtccagcacgaacaggaggtcgatggggccgcacttgcattcacagcaagagcacattttcatgatgatgtccaaaatctcgcattcgtccggcccaggcggtccttggtgtcctgggggtccctgggggccctcgggaccccggtacccctttgctcctttgactcctcggggtgcaatgtcgttgttatcgtctccggggtccccggcttctccctcgtcccccttgaggccggggtagcccttcgtgccgtttatcccgggagcgcccctgttgcccggatacccggggaagccggggaagccctcggtgccatttccagcggggccgtcttctcccctttcacccatcagccccgggtctccagggggtccggcaggtcctggggctcctctggcaccctcggaccctgggggaccctcatcgcctcggtagcctttaggtccgatagggccagcctcgcccgggtctccagggacaccaacggggccttctcttccctgatcaccctgcgggccagcttcaccagggtctcctcttggtccccgcgtgcctggggtcccccgtggtcctctctctccagggccaccccgctccccgggggcaccgtcaggtcctgggttcccctcgtcgcccgcctctcctttctctccggggggcccaggctctcccggctggccctcgtctccagatggtcccgagctccctggtctccccgcctccccgtcagctccaggctcgcccttttctcctttcagtccaaaggcaccggggtctcccttggggccagggggtccttgaatgccgtcaaacccgggcgagcccttgcagcctggcaggcctgggtaccccatctcccccttcacgccgtccaccccgtcgatgccacgcttgcccttctctcccttgtagcccttgggtcccctggagcccttctccccacggctccctttttctcccttcattccctggtacccaacaggtccgaggtccccgggtcttccaggatctccggcttctcccttctctcctgggagccccggcttgcctcgttctccctcaaagccggggtcgccccggagccccggaggtcctcttgcaggctggcattcgaaggagcagcacacttgctccacgttatttttgatcatgtccacgatggtgtcgatggtctggctgatggcctcctctgcgtcgcggctctggccccagtcagccgccgtgaagttgcgccggtacgtgtggtccgtggcgatgatgctcagacgcggctccaggtggtcgggtgtgatggccaccgagaagactttgacgcccaggtgcttggcctcgttcacagcatcctccagccccccacagggttccttgtagccctccagggggtgcccgtcggtcaccacaatcaggtacttattctccttcaggtgggagccccccacgaggagctgctccagccccttcttgatagcgcagtcggtgtaggtgcccttcccaaagtacttgaccgcgtccacgctgcttttgagtgcgtcgcggccgccaggcatgcgcgtgaggccttggatgatctccacctcgtcactgtagtgcagcgcgcctgcgttccacaccaggtttcggtcacagcggtagtacctgtccctcaggttgtcgatgaagcgcttggtgaaggacttgactttgtccacgagggccccgtagggcttcagcctcagggccacgctctcagaggtgtccactcgtgccgaattcttgaacgtcatc

SEQ ID NO: 65645 - DNA, 688 bp, Homo sapiens
ccgtgtggggaattccaccactcctcccaaaagctaccccggctgaagaagtggaagactccaatgactcatcatattcagagcccccagatgttcagcagcagttgaaccactatcagtcagctgccctggcaaggaacaacagccgtgttagccctgtgcctctttctggggctgctgctggcactgagcagaaaactgaagccgtgcttcactgcgaattctgtgaattctcctccggctacatccagagcatcaggcgtcattaccgggacaagcatggtgggaagaagcttttcaagtgcaaagactgctccttttacacaggctttaaatctgcttttactatgcacgtggaagctgggcactcagcagttcccgaggagggccccaaagatcttcgctgtcctctctgcctctatcacaccaaatacaagcgcaacatgattgaccacatcgtgctgcaccgagaagagcgtgttgtccccattgaagtttgccggtccaaactgtccaaatacttgcagggagtagttttccgctgtgataagtgtaccttcacctgctccaggtgatgagagcctccagcaacatatagaaaagcacaatgaactgaaaccttacaaatgccagctctgctactatgagaccaagcacacggaggaactggacagccaccttcgggatg

SEQ ID NO: 65646 - DNA, 790 bp, Homo sapiens
gtcacggccatcattgacggcaccggctccataggtacggctttggggcctctgctggctgggctcatctcccccagcgggctggaacaatgtcttctacatgctcatctctgccgacgtcctagcctgcttgctcctttgccggttagtatacaaagagatcttggcctggaaggtgtccctgagcagaggcagcgggtataaagaaatatgaggccccaattggaacagcagcatggagggtcccagttgggtccccaacgtgctccccatgggcaagacaatggaaacttccacaagcagggaaggcaaaccctctttattgaacattagccagcccagcccagaccccagggctgcctaaggacacagagattctccatgggaaggggactgccaagcatgaggaaatagaagattcaggggcctgagctctggaagctgcaagcaaaagggatgggactagggctgagttgtgtctccattttgataaggaaaggatatgctcacactcttgcttgttcagattccaagacagaaggcttcacaaggccaacgcctggaaaatgggcatctctccctcccatgttaagctttaacctctgtaatctgcctgtatctataggtgggcatctcactccatcaaaggagcccagcctctctttgtccctctatccatgcaacagtcttctctgtgcatttccccaagctgggccctcttctactctccatttaggcctgttgataactccattacccacccatcactgctgttcctccagggccagca

SEQ ID NO: 65647 - DNA, 4372 bp, Homo sapiens
ttttttttttttgtgcaagatttaaataaaaaaacaaaacaaaaaaataggaaatggttgctttcaaaaatttccccaggttgtgaaaaggtttgccaacgactctcagggggtgtggttctaagctgcatcaagtgaaacaaatacaaaatgctgtccctcctccctgggctcggaaggcagtgcactttctccctcttaacagcccagactagcgggtgaggagtcagtgctgtgaccccagggccaagctggagtgtccgcatagctttttctctgaccagtggggattccatctaccttgaggcgtgctggcctgggccccgtttccacaccagcacatggtgagacagggtagcttatcaacaggctgctgggccttaatactgacagtgagtgttgggccgggtcacagccaggggaaaggacttaacacagattgccctcccaagcccccactggctgggcctaattttaggattaccacgggaaaaaaagctttgatgaaagacaacaggaagtcaacacagcagagagtggtgtggacaacccagaagccagcctcacgcattccatgcccacagttaacgatgacaacaacagcaataataataataataataaaacaaaggtacaggtgaaaagcagcgcttggggtgtgctgctgcaagctggggaaggcgcgtgctcaacttggatgggacacacctagtctttcttcaagtccctggattcaaagagcttcaaccgttcttgcaccgtcaggccttccttcagactcttggacctgatgtttctgagttgccgggtgacacaggatctgtctttcttcaagaagtcagggttgcttttagatttcattatatcatatccggacaccgtggcactgtcaggggacttctcccccagtgcttccgttgcagccttgagctgctccttcaacctgctgatgtcacagtcagccttagccttcgcgatgctgagctctgtgtagatgtctttgtacttgtcacttgcatacttcttgtcccgcagtgccgtctgcagctcatccttgagggagctaatctcctgtttcaggtactgtatttccgattcctttacccgcaataagacctctagttcataggcatccttgccctgtgcaaggggtgacccagtggcctccccaccgccgtccccaatcaagcaacgtccgcaaccgtgtgatctctgcagccaggcggttgttcagctcctggttgtgggcattgagctcctggttctcacgctggcactgccgcagggcctgccgctcggcctccagcgcctgggccagatgggcattctccaggcacttctgcgagtactgctccgagaggacctccaagttccacgctgcaccgactgcagctccctccaggtactggcgccgcagggcctcaaacatccgaagttgacgctgctgatctgggaccgctggctcttctcccagtcccgctccatttcctcccggtgggcgttcttcatggcttcgatggctgagatggtggccgctgtctcctcggctaggaggcggtctttctcttctcgaagtttctctagctcccgctggtgctgcctctggagatcttcaatcttccttctggtgcgtttcttccattgctgcaaaccctcgctcgcacgtggccttaaggctctccaagtccctctggtacttctcacgcagtgtggccgcgtcgccctccaggtccttgtgtcccagctcctcccgcatgacatccatctgggcctccagctcctggatgcgctccctcagccccgtcatggagtcagcctctccctgggtggcctgccagttgggggcaggggctggcagggccttggggtgtggcccctggtggaggcagagggtgtcctgaaggcacctcaggctctgcgagtagtgctcctgcagggtcctcagctcctcctcgtggatcgtctgcagctcccggaccttgagctggaacctgtcctccagggtctgtatctgctcaccatgatgcctctccatgtcctgcctgtctctgaccgaggcatccagctggctcaggacccggctgcgctcagcctgcagtgtgctctcggtcctggtcagctgctccaccacacaccgaatctcctcctcatacctgccccgcagggtgaacatgctcatgctgtgcttgctctctgcatcctccagacactgctgctgatggtctagctgggcggccttggccttgagctctgcattctccctttcaacaatggcgatcacatccaggtactcgctcttctgcttgcggagaagctcctcatactcctccctcagggcccgggctgcctgtgcctgctctgagcaggagggctcccgggtttgccaggactccttgcagagctggagctccttctcatattctagccggattctgcaggacgcatagcaaacctgggcctgaataatggcatcctgaaccaacaatgaagaatactgaccgaggcctcccaaacaagtgttatacgagagactctgggacacctggagaagcttctggcaatctctcagcgattccacaggtggcagagatggtaaggcagccgctatctcctctaagaggctggccttctccttcagctgctgggcaagctcctcctgaatagcaacaaaggccccagggctctggtcagacacatcgaagggctcctgagagctgtctgagtctcggcccaggacttctcctaaggggctcaggtcccaggacagctgaacaccatcttcatggcccgctggaagcctgagggcttccaagacctgctgcatcactctttcaaagtctggggtttggtaggctcccaggatttccctcagcaggcatttgtgctgccgcagggccgtctgggtgccccgcagggtctcctggatgctctgtagcctgcggtggaacgactccctcactgactgtgtggcaaagctgagctctgccctgacccatgtggcattggccaggatgggggccaggccctgtgggatgctttgctgcccgtctcctgaggcaccgactgcctctcctcccagtgtccccaagtgcttcctcagagactcaacctggctccagaactcaccatccactaggaccttcctggcccaggtgtctacgggggccccagcagattccatcggtggctgtcctgaccaagaaatctcatggagcattcgggagacatctgatgttgtgttcttcagggaatctgctatctggctgatcagcgaggcctccagagcaatctggtcagaaagaagcctcacctgctcctgctctgtcaactcagactgggagcactgctgcagggaggcaggcttcccattctcctcggtgccacctgtctccagctgtgcacgggccccgccatgggctggggccggccagtgctgcagggcttggatggcgctgacgagtgcactctccacactggccagggaggctgcgcgtgcgtcctgctcatcctcctggctggccctaggcagagatctcagttgttctcggcaattttccaggcacatcagggcctgactattcttgacctggaagtccccaagctctccaacatgcccttcaaccctcctggccctctcctgcctctcctgctccagctgggaggccagtgcgccaacctggagcaggctggcgcggagctgctcacgcagctgggcctcggtgcccgcccactggtggtgcagtgcgagcagtgcctcacggctctgaccctgctggctctccagcctcacggtcacgtctttgagcttttcctctgtgacgtagagcttggtctccagggagtggatgatggagaggtacgtgtcagagtcgccagttgcaggcagtacactgggtgcaggctctgaggacatgctttcttccgagggtgaccggtcctggctggtgtcggaagatgtgctgctggtccaggtcttctcagacccttcggggtgaatgtatctttggcactggattgtggagaaccggattctttgccttttaacaccaggtgccccttggtcgagtttggctgtgccctgctgatggccctccctgtcaagcacttccactgactttgggggcaccatgctgtcttccctactggggctgccatcaccgtactcttcccccggaggagcccccaggtcctcgtcctcatcctcgagccttgtgtgtgggaggcctagaggtgccctagtggcttggactggttggcctgggagcaaagtgccatccctttctgtctcttcaggggtactccgtggctcttccatgtcctttggagattcacttgcaaatttccttaaaatctcttcttttgcctggagctt

SEQ ID NO: 65648 - DNA, 818 bp, Homo sapiens
ctattcagtgtggtggaattcctcttctgccccttccttccccgctcagcatggcccctgtgtgcagtttcaggctggcccgcctgtccagctggcgggttcatgcggggctggtcagccacagtgccgtcaggccccaccaaggggctctggtggagaggattatcccacaccccctctacagtgcccagaatcatgactacgacgtcgccctcctgaggctccagaccgctctcaacttctcagacactgtgggcgctgtgtgcctgccggccaaggaacagcattttccgaagggctcgcggtgctgggtgtctggctggggccacacccaccctagccatacttacagctcggatatgctccaggacacggtggtgcccctgctcagcactcagctctgcaacagctcttgtgtgtacagcggagccctcaccccccgcatgctttgcgctggctacctggacggaagggctgatgcatgccagggagatagcgggggccccctagtgtgcccagatggggacacatggcgcctagtgggggtggtcagctgggggcgtggctgcgcagagcccaatcacccaggtgtctacgccaaggtagctgagtttctggactggatccatgacactgctcaggactccctcctctgagtcctgctgtttcctccagtctcactgcacaccactgcctcatgcttcctggggcctccagcagctccactaatggaggagaggcagtagcctccgacacagaacgcatgggacctctactactgtgtgtgaggaacagtcactacccactggccagccact

SEQ ID NO: 65649 - DNA, 724 bp, Homo sapiens
  misc_feature (1)...(724): n = a,t,c or g
cgaccccgcgccgtaatttccgggtcgacggtcccggccctcgcccccgcgcggggccttagtgctcttgccctccgacagctctgggtggatcgcccagtggcgcctgtccgtgttttggcgccccctagcagcggcgcagttgcgcctgtttcgataggcgagcggattggcgcccctggttgccggagcaatcccttaggcctggttccctgccgcctggagcctcggctcctcgcagtcaggtgggttctgggggtgccagcaggctctgagagtgccggccgcggggccctcgcagcttgcctgctgcagtcggagctggtaaactacgagcgcgtgcgcgagtactgtctcaaggtactggagaagcagcagggcaacttcaaggccacctaccgtgccggcattgccttctaccacctgggcgactacgcacgcgcgctgcgctacctgcaggaggcccgcagccgggaacccacagacaccaatgtgctccgctacatccagctgactcagctgaagatgaatcgttgcagcctccagcgggaagacagtggggctgggtcccagactcgggatgtaattggctgaggccaatccagggggacctctctatccctcgccctcccacctcaccatgtaacttcccccgactcatgtgtttgttggtaaaacacttgtcactggtgatcanaaaaaaaaaaaaaagacaaaaaaaaaa

SEQ ID NO: 65650 - DNA, 1232 bp, Homo sapiens
cgagccacgcgtccgcgcgggagccagggggcgtggggccatggtggtcttgcgggcggggaagaagacctttctcccccctctctgccgcgccttcgcctgccgcggctgtcaactcgctccggagcgcggcgccgagcgcagggatacagcgcccagcggggtctcaagattctgccctccaagaaagtcttgccatgattggataggacccccagataaatattcaaaccttcgacctgttcacttttacatacctgaaaatgaatctccattggaacaaaagcttagaaaattaagacaagaaacacaagaatggaatcaacagttctgggcaaaccagaatttgacttttagtaaggaaaaagaagaatttattcactcaagactaaaaactaaaggcctgggcctgagaactgaatcaggtcagaaagcaacattgaatgcagaagaaatggcggacttctacaaggaatttttaagtaaaaattttcagaagcacatgtattataacagagattggtacaagcgcaattttgccatcaccttcttcatgggaaaagtggccctggaaaggatttggaacaagcttaaacagaaacaaaagaagaggagcaactaggagtccactctgacccagccagagtccaggtttccacaggaagcagatggagctcctttcacaggggctctgagaaaaactggagctgatctcaagaagccccacatcttcctaaggggccccatggcctgtttgggggcagggtaggtcctggggcactgtgggccgcctgcctgctgatgtgggctctaggccagcttgttgtcacgtacgtggtgtgaaataaagcccaagcactgggtgcccgtttcctgtgtttcgaattataccaattcaaaacagaactatttaaaaatattggccaggcacggtggctcacacctgtaatcccagcactttgggaggccgaggcgggtggatcacttgagatcaggagttcaagatcagtctggacaacatggcaaaaccctgtctctacaaaaaattagctgggtgtggtggcacgcacctgtaatcccagctgctctggaggctgaaggcatgcgaccgcttgaacccaggaggcggaggttgcagttgatccacagatcgccaccactgcactccagcctggaagaccaaacgagactctgtatcaaaaaataataataattaataaagttttactgga

SEQ ID NO: 65651 - DNA, 4424 bp, Homo sapiens
ctcacattcctggcatagcagccgcctccggcgcgggccgaccctggggctgcgcgctggggcgcgaacagccagagcgtcggcgccacggccgataacacatcttcgccgccgagctgagctgggccgagccggaggttgtggtgtctgactgcgctgggcaccctcgggccgcagcggtgctctggggccaggtgccaccggccattgtccaggcagctgtgtgcaagccaaagaagcatgaggacactggaagactcctcggggacagtcctgcaccgcctcatccaggagcagctgcgctacggcaacctgactgagacgcgcacgctgctagccatccagcagcaggccctgaggggtggggctggaactgggggtacagggagcccccaggcctccctggagatcctggccccagaggacagtcaggtgctgcagcaggccaccaggcaggagccccagggccaggagcaccagggcggtgagaaccacctggcagagaacaccctctaccggctatgcccacagcccagcaagggagaggagctgcccacctatgaggaggccaaagcccactcgcagtactatgcggcccagcaggcagggacccggccacatgcgggggaccgagatccccgtggggccccgggaggcagtcggaggcaggacgaggccctgcgggagctgaggcatgggcacgtgcgctcgttgagtgaacggctccttcagttgtccctggagaggaacggcgcccgggcccccagccacatgagctcctcccacagcttcccacagctggcccgcaaccagcagggccccccactgaggggcccccctgctgagggcccagagtcccgaggacccccacctcagtaccctcatgttgtactagctcatgagaccaccactgctgtcactgacccacggtaccgtgcccgcggcagcccgcacttccagcatgctgaagtcaggatcctgcaggcccaggtgcctcctgtgttcctccaacagcagcagcagtaccagtacctgcagcaatctcaggagcacccccctcccccacatccagctgctctcggccatggccccctgagctccctcagtccacctgctgtggaggggccagtgagtgcccaggcctcctcagccacctcgggcagtgcccacctggcccagatggaggccgtgctgagggagaatgccaggctgcagagagacaatgagcggctgcagagggagctggagagctctgcggagaaggctggccgcattgagaagctggaaagcgaaatccagcggctctctgaggcccatgagagcctgaccagagcctcctccaagcgtgaggccctggagaagaccatgcggaacaagatggacagtgaaatgaggaggctgcaagacttcaaccgggatcttagagagagattggaatctgcaaatcgccgcctggcaagcaagacacaggaggcccaggccggcagtcaggacatggtggccaagctgcttgctcagagctacgaacagcagcaggagcaagagaagctggagcgagagatggcactgctgcgcggcgccatcgaggaccagcggcggcgtgccgagctgctggagcaggctctgggcaatgcgcagggccgggcagctcgagccgaagaggagctgcgcaagaagcaggcctatgtggagaaagtggagcggctgcagcaggcgctcgggcagctgcaggcagcctgtgagaagcgggagcagctggagctgcgtctgcggactcgcctggagcaggaactcaaggccctgcgtgcacagcagagacaggcaggtgccccaggtggtagcagtggcagtggtgggtctccagagctcagcgccctgcgactgtcagaacaactgcgagagaaggaggagcagatcctggcgctggaggccgacatgaccaagtgggagcagaagtatttggaggaacgtgccatgaggcagtttgccatggatgcggctgccacggctgctgctcagcgtgacaccactctcatccgacattccccccagccctcacccagcagcagcttcaatgagggtctgctcactggtggccacaggcatcaggagatggaaagcaggttaaaggtgctccatgcccagatcctggagaaggatgcagtgatcaaggtccttcagcagcgctccaggagagaccctggcaaggccatccagggctccctgcggcctgccaagtcggtgccatctgttttcgcggctgcggcagcaggaacccagggctggcaagggctctcttctagtgagcgacaaacagcagacgcccctgctcggctgactacagcagacagagcacccacagaggagccagtggtcacagctccccctgctgcccatgccaaacacgggagcagagatgggagcacccagactgacggccccccagacagcacctccacctgcctgccaccggagcctgacagccttctggggtgcagcagtagccagagagcagcctctctggactctgtagctacatccagagtccaggacttgtcagacatggtggagatactgatctgaaggaggtggtgcttcaggactctgagccattctctcccctcctctgccctgtgccactctcagccatttcagcagccccgtcaaccgctgctccgtccctttccccagccagacactcattcccattgaccatctggtcccaggagctcaggaggaggaccccaggggagaggagagctgtgagagcaccggcacccccagaagactctgcttcttagcccacattcctccgggccttatggagaatgaggattcagccttgacttcttgcccaaggcctgctactggggtagcaactgacagctcagaaaggagctgagctccctctgccctgccagttgtcagtcaggcagggagggagtggctgtgttggtttggggaactaatttccaaggacggctgcccgtggacaccaggtggactggttcactaatcaagtcagccatattgttctctggctaagtttggttccagccaacgtcatctgctcttcagttcctcactgccttcttgggatactaagacttgaattttttggggactattaagggtgttagtcttggagaagacacagcctcaccttctcacttgctgtgggtgaggggccatttaagtggactgggagacagtgcgcagtttgtatataattccctttcttgtggaacagaagactgaggcctgcaggttccgatgtgtctccatgggctgtgctcccctcttcctactgtcagtttctgaaacttctgactggcctcccagttatgcctcctcctcaagttcctggcccgtggatgttaaagctgctcgattcccaggatctcggctgccttttcctctatcttgagccctataaatgcccacgggacccccaccaccagcctcttgaagtggctccacagctcctgtccctggaacatcctgtcagtttggtcataaaccctgagccagatgaaatgagccaccgtgaacagacatctgccatgcccccaggtgggcttcggtggccctacccggtaccagttctctctgagaaactggagatgtcttgttagcataagtgtcttcattcccacctggagggtttgggagaggagcaaagcagttgaaaactagttaatgagctacaagagtcaaatagtcctctgaatggagcccccatcacaaaacagtgcccaggaggctggctcctcaagctacccatgcccagcgccctaaagcagcaccagatgctttggaattggggtgaaacacccacatggcagcctgctagcagcagtgactttgacttctggtcttaaagagtccctcacttcagccccaggagctattggtgggttttagcagttttgtctttaccgtttttagttctccttgattctttgttttcttcctttatcgtttttaggtttggtatgtgttgttttatttccatggttcctcaagtttcctttttaaacatttgcatttgctggacaattgcaattttttttaaaaaattcccctacccctgtttaaagctgaaaaatacatttggttcatgtgcattgtttacaaagcaaaaagaaaaaagagaaaaaaaaggcaaaaaatattgtgaaagaaaaaaaacaacttaatatattttggattaatatttggtatttcttttaaagtattttttgtgctgtgaacattttctgccaaagaccatgatgtgtgtctgtatgtttaagttatcgtaaatatttaaaatgtaaacatggctgttttgttatgccaccctgtaccaggattgctgccgcattccactgggtataacagtattttaattaaaaaaaaataattaaaagtgaaaaaaaaaa

SEQ ID NO: 65652 - DNA, 1000 bp, Homo sapiens
  misc_feature (1)...(1000): n = a,t,c or g
tggggcccccttcccacagccccccaggcagtagggccagggactccccaggcaggtgcaggctgggctgctggtcagcagggtgtccccaagcatggggcagaggggacacgtaggcccaccctagtcctccaccccagggtaggcagtccagagcccgtggtggcgtcgacccctgggcctggccaggacgcccgccacatcttgggatggcacagagtgaggggagagaaggcggctgggggcagaaccctgcagcctggcacagtcagctccctcgtgagcatgccctcgtcagccccccaggccccctcacagccttctgctatgagacccttgaggtgcacacaggctgggagcagatgggagggctggggtcccatgcccagatcagcaggcagagccatcactggtgcccagggctgccagcacccttggagggtggaaagaattccatcagggaaagaacgagtgggcccccagcgttgggatggcaggaagtgggggtcctggggacgccttccatggcccatccatggctctgcctcccagggctaccagcactgcctttgtgggcccttggtgccacccggccaggctacaacctcgcacgtgggccttggtgccccggccagaggcgcggacacccttctgggggcgccccaggacagacaggggatgggggcgagcaaaggaaggcccagccccagtactgagcctgctccaccaaagacaagagccacagctcccggccatcctctgagcctcagtttccccaccctgggtgctcccagatgctgagagcaggtttggngacatgggacttgggcggtggccgcgcctggctaactctgaccgtgtttggtngttcccgacgcaccccaccttgggctcgatggcgacgggctttccataaccctcgacgctcctcattgaccttggaaccgcggttttgcttttgttcgtggctccttgccccggagtcattgaccaaagagaa

SEQ ID NO: 65653 - DNA, 5403 bp, Homo sapiens
ggcgccctgcagcttccatagccattcggggtgtgcgtggggagctgctgtagggtcccagagacagttagttatttgacctaacaacggaaaacggtcaccccaggaagagtttggtgcctctgtccaggccggttccagacctgtcttgagactctctccgtatttaagtcaacattcattcggttacacagaagttactttttaatttttaaggaggaaccagtgatgattggtgacaaatctctcacaattaaaaatgggtggaagggccaaatataaaaacattttgcagtattttattctttcgtttaagaagctataacttaaaccatcttcagaaacaagatctgtcacccgtagagcttagagtccaaatagacacctatgaggcgagcacaaggggcggtgtgaggcagctgcaggggcctgaccaggggccggggttggctgtgtcctagtcgggctggggcagccactggcccccactgccccgtggacctccacagagcgagtcatggcgacggggggacccggttcaccgccagcctcctcatgcagccgcagtaggcggggggccaggggctggcacggccatgggctcaggcaggcccccgaggtacagaggggctggggcaccagctgcagccgccagcaaggggcccacggtgtggttgctctgcgcgtccacctccagccggagcacattcccgcttttcatcaccgctagccggtgccactggccatcacacagcactgaggggcgggtcactgacgtggagaactcccctgctccgtcatccgcccgcagcaggacttgcttctcggtcacctgcaactgcaagtaggggggcgtccgggcctggcccaagtggaagatcagtccggtgactgccaggggccgcacctccagttccaggcccacatcaggcagtgtagctcctgggaggtctaaagtgataactcccccgctgcctgggaagaacaggcccgcctccagggggcccaagatgcagggtgtgacccctgccatccgtgtgggggcccccaggggcctcccgtgcagcctcagtctcttcacacagccgctgaacccgacggtcaccggaagtttggagctgtggctgctggccgggaggccgcccacaaagagggtgtggggctgggggtgctctgccccctggtgctgccggtgcggcccctcctggctccaggcccgggccccgtccgtcaccagcaggatccggttcttctcccagcgcacggagaccttgtgccagcggccaggccgggagcgctggcggctctgggcgcggagccgagtcccgaggccttccatctgtgcaacgaagtggccattgctcaggaagagcgccagggaggggctgccgggcctcagacgggcagtgaagaggaggaggcctcgggagcttcgcgggaggacgtgcatggagagactgggccagttcctatgtcgggccaggatgcccacaaactccaggtgactggacagggaacccccaaactggtaggagtctcgggtggtcctgaggtgtgggggcagcatgcaggcaggatgccgggcgggctgacggctgcggcgggaggccttccgggcggtggcctgcagtcctctaggccccaggcccggggtctgggcttgcagggcgggtgcacagcccgtgctcacattgacgctgcccaggttctgctgcagatcaaatacgcgctgtgggcccaggagccgctgcacgaagacgttgctgatgcagccactgaagttgtaaatggtgccagactcaggcaggcctcccaggaggagcctcgggggcccctcaggctgcggctggagctcggggggtggtccccggtggggcttcatctgctggagctggtcatcgacatacagccagactcccgtggcattgctgtagaaggcgacgtaatggggggcaccatcggcgaagcccgcttgagttttcacttcagtcctcaggagctgtaggctcacacggccctgctgcagggacacctggcatagcccatccggggacgcccggtagtagagcagggcactgtcctgggcgctgtggaagccgaagccggagtagacgttgccagtgagcggtgccacgttcgagagcgccaggcgaaggaagccgtggccatggaaagtcatggcgcgccccaccagcaggtcggcggtgcagccggcgctcacgcctgtcgtgttcagccgcttgaggtccacatacttgcccagggccttgatgcctttgacgcagccacggactgagcctccggtggggaagagccgtcgcaggctcgggggcagctggtcgggcggcacgccccccaggtagtaggcgtcggccagctccagatcattgtcctgctccacgctgtacaccgtggcccgctccacacgcaccagcacacgcttgcggctgccccccagcaggaacacctggatcgccttgctggccgaggtcaggggcggtgggggctgcagtgggacggcctttttcaggccagccccaaagtcatacaacagcacgaggctgccttcttgcacggccaagcacaggaactggctctgctgcttcaggaagaagagcaccccgctgtaggacacgagccgcagctcctgctcgaagcgcttggtggtgctgatctgactgtcgaagctgatgcgggcgaagccggtgccgtccaggtaggagccgtccgtgagccacgggtccccggtcgacttggagcgggcacaaggcctgtccacagccgtgtccagctggaaggtcctctcgaagttgtagaggctgaccacctcctcattcagcgtgtccatctcgatgcagccccggtagccggggaagcgaagcaggggagggggcgtgaaggtactggggtaccccccgacgtagaagacgaagtcgtctggccgcaggttgagcagcccctctgccccaggggccaccgtgtcacccttggtttcctggatcatctgtctctccactgtgacggacatgtggccaaactggagagtcctgtccaggctgacagctgcgaactgctccccaatgtcctcatcgatgcttaggactgcagggcccgcctcacccagctgatacacccagtgcaccttcttgtcacgcagagacacacccatgtagtccccagtggcctggcggctgcccatgtacatcacaaagcgatcctcggtaccctgcccaggctcaggctctgggccctgcaggtagaacttgagggcagtgtaggcagcaaggtcggcaagatcccgtggggtgcgcagctgcacccctgagcgcccgttgaacttcatgggcaccttgaccttactggcagccccccgggcctgggcaatgagctctcgcacgcggccaatgctggcggacagggccaggctggcgttgtgcaccccacggttctccaggatgctcagcttggccagcagctggggcagcgtcttctccagggtggacactgagtggcctgcgtcaagcactgcctggcccaggtcctggccccgcaggccctcgtactggccctgccaccgctccacattctcctgcatggcctgcagctgggactgcacacgggtggcggtgtcctgggcttcagcagccacagccttggcatgtgcgatcttcttgcttgtctcgtctgtgtccatggcaagcatggcctgcgccgcctggatgtgcgcctccagctggtccttcttggcccggacatctcggagctgggtcctggcaccctggagggcagcccacacaaggcccagcctctgctgttcctggagcatggcctcttctagtgcagtgctgttggccaggagctgctgggctcggtccaccaggccctgccgcaccaccgtcgcccacgtgtggtccgcctgctgcagggcctggccagcagcatcctcggcagcctgcacggcctgcaggatgcggctgtaggcgttggaggcctcgatggccctctgggtgaggcggtcctggttgacgtccaggatgatgctggacagattgagtgccagctggcccagctgctgtgcgtgggcctcggcggcctccactagacgcagcttgctgcccgccggggagaaggtctgcatcctctgcagcagtggggtccgagccccgtccaggctggcggcgaggcgctccagctcctccttagcctggtccaggctgtgcagcaatctgaagacgctggccagggtgtccctagccgcatgcagagtggcctgcagggtggcattgtcccgggacagctcctgcttcctttgcagggcttcctccaggcgctcctggttgcggctgttgagctcctgggcctcccgtgtggcgtccactgcccggttcaaagcctctcgcaggtccatgaggccggcctcgtgctgggccagccggtcgcgggtttgtgtggccagtgcctggttctcctcccagaggctgctcagctgctcctgcacccgggccagcaatctctgtgctgcagccaactcagcctcagctgctgcctgcggggcccccaggtcccgggcccgcatctcccagagcagccgctccacctcggccagtgtccggagcagctgctcacctgatggagccgaggcattggccagccccaggtggcccgtctgggacatgagctcgctcagggtgcggtccacagcccggatggccgccaacagcgtcttcgcatggcccagtgtggcctcggtgccggccagcaattggctcgcctggtctcgggtccccacggcctggccgcctagccgccgtgcgtcctgcccgaggcttgtgctctgctgctccagcacctccagctgctgtgccgtctcatggcgggggcccagggggctccggagctggctctgcaggtcagcgatggaggcgttcagcctgtgcagacgggcccaggccatggagctggcattgatgccacgcagttgctcgtgaatggcggggaggagggcgccggcccgttccaggtcatccaggagcaggaccacacagtggtcacacacttcacagtggatgctgtggcccacaggcccgcctggaacaggcacctgatgctgctggctgcaggtgtcgcagcgctccccgctgagccccggggggcagttgcagcggcccgtgtgagggtcacagcggcccccagggcactggcagcgcctgcagccctgctcagggagcccccagtagccaggggcacactcgcggcactggggtcccatggtccctggtcggcagtggcactgtccgctctgggggtggcactcggagccctcggcggccggtccacaagcacacgggcggcagcccccgcagccattgaaaccaaaatgtccctcctggcagcggtcacagc

SEQ ID NO: 65654 - DNA, 402 bp, Homo sapiens
ccacgacgcagtgccgactccccgccgtgcccccagcccggcccgggttgcggagccctgctcctgggcctctgcctgctgcgtccaccctgggggaagcgcccgtcgtaccctccacaccgggggcttcccctgaccccttaggccctccccctgcaggtgccctcgcgcccctcccggggtccccaggtgagtaggggctgaatatgacaggagaggccgccggacgggcgtggccgggagggaaatggggctggattctagagcgtcggacctggccgccagaactggccgtctccgtcccgggcactccgaccgggggaccggagccctgagtggcggaaagctggcggagcctgcccccaaaggagcactgagtcccggaagtggtctttttgtgga

SEQ ID NO: 65655 - DNA, 2410 bp, Homo sapiens
gaggaggattcgcagttcaacatcaaggtccctgtgcgttttattgcgacctgccggtgggaactttgtctccgagtcggagcagcatggagcggcggagcgagagcccgtgtctgcgggacagccccgaccggcggagcggcagcccggacgtcaaggggcctcccccagtgaaggtggcccggctggagcagaacggcagccccatgggagcccgcgggaggcccaacggcgccgtggccaaggccgtgggaggtttgatgattcctgtcttttgtgtcgtggagcagttggacggctctcttgaatatgacaacagagaagaacacgccgagtttgtcctggtgcggaaagatgtgctttttagccagctggtggagactgcgctcctggccctggggtattctcacagctctgcggcccaggcccaaggaataatcaagctgggaaggtggaaccctctccccctcagttatgtgacagatgcacccgacgcgacagtggccgacatgctacaagatgtctatcatgttgtgacgttgaaaatccaattacaaagttgttcaaagttggaagacttgcctgcggagcagtggaaccatgccacagtccgcaatgccttaaaggaactgctcaaagagatgaaccagagcacattagccaaagaatgccctctctcccagagtatgatttcatccattgtaaatagcacatattatgccaatgtgtcagcaaccaagtgccaggagtttgggagatggtataaaaagtacaagaagattaaagtggaaagagtggaacgagaaaacctttcagactattgtgttctgggccagcgtccaatgcatttaccaaatatgaaccagctggcatccctggggaaaaccaacgaacagtctcctcacagccaaattcaccacagttattccaatcccgaaaccaagtgcccgcattacagcccattcatggagccctggggctttctttctcccccagctttagtccacaacttgtaaggcaacaaatagccatggcccatctgataaaccaacagattcgcgttagccggctcctggctcaccagcatcctcaagccatcaaccagcagttcctgaaccatccacccatccccagagcagttaagccagagccaaccaactcttccgtggaagtctctccagatatctaccagcaagtcagagatgagctgaagagggccagtgtgtcccaagctgtctttgcaagagtggcattcaaccgcacacagggattgttgtctgagattctgcgtaaggaagaagaccctcggacagcctctcagtctcttctagtaaacctgagggccatgcagaatttcctcaatctgccagaagtggagcgagatcgcatctaccaggatgagagggagcggagcatgaatcccaatgtgagcatggtctcctcggcctccagcagtcccagctcctcccgaacccctcaggccaaaacctcgacaccgacaacagacctccctattaaggtggacggcgccaacatcaacatcacagctgccatttatgacgagatccaacaggagatgaaaagggccaaggtgtctcaagccctgtttgccaaagtggctgcaaataaaagtcagggctggctgtgtgaactgctccgctggaaggagaacccaagcccagaaaaccgcaccctctgggaaaacctctgtaccatccgtcgcttcctgaaccttccccagcatgagagggatgtcatctatgaggaggagtcaaggcatcaccacagcgaacgcatgcaacacgtggtccagcttccccctgagccggtgcaggtacttcatagacagcagtctcagccagccaaggagagttcccctcccagagaagaagcgcctcccccacctcctccgactgaagacagttgtgccaaaaagccccggtctcgcacaaagatctccttagaagccctggggatcctccaaagctttattcatgatgtaggcctgtacccagaccaggaagccatccacactctttcggctcagctggatctccccaaacacaccatcatcaagttcttccagaaccagcggtaccacgtgaagcaccacgggaagctgaaagagcacctgggctccgcggtggacgtggctgaatataaggacgaggagctgctgaccgagtcagaggagaacgacagcgaggaaggctccgaggagatgtacaaagtggaggctgaggaggaaaatgctgacaaaagcaaggcagcacctgccgaaattaaccagagataatgtgaacttctactaggcaaagcaatacatcggtccaaggattttttgctttcatttctttaaaagttttttgttagtttgttttttgtttttgtttttgggtttttttggctt

SEQ ID NO: 65656 - DNA, 2207 bp, Homo sapiens
agcagattgattccatcatgtttgaccaggcgcagaccgagatccagtcggtgatggaggaaaatgcctaccagatgtttttgacttctgatatatacctcgaatatgtgaggagtgggggagaaaacacagcttacatgagtaatgggggactcgggagcctaaaggtcgtgtgtggctatctccccaccttgaatgaagaagaggagtggacttgtgccgacttcaagtgcaaactttcgccaaccgtggttggcttgtccagcaaaactctgagggccacggcgagtgtgaggtccacggaaactgttgacagtggatacaggtccttcaagaggagcgatcctgttaatccttatcacataggttctggctatgtctttgcaccagccaccagcgccaacgacagtgagatatccagtgatgcgctgacggatgattccatgtccatgacggacagcagtgtagatggaattcctccttatcgtgtgggcagtaagaaacagctccagagagaaatgcatcgcagtgtgaaggccaatggccaagtgtctctacctcatttcccgagaacccaccgcctgcccaaggagatgacccccgtggaacccgccacctttgcagctgagctgatctcgaggctggaaaagctgaagctggagttggagagccgccacagcctggaggaagcgcctgcagcaagatccgaagaggatgaagagagagagggctccgagctcacactcaaattcgcgggagggggcgcccacgcaggcaccccctcttcccttactgccctccggcagcttacgagggaaggacccgcaggacgatactggacgatcacctgtccagggtcctcaagacccctggctgccagtctccgggcgtaggccgctatagccctcgctcccgctccccggaccaccaccaccaccaccattcgcagtacttactccctcgtcccgcccggtggcaagctgcctcccgcggccgcctcgccgggcgcctgccccctcctcgggggcaaaggctttgtgaccaagcagacgacgaagcatgtccaccaccactacatccaccaccatgccgtccccaagaccaaggaggagatcgaggcggaggccacgcagcgggtgcactgcttctgccctgggggcagcgagtattactgctactcgaaatgcaaaagccactccaaggctccggaaaccatgcccagcgagcagtttggcggcagcagaggcagtaccttgcccaaacgcaatgggaaaggcacggagccgggcctggccctgcccgccagggaaggaggggcccccggcggagctggggccctgcagcttccccgggaggaaggagacaggtcgcaggatgtctggcagtggatgctggagagtgagcggcagagcaagcccaagccccatagtgcccaaagcacaaaaaaggcctaccccttggagtctgcccgctcgtctccaggcgaacgagccagccggcaccatctgtgggggggcaacagcgggcacccccgcaccaccccccgtgcccacctgttcacccaggaccctgcgatgcctcccctgaccccacccaacacgctggctcagctggaggaggcctgtcgcaggctagctgaggtgtcgaagcccccaaagcagcggtgctgtgtggccagtcagcagagggacaggaatcattcggccactgttcagacgggagccacacccttctccaatccaagcctggctccagaagatcacaaagagccaaagaaactggcaggtgtccacgcgctccaggccagtgagttggttgtcacttactttttctgtggggaagaaattccataccggaggatgctgaaggctcaaagcttgaccctgggccactttaaagagcagctcagcaaaaagggaaattataggtattacttcaaaaaagcaagcgatgagtttgcctgtggagcggtgtttgaggagatctgggaggatgagacggtgctcccgatgtatgaaggccggattctgggcaaagtggagcggatcgattgagccctggggtctggctttggtgaactgttggagcccgaagctcttgtgaactgtcttggctgtgagcaactgcgacaaaacattttgaaggaaaattaaaccaatgaagaagacaaagtctaaggaagaatcggccagtgggccttcgggagg

SEQ ID NO: 65657 - DNA, 716 bp, Homo sapiens
gaaagagtgggtaatgtgtgttcactggaaatttctaacattcaaaaaggagaagggggagagtacatgtgtcatgctgtaaacatcataggggaagcaaagagctttgcaaatgtagacataatgccccaggaagaaagagtggtggcactaccacctccagaattttgtagatccaaatatggattcaagggagggagaagacaaagaactaaaaattgatttagaagtatttgaaatgcctcctcgctttataatgcctatttgtgattttaaaattccagaaaattcagatgctgtattcaaatgttcagtcatagggatcccgactcccgaagttaagtggtataaagaatatatgtgtattgagccagataatattaaatacgtgattagcgaggagaagggaagtcacactcttaaaattcgaaatgtctgtctttctgatagtgcaacatacaggtgcagagctgtgaattgtgtaggagaggctatctgtcggggattcctcaccatgggagattctgaaatatttgctgtgatagcaaagaaaagcaaagtgactttaagcagtttaatggaagaattggtcttaaagagcaactacacagacagtttttttgaatttcaggtgggggaagggcctcccaggtttatcaaaggtatttctgactgttatgcaccaataggtacagcagcatattttcagtgcttag

SEQ ID NO: 65658 - DNA, 1045 bp, Homo sapiens
tttttttttactaccacaaacaattaggaattttttatcgttatagatgttgttaaaggactccagtagcaaagatcaaagtctccgaattttgcctttggagaagggggtttcatttcagacatcaaaggtaaggctctcaagtcaatttatgctctgctgggttgagtcagtcaggatacaaattaaggtccatatatttcagtgacaagaaggaaacggttatgtaaatacacaagtattaacatcaatctgtattaaattatgtaaacatatacatcttctgaggtcagcacatagatcctccttcctttgaggcggagctcttactggaagcattgcttcgaatctgtttgggaagttgattcatcgttcaagtgctttgtagtgaacctgagggcatttagcagcccctccacactgtctggggcctgctccttcaaaacttttatgcagcctttcatatcgatcttggatgtcttgcagaaagctcccacagggtggacatggtcatagaggatgatgactcccaccatcaccctcatgcagaacatcagggtctcttcactcgtaaacctacttctgtactccggagtttccagcatgactttacagacacttgtcattgtgctgaggcagtctgtggtgttctctattggcaaagttttgttttcagagacaaagtgcattgtggcattgctaagggttttcagcattggcgtggcttctgcatagaagagggacattcgattggccatctcattattgacttcattctcaatgtctaggtgcaggccaggtgatggggtcccactttgtcacccaggttggagtacagtggtatgatctcggctcactacaacctccacctcctggatgcaagccatcctgccacctcagcatactgagtagctgggactatgggcacgcgccaccacgcccagctaattttttttttgtatttttggtagagatggggtttctccatgttgccgaggctggtctccaactcctgggctcaggaaatccacccgtatcagcctcc

SEQ ID NO: 65659 - DNA, 1866 bp, Homo sapiens
ggcccctaaaaaaaaatataaccttcccaccccccggcttataaatttgttccctttaaagggccccccccttttttttttttttgatgtacaaacgtagctgtattggggagggggtggggaggggggagggacgggtcagtcttccttcaggctcccaaacactgcggctggcacgctctgctgctccagccgaacctcgttgggctccaggtccatctcgtcctcgtcctcgtcctcgcccagctggatctcctcggggttgacctgctgtgccagctctgccagctcctcccgggaggcgtcactcctcacgaacaggatcttgctctgggcgcgcaagggctggtcacgctccgcctcagccgccagctgctctgcccgctgttccagcagcttcatgtcgtccatgccactctgcccaggggccaggtcagacacggtgcccgtggcactgcccgagaccttgagcatctgcgaggccatgaagttgacctgcgtgttgtacgtggcctgcacgctgcgccggatacgcagcatttccttgatggtgtcctcattgccatgccggacctcaaagtccttccacgtctgccagaacgcgccggtcgtccgggggtcacagatctgggagcagaagctgtagatggcccgggcgcggtcaatctccccgagcttgcactccatgtctgcaaaccgcaggcacatctcacgcgcgtgctcgtccgacagcacctcaatggccttctggtagatgccgcgggtgtgggtgaccccatagatctcggccgcccgcttgatgtagatgttgaacatgtcatactgctgggcgggctccacggccctggtggcacgctcgtacacggccatggcatgccgggccaggccccactcctcctccagctgtgcgtacagcaggtacaaggtcttggcatattttggggggcagccgtccagagcctgttcaaacaggtcccgtgcccgctccagcttgcggcccccatagcgggcaatgaatttggtcaggtaggtgctccagatgtcggacacgttgggccacttgaacagcgagatgccgcgctcgtacgccttgaagctctcctcgaagtacttgtgctcctccaggaacatggcatagttgatgacgatctggggtgttgcgatacgcaggtccaggatgcggtcgtacacggccttggtggactggaaggtgccgaggctctcctccaggtcggcgagcatggaccagaccttcagtgacttgtacacgcggttctgcacgggctctgaaccataaaagtactcggcccggcgggcaggcagcgccgtggcctttcgcagcagccgcaaggcctcatcgtagttctcgtgtcggagctccagctctccgcactgacaccacacgcttgccaggtcatccacctgcttgaaagttcaccttggtggccttctccaggatgacacgggcatcgtccaagctgtccgttgtcctcataaaacttggcaaacgcccacccacagagtgtggggcttggcttgtggccttgaaggggtccaccgtctgcacagcctctgtgtaggtgttgatgatctcccgggggcggccctggtgcagggcgacacgcttgtgccactcgtgcacgtggtgtgggttttggcgcagcaagacgctgttgaggagcaggggccgccggctgatgagctgctcgaagcgggccaggcgcagctccaggtccacatcatcctcctcctcgcgccccagctccgaggcggtctccatctttgcagcgatcatgctctcctcgaactgggcgtagctgtcaaacacctgtgtgaagtcccgcacggtcatcactgtccggatgg

SEQ ID NO: 65660 - DNA, 1804 bp, Homo sapiens
gactacgctcagcttggcacgaggagaaaacaggtattgcacagttggtgaagtatggcttaaaagacctagaggaggttgttggactgttgaagaaactcggcatcaagttacaggtcttgatcaatttgggcttggtttacaaggtgcagcagcacaatggaatcatcttccagtttgtggctttcatcaaacgaaggcaaagggctgtacctgaaatcctcgcagctggaggcagatatgacctgctgattccccagtttagagggccacaagctctggggccagttcccactgccattggggtcagcatagctatagacaagatatctgctgctgtcctcaacatggaggaatctgttacaataagctcttgtgacctcctggttgtaagtgttggtcagatgtctatgtccagggccatcaacctaacccagaaactctggacagcaggcatcacagcagaaatcatgtacgactggtcacagtcccaagaggaattacaagagtactgcagacatcatgaaatcacctatgtggcccttgtctcggataaagaaggaagccatgtcaaggttaagtctttcgagaaggaaaggcagacagagaagcgtgtgctggagactgaacttgtggaccatgtactgcagaaactgaggactaaagtcactgatgaaaggaatggcagagaagcttccgataatcttgcagtgcaaaatctgaaggggtcattttctaatgcttcaggtttgtttgaaatccatggagcaacagtggttcccattgtgagtgtgctagccccggagaagctgtcagccagcactaggaggcgctatgaaactcaggtacaaactcgacttcagacctcccttgccaacttacatcagaaaagcagtgaaattgaaattctggctgtggatctacccaaagaaacaatattacagtttttatcattagagtgggatgctgatgaacaggcatttaacacaactgtgaagcagctgctgtcacgcctgccaaagcaaagatacctcaaattagtctgtgatgaaatttataacatcaaagtagaaaaaaaggtgtctgtgctatttctgtacagctatagagatgactactacagaatcttattttaaccctaaagaactgtcgttaacctcattcaaacagacagaggcttatactggaataatggaatgttgtacattcatcataatttaaaattaaattctaagaagaggctgggtgcagtggctcacacctttaatcccagcactttgggaagccaaggcaggaagactgcttgaaaccaggagtttgagaccagcctgagcaacaaagcaagaccccatctctataaaaactaaaaaaattagttgggcatggtggcacatgcctgtagtcccagctactccagaggctgagatggatcatctgagcctcaggaggttgaggctgcagtgagctgtgactgcccccctgcactccagtctgggacaacaaagcaagaccctgttttaaaaaaaaaaagaaaaaaaaattttttttctaagaagctgtcctacaaagttgagctttgttagtttttcatgtgtaatatattataaatttatcttttgggatataataaatgctttcatatacctgctttttaattgtaaatctattaacactaaaggttttagggagctggaacataaggtaaatagccttttcttcccttggctgtaatgactaagcacatgaaaatatccaaaccaaagggcataaagaaaccaaaaatcataattaccggacgcgtggg

SEQ ID NO: 65661 - DNA, 671 bp, Homo sapiens
ttgtaatacagtccagctagattctgggatagattaccggaagggaacttcctgctgcaggaaaactctactacctcacaagtgaagctgatgtggaggctgtcatggataagttgtttgatgagctggctcagaaacaaaatgatttaactagaccaaggattctaaaagtgcaaggcagagagctgcgcctgaataaagcctgtggaaccgttgccgactgcacatttgaagagctgtgtgagagaccacttggagccagtgactatttggaactatcaaagaattttgatacaatatttttacgaaacattccgcaatttactctggcaaacaggactcaaggtcgaagattcataactctcatcgataacttttatgatctcaaggtgcgtataatttgctctgcgtcgactcctatatcaagcttatttttgcatcaacatcatgacagtgagttggagcaaagcagaatactgatggatgatttggggctgagccaggattcagcagaaggactctccatgtttaccggagaagaggaaatctttgcatttcagcgcacaatttcccgactcacggaaatgcagactgaacagtactggaatgaaggagacagaaccaagaagtaactgccacttttgcataaataaaactctagacaaatggaa

SEQ ID NO: 65662 - DNA, 2950 bp, Homo sapiens
ttttttttttttaacctatgaaaattctttattgttaatttctttctccaacagatatatttttagttgaaatatggagccacagcaacactttgacttttcctcttcagaagatgagacaggccggggtcatcattgttacaaaagcaaggcctgtgatcgtgacaaggacaggctggggcagagaccacacgctcaaccaggtatccaccaggtgtgggccctttataggagctacaaagagggggcagccagcaatgtggcctcgacacctgactccaggcactccgacctggaggagggagatgaaagaactcacctttccccaggggctcagccagacctccaggcccctgagcggggagagtgcgtgtgtgtgcacatgtgtatgagtgtgcacacgggtgtgctcactcacacagcacatgcacacatgcgctgcccctcctgagatgctctcaggtccctgccagggtagggttgtagctgtgttccccacagctgactgtcagctaaccagggctaggggtgagtgcatggtggaggacacagggtcttagcctgatgctcgaatcctccttctggaacaggctgatggtgccagagcacagcacgaaccacctacccaccatggggctctccagggctcggtcatttggctcctgtgcacttcatgacactcaggagcccctacggcccgagccccaagccccgagaaaggggaaagatttggttctgagagggtcccactggccctgggcacctaggggcctcagcatctaccagcataggggagggtggcggcccccttcctgaggactgcatctttctccagccgctctccccagatcccacacctgccagtgagccagggagataggaggaccacctccctcccagggaagggggtggcaggtggaaggacttaggtttggtgcaggaacactagacctgcccctcaccccctgcctccaggactgccattctgaactgcaattctgggcctgagtttggcttaagggccagtctgaagggacttgcttggtgaaggcccagccagctgtcccagtggcatttcataaacaaacgatactgtcccttccaggctgacctggagagagacccttccaaaggcagtggagtggagggcatgggcctccgatgagagaactccagagctggccgggacctactgtgctggcagcagacaggtaggagcctggctggggtaggtcaggggttggtgtttagctggaggtctcctgggccttgtgagccaagctggggcttttatgtgggttctgggctcccagagacctccgccagatgacctccagagtctttggggtctcacactgggagaagctcctcccctttccaagatgacccccaaaatgaggcctcaggaagtggtacacagaaggatggccaagaggacagagctgggtagtacgcctctgctgggcgcggcctggccggtggggcctggacggtgcctcagcaatccctttctcaccaagggacgctggctggttgccagctcatgcaggcagtgcacataaatcccgcctaacggttacctctaggccctgggctgctcgttcaagacgacacaaagctcctcaggggcccaactttccagctgtggaccctgctcagggttctcggggtccccttgctggtggaggcaggtgcactcattaaagcaaatgtactctccaggtggaccctcaggcccagagccggcagcagaggggggtgaatccatggcaacaggagtcacaggtgaaccaatgggaaaccaaacacacgcatcgaaagccaatcaaacacaaaccccaaatgtgaaggccagcagcaagttctttgtgtaataaatattgcaaagcgcacttggtttctttcttttcaagtcaaatataacgactaatgtcccagaccctgttttctgcattcaaaatagggaagctgttgatatcagcagaacacctgcagccaaagaaaaaaaccgtttcccattaaccagccaatcacagatcctttccagtttaagcagccaatcagacctcttcacatttctaaaaaaatgacctaactaaagcaccagagctcggagagcttccagggaagccagataccgaggcgcaaattttttaaaaaataagagtcagaaataaaaataaaaggtttctgttggtcaagatttaaaaaataaaaaagtttcttcctgcagccaatcacaagtccatccctttaagccaattataaacgcaccactggtgtctcccttgatgccagccccactgagtagctgtgaggtggggtggggcagggcagggttgggtaggggaagggggaggtggggcaaggggggctgctgccactcagccggcccaggagccacacagatctcttggccctcaacagcatccagggtgttccaagggctttgcagctactgcctccggtcttccgtctccgacctggaaaacgccatcaccacgtcctctgcaccctggtcgatggagtgcggaggcagctggctgagctggctgttgaccacccctgcataggtgcgcaggaactcctcctcgctggctgtcaggttttgatccccatcttccgcagcatgagcagcactcggaccttctgctgaaatgtacatctccttcaggactcttccccgggagcttccctcgcggttcatccccctgcctggctctggggactccctgcttctggaaattaacttcaggcaaacaggtgcctcaactgtgaggggagggctgtggctgggcagaagtaggaaggtgccgccctgggccgcccgacccggccgggccggcaggggcagcgggtccggcgcgcagcgcgcggcggcctgttccggggcgtgctcagcccgagcagccgctgcggcggcggcagtagcagcagcaggagcggccgc

SEQ ID NO: 65663 - DNA, 3222 bp, Homo sapiens
gggaaaagaggacaaaatggatttaaagaatttacaaggcaagaacagatcaactgtgtaacaagagagcctcttactgctgatgaggaagaagcattaaaacaggaacaccaacgaaaagagaaagagctcttagaaaaaatccaaagtgccatagcctgtaccaatatctttcccttgggtcgcgaccgcatgtatagacgatactggattttcccttctattcctggactctttattgaagaggattattctggtcttactgaagacatgctgttgcctagaccttcatcatttcagaataatgtacagtctcaagatcctcaggtatccactaaaactggagagcctttgatgtctgaatctacctccaacattgaccaaggtccacgtgaccattctgtgcagctgccaaaaccagtgcataagccaaatcggtggtgcttttacagttcttgtgaacagctagaccagcttattgaagctcttaattctagaggacatagagaaagtgccttaaaagaaactttgttacaagagaaaagcagaatatgtgcacagctagcccgtttttctgaagagaaatttcatttttcagacaaacctcagcctgatagcaaaccaacatatagtcggggaagatcttccaatgcatatgatccatctcagatgtgtgcagaaaagcaacttgaactaaggctgagagattttcttttagatattgaagatagaatctaccaaggaacattaggagccatcaaggttacagatcgacatatctggagatcagcattagaaagtggacggtatgagctgttaagtgaggaaaacaaggaaaatgggataattaaaactgtgaatgaagatgtagaagagatggaaattgatgaacaaacaaaggtcatagtaaaagacagacttttggggataaaaacagaaactccaagtactgtatcaacaaatgcaagtacaccacaatcagtgagcagtgtggttcattatctggcaatggcactctttcaaatagagcagggcattgagcggcgttttctgaaagctccacttgatgccagtgacagtgggcgttcttataaaacagttctggaccgttggagagagtctctcctttcttctgctagtctatcccaagtttttcttcacctatccaccttggatcgtagcgtgatatggtctaaatctatactgaatgcgcgttgcaagatatgtcgaaagaaaggcgatgctgaaaacatggttctttgtgatggctgtgataggggtcatcatacctactgtgttcgaccaaagctcaagactgtgcctgaaggagactggttttgtccagaatgtcgaccaaagcaacgttctagaagactctcctctagacagagaccatccttggaaagtgatgaagatgtggaagacagtatgggaggtgaggatgatgaagttgatggcgatgaagaagaaggtcaaagtgaggaggaagagtatgaggtagaacaagatgaagatgactctcaagaagaggaagaagtcagcctacccaaacgaggaagaccacaagttagattgccagttaaaacaagagggaaacttagctcttctttctcaagtcgtggccaacaacaagaacctgggaagatacccttcaaggagtcagcagagcacacccaaaacaactgtttcttctaaaactggtagaagcctaagaaagataaactctgctcctcctacagaaacaaaatctttaagaattgccagtcgttctactcgccacagtcatggcccactgcaagcagatgtatttgtggaattgcttagtcctcgtagaaaacgcagaggcaggaaaagtgctaataatacaccagaaaatagtcccaacttccctaacttcagagtcattgccacaaagtcaagtgaacagtcaagatctgtaaatattgcttcaaaactttctctccaagagagtgaatccaaaagaagatgcagaaaaagacaatctccagagccatcgcctgtgacactgggtcgaaggagttctggccgacagggaggagttcatgaattgtctgcttttgaacaacttgttgtagaattggtacgacatgatgacagctggccttttttgaaacttgtttctaaaatccaggtcccagactactatgacatcatcaaaaagcccattgccttaaatataattcgtgaaaaagtgaataagtgtgaatataaattagcatctgagtttattgatgacattgagttaatgttttcgaactgctttgaatacaaccctcgtaacacaagtgaagcaaaagctggaactaggcttcaagcattttttcatattcaggctcaaaagcttggactccacgtcacacccagtaatgtggaccaagttagcacaccaccggctgcgaaaaagtcacgaatctgactttgtccttctaaaggatatatttgaagaaaaacaaattgttcatgaaaatggaacattaaatcatgctgtataaagcaataacaaacaattgattgaccacatgaaagtgtggcctgcactatattctcaattttaatattaagcactcaggagaatgtaggaaagatatcctttgctacagttttgttcagtatctaataagtttgatagatgtattggatacagtactggtttacagaggtttttgtacatttttgagatcattcatgtgtccagagatcttggaaaatattttttcacccacgatttattttgttattgatgatttttttttaaagtggtggtattaagggagagttatctacatggatgagtcttccgctatagcacagtttagaaaaggtgtttatgtcttaattaattgtttgagtacattctttcaacactacacatgaatgaatccaatcttataaccttgaagtgctgtacccagtgctggctgcaggtattaagtccaagtttattaactagatatttatttagtattgagagtaatttgtgaatttgttttgtatttataaaatttatacctgaaaaatgttccttaatgttttaaaccttttactgtgtttttattcctctaacttccttaatgatcaatcaaaaaaagtaacaccctccctttttcctgacagttctttcagctttacagaactgtattataagtttctatgtataactttttaactgtacaaataaaataacatttttttcaaataaaa

SEQ ID NO: 65664 - DNA, 2384 bp, Homo sapiens
tttaatgccaaagtatgggtccatttgagcactttgcctttatggctactgaaatcatgaaatcaatttctctcaaagattttactctcagtgaggtcacatacatagttcttaatcagtgaaaattataggcagctttctatttatcctttaaaggaaatatgtcttagatggaaagaatataaagtagtaaagcaaaagttaacctaggggaaactttttcaccaacagattatctagacatcaattcataatgcactgggagatctatagtatataccacatggtatatttagggtacacagctctataggatttgagatggctgctcacagcaggagcttaaagaaagatatggaaaaaatatattttataaaagatggaaaaattcaagttgtaaggagtaaaaatgaaaatttgaaaagttaacgcatatttgtttttatttataggtaactaccacatgaattataaagacaacaaaggatgtcagaatgaacatggataggtgtatgcatactacggctaaggagaaacaatgttcctacatattatgggtagtgagaacattatctgtataacagggaactgtgattatttaaaaatatgcagaacttatttcatctgtgctttagaaataactgtatacagtgttataagttgaaaagaactcaaaataactaataccaaatatacacctatgtattagaattcaaaaaagctgctttctgtgaagtcaatcagctatattaaaaaatgacacaaatccaaaacaagatgcatgttatatataaagggacattgtaagtttccttgctgcattaaacccatggtttaatccatgaaatttccttttaattatcatttagacagaagcatgcaaatagtctcaggatctacttaagaacctttcccaaatccactagttacactccccttttcaggaactaagcaggtattcgggtagctgcttcctcctctgcatcagctcggtttgcattaatttctgcaagtgttcggccaaaccgtgcccattcatcattgcggggaacagcaatctgctctcccacatcgtatataacaatctgtccttcagaatcacccacagcaatctctctgccagaatgggtccatctcacacgattaagagcaggattaccctccacagaaatgctggcagttggtacctctgtgtcattattgagattccacaaatccaatctccccatgccatccacacaggcaaacagggctgggtgggtaggtgaccacataacatcataaacatagcctgcgttatcttcaaatgaatacaaaggcttgttattcttagttgtccaaagctttactgtccagtcaaacgatgaagtgacaaaaagatgtgagaagtctactgctccaacagctgcatgacaatggatgccagtgattggtccttgatgcccctcaaacatctcactgattccagctttgctgccatggcggcatgctgtgtacacagaaccttcttcactcccaacaacaaagttgttgacatctccaacagggaaggacatagatgtcacagctactgcttttgactgtttatgaaccaactccatgctatcctgtggatgggaaagcatgtccagactccatgaacaaatttttccatcagtagagatgctaatcagattgtgagcattttgtgttccaacaacatttacacaatatacagggtgtgtgtgtgcagctgctgacagtggagttctttgcactggagttcttttattgctacggttatcccaaagcacaatttggcctgaatatgtaccaccaacaacaagatttggatgaaattttgcaaatgtggcagacatcacagctgactggcagtgaaacacatactctggggtagtttttttgtatttcatattccatacaagggccacaccatcaggctcatgaggggcatcttcattgttgttataggaagccacgagtaactccgggatactgagatgaccaatccaaacaactaacccacccggatgctttggaccaaacgttcgtccaaaaaattgtcgatttaatgacagtttagcacctgcttgaatctctccttctttgtcattccaaaatctctcccactatagtcaaagaagatgttaatctgctcagaaagagctctttctacaaatcttgtagaatggtcaaagaaacttaaaaattcctcagagtgcaagatttgttgcttttcttcttcagtcagctcatgagggggagctttactattcattttcctcatctttctttaaagttttctcttcttcaggttcaataggtggtttaggagccactacatcatcatcttcctcttcatcttctttgggttgagccataac

SEQ ID NO: 65665 - DNA, 5182 bp, Homo sapiens
catggcgcacgctggcggtggcagcggtggcagcggtgccggcggccccgcgggccgggggctgagcggcgcccgctggggtcgctcgggctccgcaggccacgagaagctgccggtgcacgtagaagacgccctcacctatctggaccaggtgaagatccgctttggcagcgaccctgccacctacaacggcttcctggagatcatgaaggagttcaaaagccagagcatcgatactcctggagtcatcagacgtgtctcgcagctcttccacgagcaccctgacctcattgttggattcaacgcttttcttcccctcggatatagaatagacattcccaagaatggcaagttaaacatacagtcgcctctgacaagccaggagaattcgcacaaccacggggacggtgcagaggacttcaagcagcaggtgccgtataaagaggacaaaccccaggtgcccctggagtccgattccgtggaattcaacaacgccatcagctatgtgaataagattaaaacccgcttcctagaccacccagaaatctacaggtcattcctggagatcctgcacacgtaccagaaggagcagctgaacacgaggggccggccattccgaggcatgtctgaagaggaggtgttcaccgaggtggccaacctcttccggggccaggaggacctgctctcagagtttggacagttcctgcccgaagccaagcggtctctgttcacaggaaacgggccgtgcgagatgcacagcgtgcagaagaacgagcacgacaagaccccggagcacagcaggaagcgctcccggccctcgctcctccgccccgtgtctgcacccgccaagaaaaaaatgaaacttcgtggtaccaaagacctgtccatcgctgcagtggggaagtacgggactctgcaggaattttctttctttgacaaggtccgccgggtgctgaagagccaggaggtgtatgaaaacttcctccgctgcatcgcactcttcaaccaggagctggtgtctggctctgagctcctgcagctcgtcagcccatttctggggaaatttccagaactctttgcacagttcaagtccttcctgggggtaaaagagctgtccttcgcgccacccatgagcgacagatccggggacgggataagccgggaaattgattatgcatcctgcaagcgcataggatccagctaccgggcactccccaaaacctaccagcagcccaagtgcagtgggaggacagccatctgcaaggaggtactgaacgacacctgggtctccttcccttcctggtctgaggactccacgttcgtcagctccaagaagacaccgtacgaggagcagcttcaccgctgtgaggacgaagccgcttccagttagacgatgtcctggagacgaacctggccacaatccgtgtgttggaaagtgtgcagaagaagctgtctcggatggcgccggaagaccaggagaagttccggctggacgactccctgggaggcacgtcggaggtgatccagcgccgtgccatttatcgcatctatggcgacaaggccccggagatcatcgagagcctcaagaagaaccctgtcaccgctgtccccgttgtcctgaaaagactgaaggccaaggaagaggagtggcgggaggcccagcagggcttcaacaagatctggcgggagcagtatgagaaggcgtacctcaagtcccttgaccaccaggctgtgaacttcaagcagaacgacaccaaggccctgcgctccaagagcttgctcaacgagatcgagagcgtctacgacgagcaccaggagcagcactcggagggccgcagtgccccctctagcgagccgcacctcatctttgtgtacgaggaccggcagatcctggaggacgcagcagcgctcatcagctactacgtgaagcggcagccggccatccagaaggaggaccagggcaccatccaccagctgctgcaccagttcgtgcccagcctcttcttctctcagcagctggacctgggcgcctccgaggagtcagctgatgaggaccgggacagcccccaggggcagaccacagaccccagtgagcggaagaagccggcgccaggaccccacagtagccccccagaggagaagggggccttcggggatgccccggccactgagcagccacccctgccgcccccagccccgcacaagcccctggacgatgtctacagcctattttttgccaacaacaactggtacttcttcctgcgcctgcaccagaccctgtgctccaggctgctgaagatctaccgccaggcgcagaagcagcttctggagtatcggaccgagaaggagcgggagaagctgctgtgtgagggccgcagggagaagggcagcgaccccgccatggagctgcggctgaagcagcccagtgaagtggagctggaggagtactacccggccttcctggacatggtgcggagcctgctggagggcagcatcgaccccacgcagtacgaggacaccctacgcgagatgttcaccatccatgcctacgtgggcttcaccatggacaagctggtgcagaacattgcgcggcagctgcaccacctcgtgagcgatgacgtctgcctgaaggtggtggagctctacctgaacgagaagaagcggggtgccgctggtgggaacctgtcctcccgctgcgtccgcgctgctagggagaccagctaccagtggaaggctgagcgctgcatggccgacgagaactgcttcaaggtgatgttcctgcagcgcaaagggcaggtgatcatgaccatcgagctcctggacaccgaggaggcccagacggaggaccctgtggaggtccagcacctggctcggtacgtggagcagtatgtggggaccgagggcgcgtccagctcgcccactgagggcttcctcctgaaacctgtgttcctgcagaggaacctcaagaagttccgccgccggtggcagagcgagcaggcgcgggccctgcgcggtgaggccaggagctcctggaagcggctggtgggcgtggagagcgcctgcgacgtggactgccgcttcaagctcagcactcacaagatggtgttcatcgtgaactccgaggactacatgtaccgtcgcgggaccctctgccgggccaagcaggtgcagcccctggtcctgctccgccaccaccagcactttgaggagtggcacagccgctggctggaggacaatgtgacggtggaggcggctagcctggtgcaggactggctgatgggtgaggaggacgaggacatggtaccctgcaagacgctgtgtgagacagtgcacgtgcacggcctgcccgtgacccgctaccgcgtgcagtacagccgccgcccggcctcgccctgacccgccctcatgggcaccgggcaggcgcctcacagagcacagacgtgccctcggccttggtcgtgtcggggccgttttcttgaacgacgtgagaggcatctcccagcccctctgctgccggacagcgcactccagggcaggacgccgcccccgtggctcccggtctcctgtgggcctgctgtgtgccaaacctgagctacctgcacccgagccctggggctcagccccaccacaggggcgggtggacgtgctggccgaggaacaagcaatcatgtttgcgtccccgtccgtcacatgtgccaaatccctggcaggcagatggctcctgccccatattcttgccgtgtcttggaaaagtcacaggtgacagccctcctgaggcccacactttggagggggtccatgtccaagagaccctgacaaggaaggagttgagccctgggtaggcttgcttgaaaagtgagtccttccagaatattctcagagctgccagaaacatcatctgagggtttgggcatcagctctgcctggctggtgttcaggccctcagtcactttggaagtgagaagaacccttcagccaaacctttgggatcccattttgaagtccagagctggagcaggcgggcagtgccctgggagaccccgctctggataagacacccaaccccaactccagcagctggactctgggcccacaaggggagggaccccagccagtattccctcagagccggcacgaccctgctgtggggcggcgggcccagtcgtgttcctgcagtgggcaccctaggcgtatgtgtatacacgcacagatatttattcctttcgcttttagtggttgttatttctgtagcagccaagtcctgcggctccctggggctgagatctccctttgtggaactccgagagccgccctgacagtcccagccgccacccaaggagccccatccgcccacccaccctgggacccacgcggccactccagggatcattgttgtccttttgtgaggggctgaggcgactgtcccatggaggcatccaaggctttctgtgccaagaatcccaagtgactggggctggggaccacttctccaggcctctctccccgaccatgagagcccctggccctggcccctgcacaccagtgggcccagaataaccgccacccttgccatcctgcaacagctggactcaagtttccaggaagtggagatgtgtttctagaagtttcctgtggaacctggaggctcctgacgcctttgactccaggctgggcgattccgatgctgacccgtcctcctgggctccccacccccgctccccaagtgtcacacaggcactttgtacacatcctggttttctaagaagggaacttgccatcaagattcctgtaccaggcccacggccgtctcgggcagagccacctgggccccgggtgcagccggagaccccgccgagcccctcctcccagtattcccatccccgcatgcttctagggagcgcctcttttccgttcttgaggaatttctgttctggggcttgtccttcctttgcagctgttttgaatgtagttttccttttctatttatttgcacattaaagttaataattgaatattgacatcaagccgcgagggtgtgttggtcttcctgtgagagccttgctgacttcctgccaccaggtcagtgggctggacccatgagagcaaggggtggctgggtgtgcctacctgggaccaggggagtcgaagcccctccttgaaccaagatcatctcacaccctgc

SEQ ID NO: 65666 - DNA, 1507 bp, Homo sapiens
ggaggcaggaggtaggaatggaaatttcagaaaaccagaagaaacttgccatgttaaatgctcaaaaggcaggacatggaaagtcaaaaggctacaacaggtgccctgtggccccaccgcaccagggcctgcaccccatccaccagcgccacatcactatgcccacaagcgtcccccagcagcaggtctttggcctggcggaacccaagaggaagtcctcgctcttctggcacaccttcaacaggctcacccccttccggaaatgaaaacaggaggctgtgcttccatggagctgggtgtcaagagaagaactgtctttgtttcttgggtgcttcaatccagggaaagtttcttggacccagtgataaaaacttccttttagggatcaatgaaggagagaaggtcttggaatcaccttcagtctttggagacccagctgcctttgtggaagggaggagacggtcatgacacaaagctttatcctacacagaaacacccgtgacccactatgagatggcccagatgtgggacccggtaccatgctctaaagcgagtgattaggcagcagctgaagccacccctgctgatgatgagcaagtgcctgctgcaggtccaaacacagcatccagggctttgcagttcctaaggagtgatgaggttagaggatcacttctgcatttgattttcaaggatgccgtcaagacggggttgacacaatgctgcacgtgtctggtcacacttagaaattgagctcttactctcttctgtaatactgggggacctacagctgccgtggggctgaccacggtgttccctggcatcgtctgtgtccacacagatgctaactggtagtgcaaatgtcatcctgcaaggttcctcttcctgcaagcaaagtggagagaaagaagatgcatctgtcaccttcatcagggtcctcagtgcagagcaacttacgcatcctcaagaatccactgcttttcaggcaaggagggagaaatcctgctgcacactggctttgtcccggagtcggattccctcctgcctgcacgccttcagtaactccgagcagaaatcacatcttgcccacatgctgtaacctaagaaactgctatgcaaggctgggtgctgtggctcatgcctgtaatcccagcactttgggaggccaaggcaggtggatcacctgaggtcaggagttcgagacaagcgtggccaatatggcaaagcccagtctctactaataatacaaaaattagctgggcatggtggcgcatgcctgtaatcccagctactgggaaggctgaggtaggagaatcttttgaatctgggaagcggaggttgcagtgagctgagatcgcaccactgcactccagcctgggagatacagcgagactgtctccaaaaacaaaaacaaaaacaaaaaacattcagacaactgtttgcattataaaaagctcatttactgtaatatttatgatacaaggaatatgaaaatgcactggtcagaagg

SEQ ID NO: 65667 - DNA, 5771 bp, Homo sapiens
ttttttttttttggtttttaaaaacagaatagaactttatttagtggattcaagattttaaaaaatgattttacactttaaagtgtgcaataaattttgatacatcaatcttgatatatatatttactgtgtcagaagattttaaaaagtcaaatagtttataatcaaaatgaattgtgtttaacttgatacttatatggaataacttcagcattataaataaaaacccaaaacaaacaccatttaaatttgagttctgatgaaatgcatttgtaatacaattttgttaaaaatttttaataagagattgtaggctaaagttatatgcttgtaatttctagaaacatatgatgtccttgctttatgaaaatgatcctactgactgtcccgcagtagaatgcatttgagacacttttctatctgggataaggggctgtgttgcttgatacatgtttcttccagaccatgagcccctagtgggagatgaaggggatgaaggtctgcagctggggactggtggcagttgagtctggtctcatttaacatcatgttctatgagtcacagaatcatccaaatgagtatcagccagatacaaagaaagctttgtattttctcatgcttagatagttcacaaacataatatttaaataattgtggcaaaatcctgttttaacaaaaataattttcacattccattctacataatgaggacatttccaaaatgcattggcccacattactattactttgctgatatgaagaaaatgaattatgatggtaagatccatatacagatatacacatgtgtatccatattatttatatatttaatatcagaaatgttcctacttccttgtctcttagaagtcactttacttttaaatgattctttgggagtgtggtcaatttgcacacctgacttgacacaatctgacggtcagcacaaagcaccttctgattgtataacactttacaaagtactttttgctttctcatctgtctggaacttctgacaatctgccatgacaatgagggtgggcatgattactctcatttgacagatgaagaaatatgaatccagagaggttaagtaagctgcttcagttcacatggctggtgagatatcaaaccaggactatacctggtgctcatccttgactgctggttgacaatggtgaagacaaaacgcagggtacattaatctgtgaattgcttcccctaaaccatgctgatgctgtggtgtttggaaagtagaaagtggttttgctactgtcacatttcagatttctatcaggtgctaatgagtactcatcatgttataccccaacaaacttaaaccaagaaccagaggtactttttacagttctcacagggtgtgtatatatatatatttaagaagattcgtaacatatatttacaattattcctaaatcaccaagataccatactgagaaataggtttaatctttttaagagcattttctatataatcattccaatataaggatgaaacaatataagtatgaaatataaatacagtcttggcacactttatctttgcaggtgtgctggaacctagaacactttcccttttgccttattctgcttacgcctacttttgattgttttacaaattcatagacacatttgcaagttccttgaggatcaggactcagcttctctgaagctgacaactcttaccccagagcatagcacagcgctaggcacgcagcattcaataaacgtttgatgaatacatgtacatggtctttatgtacttcagtttgggttaaaggaagatatgaactgtagcattttgcctacagaattctggatttgtaattaaaaacattgtcttcatagtaaacagtattttaaaaggcataagaaatagtaataaatttaatacaaattatgcattataacaactctttggttattttaaacaaattatttggtttttttactagagtgatactaaaaatataaaaatgcgactacagaaattagcttaatctgtaaacatgataaaccctgtaaacatacatttactacataattgtacaagtgtaaagaatatctagtaaaggcaagtgctatacacttcatttagttcttcaaggcatatttagaaatactgctttgtggatctttaatgtttgaagaaggaattcttctaactacactaaaatatgaaaaagtgatgactataccaatggtcaataggatatgcaggcaagagaaaggctttaatactttttacccattgcaaatatgaatttgcttcacatgtcttatgaaccatctgtttagtaaaactgcatattaacaaaagccaaatacttcgaaagtgaagaagtaaacagtttttctgtgagttagttggctagaaatataggtaacacactttccaaagttttttcccaaaaatctaggcagtaaggtgcataaggcaggtctacaaaataataaatagctgcgagtagcactaaatatattgtagtttactcaatagtaaagtatttctttttccaaatttcagttttccatctcaaaatgcatcaaacttttcacacatgacacgtatcacaaatatttcacagttatcatctcagtagtttaagaaaaaagctgcctggcagatactatacaagaggtaaatgttaaggacaaaattcactatttaagtcatacaggacttatatcctattgtgtgaactctaaagccaggtgtggtggtgcctggctttaggcaggcacctaactctaaagacagaatgaaacaactgtgtaaatgcaacacattatttaaaagtgattaaaaataagttgtcgtactatttcttcaaatgctttttatatgattttcttcaagatctgggaagactcagtggccacattttagtagttccccggaaaattttaagtcaagattttggttataaaactatggcagtaaaaacactacagattgttatttgtaatctaatcaactccatcaaagccctgggtgttttcaattgccatctgaagtttatcccataattcttcaaatgattcataaggtggcaagtccaggcgattaaaacaggtatgagctcttggcagcttttcaggagtaccccactgttcaactgtaaatgactggtggtccatttgaaccgtatagttcagcaaatccattcataggcacccgagatgtgccagtgacaaactgaagtaatcttattcttttttctgaatccatcattaaaacagccttccaaaaccactgtataacctgatgatttgcactgtagccatttttatactttgtatgttccctccagtcattcacatcaacatctcccagtccacacataagaagctctagttcattttcatcaaaaattttgatgagatcctgtggtattagttcaaagaatccctctttaaaagcagccatttgcttctggattcggtttacaaatcgccattgtattacaagataaatatattcctttttgttcttattggtgacaactatttctgatccaccatttttcagctcatgttgatgtgtctgtccaaaaagttcttcatctatgataaacctgaggtccaattctgttgggtcattttcaagaatccatcttagggaattgtaatattcactatccacagattccatatcatgaagggttattggtttgtgaagcatcatcttgtaaaatgggcggatgaaaaaaccatccaacagtttgccatgataaactgccattccagctacccgaccaataaacttgaagtaagagaggtgatcttcgttacacaatccagagtttggatttatctgtagggtataattgtccgtagcagaatattcaaacaacccataataagggttaaacatttcctttgagatcaggaagaaccattctctggcaactcctccataatccaatcccttttcaccatcaaactcaatccacagtcgagccttcaggaagtctgctctcttgacacccataattctccggtaagagtcttcaagaacagttgctcggcgaagtttcatttcaaatttgtttggaatgtcattctgcttcttcaactttcttcggaagaactcatactttcttttgtaatccctggagtagggcactgctggtccagttattgctacattctccaaccgaggatcttcccattgtgttctttttatattgtgatttatgtagaagattcttccatctgtgtgagttctctcttcccatcctggaggtaaaggccctagatcattggaagtatcaagtgatgtctttcctctcagatgggctggaattttcaatcttggatcttcccaggtggtggttttagtgttgtggtcaataaagaaaggcctcccatttggtgcatgccggacttcccagcctttaggaaggaatccttgctcaatttcagatggctgggtcacctgctggcctgaatcactggtggaggcttgtgattgagggcctgcagaactctggcttgaggtcagctgactggtctccactgtggcctgtacagtgggctttgtccaagtagtcgttctggaattgtgatctacataatatgatcttcctctttcatcttgtttttcttcccaacctggtggtaatccagatgaagtaggcaaaagcacaggaagtgtaggttgttcctcaaaagtataggcttgtaagctgcctcttctgctggaatgatttgagctcgatgctggctggctcacggctgaatttccaaaaatggtgagtctggcattcaattcttctgcaagatgagttggaacatccaagttacttgacggtggaggtgatgggaaggcctggctgctatacatggtggcttcatcttctcttataatttcccagttctcggaagactcttggttgtcaacactttctgtttcctcggatatctgccgcctggtggtaaatgcacgttgtgcttgcagttgaatgttgccattctcagcatctgttaggttgtcctgaggggttggtcttttccactgtgttcttctagattcatggtttacataataggtccttccaaggatatcctgcctctcttcccaccctggaggtagaggagaaggttcttgttgttgctgcaaatggcaagcagcatctggttggtccaaaacaacccagccaggctctaattcctcagcctgttctgcattatcatcttctgagccactggttttaggtaaataagtcatttttagtctcagataacctttaactcttgatttgtgacttcttggatgaagaacaaaatccttaaatgtatatggtctctccaatcttggattttctgtcggtaatggataaagtggaacatccacttgacctaggaaatcatctcttgtcaatcggttttcgtcaaacacttcaaaaagaagccggtgctgctgaggatgaactctgaataatatttcttcattccactttggattcaaactctttttaatggtttttgtttgcacacttgtaagaactccattcattgggtcatataacgtcactctcacgtaaggatcactagctcccaatatatccttcttggcaaggcctatttcggctataactcttactctcacaattcgtgaattttcctcgtcctccaggagcccgaacacctccaccgcgcaagttgccatttccgaacgcttccagcaaaccggacgcgctcgcccccgcccagggcaggcaactgtggaggaggaggaggagaagcggga

SEQ ID NO: 65668 - DNA, 562 bp, Homo sapiens
ccagtagctgccaggctgtctgctgtgaccccagcccttgtgagccaacttgctcagagtctagcatctgccagccagctacgtgtgtggctctggtctgtgagccagtttgcctccgccctgtctgctgtgttcagagctcgtgcgagccaccttctgtccccagcacttgccaagagccttcttgttgtgtctccagtatctgccaacccatctgctctgagcccagcccctgctcaccagctgtctgtgtgtccagtccatgccaacctacttgctatgtagtcaagcgctgtcgttctgtctgccctgagccagtttcctgcccatctacctcctgccgacctctttcctgcagtccagggtcttctgcatctgccatcccgaccaacttgtcctaggactttctacatacccagttccagcaaacggccttgcagtgctacgatttcctaccgcccggtctcccgtccgatctgccgcccaatctgctctggactcctcacctataggcagccatacatgacatccatctcctaccgtcctgcctgctatcgcccat

SEQ ID NO: 65669 - DNA, 2072 bp, Homo sapiens
tagatttcagactatttatttcaactcagtaagtaatcttcactgagaaatgtcaaacctgatttttctcatcaggtatactaaaacaatccgcccaccctctctttcagctttacatgcaactctaaacaaacaggttttctgatggaagagatcaatgactttagatgatacacaattttatgtctttataagtcacgtttctacactgaaacatgaaagctccacttaaaaaaattaatattgttttcagagcaatatatgcatttattataaatgaacagaattcatttgagacactgatttttcaaatgaaaggattaaaataatcccaacattaaaaccaaaacaaaaggcattttatcttctcacatctttattatgtattttataattcctagctcaaaaatcactcttgtacttttagatcacaaatttgcctttaagtaacacataatacacttaaggcagatttgccttacaggtggcctcagcttctaaacaccactacactgctttatataaaaaacaaaaatcacatagaagagaatctagtgacatctttcttggtattttaaacttaaaaactgcataataaattgagttcccataaaatttcgcccttgagataggaaacaaacactactactattttatagttgcctttatctgacttgattgatgcagttataatagtattaataacataatctttaaatttgtgagggaaaaccaatactttatattcactcctcataaaaggttcaacagcaagcataatgaggagccattataaaatcatattgctaagtattactttaactcataattctgcttatataagtgtatgcatatcacagttaacaaatactatttaattatcaagacatatgcaaaagtattctttgattgcattaatagcaggaggctagacagcattaaagtttccttctctgatcttctggtcttcagtacaaactgagaattttgaaactatttggtgatcccagtctttgggggagggttaatatcacaaaacctccatgagaacaatgggctcaggtggaagactttgaagactaaaaggcttacagttaaggtagaattatcactagtagatcttagggaaataggaatgcaaccagaatcactcaatttatttattagaaagcaagattcattaaatcatttctcttttagaaaaatatctttaactgttatattttcaaatgttcttttttaaagaacatataaaattaagatatttgtgaaaataaacatttcagatatacttgtttctcttcatttttcccctttcaatggaattcttcttatcaagcacaaatgtgctaatctttaaagcaaggcaaactcttccgtgctaaatctttttaattgtttcttttcatcctctgaaaaaaggtcttcttcattggttgtagtagatgtaaaatcatagtctctggaatgaccatttacaaaagtaaataagggatatttctccttagaagaaaatttcagcatcttggtgatttcttcagaagctcgtttgaagtcctgaacatttcgacagtaaaatcctattgtacagctgggatccatttttcgaaaagacatctttttgggagaagggcagtggaatgtctcaagagggaaatcctttatgctgacatctacaaaagattggcagtaatgaggatccatgtaaatcaaactgtcatcttgaaatccagcaaagtaatatgactgtttaggtttgccaccaataatacccacacaatattccaggcttaaaatacccttcacaaattctaagtagtcggtgttggttctttctccaccaagtctaacaggaactagaataataacagctttgtcatctgcattatcagaagtcatggaagcactctgtttatcaattacatcagaattgtaaactgtacaatcttgtgcaacataaatagttattccttgtaaatcaggatgccttgcttcttcaactgcttttcttaaaatgtgagcaaccacagctgagaccataccaatctcctgcttttttcccagacttcttt

SEQ ID NO: 65670 - DNA, 1706 bp, Homo sapiens
cttgccccgcgttatgactttgattaccccagcttggcacgaggcctcgtgccattttttttgctccacaaatgtttaatttattaagtgtgccagggtatactgctaactcattgcattttaatttttctctagatactcaaatagctaagcaaatgaaggtacatgccagtctttcttcttttatacacaacagacaaaagtgttggggggctagacaccaaccagctatttttttcccctggaaccagatcatcatactgctgagttccttcaaaccatcaaagtacagccttccttccaatgttgcataatctgttcaaaatcacagtataaatacaaagttcttccatccattttacaaaaccagcaaaactctacaataaaatcctacaggaaaaagtagaccaatctcatttacaaacagcattttaacagtaattattaaatgttacaaaacataagatacaaaatctaaatccttaaagtcacacgatttctacagaaataagaccctcgccccacccatattacttatgactcaggacagtagttcgtcctcacggggacccactggccaacttttcaccaaccctcaccagaggtggatgccggccctagcactggccctggccctcatactggcttcagctctggccttggctctggccctgtcggcctcgtctgctagggcctcacggtactgcactggccagtgctgcggttccttcttatgcagtttggccacgaaccccaggacttccatcttgctgatttccaggttgcttcggggaccccaagagaattcatatgctggtggattggtgtgaggcacccgcctgtaactgagatatcgctgctgcacaaaatcttccataataagcctcttcggatacccaaagaggaaatgatactttgagggttgcacccccaaccgacgcagcatctcccagacctgggcctccctggcgctattacctctcatatagataaggcccaggatcatcattaacagacccaatctggggccatctcctcccagatcctcctcctcctcctcctcctccagaggttttagtttgttgatcaggatgtaagtgtggtgcttgcggtcaaactgtttcagctcaaaaccaaagacataccgcagatgctctgcggcccttgcgatgatgtccgggaacagaatcttcaagtctccaataacgtatttcaccatctccgagcgtgtgatgggactcttcttcttgtctttcaccaggaggaactgcaccaactccgccaccgtccgattcagccggcggtaggccctgcgccttgccaaggctttggccgccaaggccctcgcgcctttccgggtgagggcgggctccgcagccccctcctccctcccggcgccaagctcctccttggggcgctcctgcgaggcggtcggggcccgggtctcaccatcatggccggcatccttctccccctcgggctgcgggaaccgggagccccctgctctctggtgtctgcaacatgttttcgggcaggcaggtgcagagcgcggtacacgggccgaggggtgtgggagccgccgcgcaagcccccgggggagggggttggacacgcggcaagtgacggcgggagtacaaggagcaatgcgcagcgggaagcttggtggctgctgggccgcaccgcacgggagtcataactgcggccgc

SEQ ID NO: 65671 - DNA, 1943 bp, Homo sapiens
tttcgtggggtccctgaagccagagactagagagtttctggaggtggagagcagcataagcctgattgccagagaagcagccatggaatgtgcaaagtggttcccgttggtgaccaggggcaagaactgctctgttgcaagatggcactattgacacaaactcaagggtctcaaagtagccagtgccagccaatgaaggctctgttcaagcatgaatctctgggatcccagcccttacacgatagagttctccaggttcctgggcttgcccagggagggtgctgcagagaagatgcaatggtagcttccaggctcactccagggtcccagggtttgctgaaaatggaagatgtggccctgaccctcactcctgggtggacacagctggattcatctcaggtgaacctctacagagatgaaaagcaggagaaccatagcagcctggtctcccttggtggtgaaatacagactaagagcagggacttgcctccagtcaagaagcttccagaaaaggagcatgggaagatatgccacctgagggaagacattgcccagattcctacacatgcagaagctggtgaacaggagggcaggttacaaagaaagcagaaaaatgccatagggagtaggcgacattattgccatgaatgtggaaagagttttgctcaaagttcaggcctgactaaacacaggagaatccacactggtgagaaaccctatgaatgtgaagactgtggaaagaccttcattgggagctctgcccttgtcattcatcagagagtccacactggtgagaagccatatgagtgtgaagaatgtggtaaggtcttcagtcacagctcaaaccttatcaaacaccagagaacccacactggggagaagccctatggagtgtgatgactgtgggaagaccttcagccagagctgcagcctccttgaacatcacaaaattcatactggggagaagccataccagtgcaatatgtgtggcaaagcctttaggcggaattcacatctcctgagacatcagaggattcatggtgataaaaatgttcagaatcctgagcacggggagtcctgggaaagtcagggtaggacggaaagccagtgggaaaatactgaggctcccgtgtcttataaatgtaatgagtgtgagagaagtttcacacggaatagaagtcttattgaacatcagaaaatccacactggtgagaaaccctatcagtgtgacacatgtggaaaaggtttcactcgaacttcataccttgttcaacatcagagaagccatgtagggaaaaaaactctttcacagtgacccatggtattcatgccaacattggtgctcatttgtcactgaactgaagccaccctggagcccttaatggttacagaaattgtggaccagggctttatttaccactatacatcatcgggtattagaaaatgtagtctggctgagacgatgagttatcttctacattctagaaagtgattggaagaagtcatttgataagaggccatgggagagtggtctggaagttgtaggacctaaaatagtttgttctcacccagtgtatttaaatggccttctggacttgttaattgccctcagccagcactttaggacatctggttggatggctctgatgtggggggctgctgctctgaccattcattttgcctctaatgaatctttcacaaattggtcagatccatgaggtcttttactcttctttgtgccttgtatgataggtgctaataaacatttattaaatgtaccagtaaaatggcctttgtaccaaaaatttgatgttgtctatatttctgagaaatttctaacttatgccatttgaatttatgtattattctctgaggttctagattctgggccaatctagtgtatttgttgccacgtacatactgttttcagaattggggtgggg

SEQ ID NO: 65672 - DNA, 718 bp, Homo sapiens
ggcgcgggggccctttttttttttttgaccttggataagtttattaacctgttttataaatctgtattcacacagatataaagtgcctagcccatcacagcagagctctccgtagctcagtggttgttccaataagacatcagggattcttcagaagccagccttcagacctctcactgtgttttgagatcattattatcaatttggatttaaaaaacaagggtcctgtaaaacccttgaagtcttcctcatctcaggttttagggatgccacttgcataaaaatgagtggttcacaaggtcactgcccccagaagcaggcactggaaagaaacaggcagctcttcattatcccaagcagaacctctgtcaacttgcccattgatgggttccatttgcctgggcttggaatcccaaaggggaagaaccacctttaccggagtaacagtccaaagcctggggctgcagttggtggggcaactcttcactgtgcttgtacctgggctggggcaggatcctgaacctctcgggggcgtagcccgcggaacgtggtcggcttgttggtgaaggggtgccactggccctggatgctagggttgtcggtgtggaagggcttgcggatgcggatcacgtccaagcccgactggtcggccagcttctgcaccagcgtcgagatctcctcgaccgacttgcagtggatgctctcctcgcgcacagcc

SEQ ID NO: 65673 - DNA, 1677 bp, Homo sapiens
atcaagttcaccgacattcaaggagatcccgctgtggatctatagcctgaagacactggaggagctgcacctgacgggcaacctgagcgcggagaacaaccgctacatcgtcatcgacgggctgcgggagctcaaacgcctcaaggtgctgcggctcaagagcaacctaagcaagctgccacaggtggtcacagatgtgggcgtgcacctgcagaagctgtccatcaacaatgagggcaccaagctcatcgtcctcaacagcctcaagaagatggcgaacctgactgagctggagctgatccgctgtgacctggagcgcatcccccactccatcttcagcctccacaacctgcaggagattgacctcaaggacaacaacctcaagaccatcgaggagatcatcagcttccagcacctgcaccgcctcacctgccttaagctgtggtacaaccacatcgcctacatccccatccagatcggcaacctcaccaacctggagcgcctctacctgaaccgcaacaagatcgagaagatccccacccagctcttgtactgccgcaagctgggctacctggacctgagccacaacaacctgaccttcctccctgccgacatcggctcctgcagaacctccagaacctagccatcacggccaaccggatcgagacgctccctccggagctcttccagtgccggaagctgcgggccctgcacctgggcaacaacgtgctgcagtcactgccctccagggtgggcgagctgaccaacctgacgcagatcgagctgcggggcaaccggctggagtgcctgcctgtggagctgggcgagtgcccactgctcaagcgcagcggcttggtggtggaggaggacctgttcaacacactgccacccgaggtgaaggagcggctgtggagggctgacaaggagcaggcctgagcgaggccggcccagcacagcaagcagcaggaccgctgcccagtcctcaggcccggaggggcaggcctagcttctcccagaactcccggacaagccaggacagcctcgtggctgggcaggagcctggggccgcttgtgagtcaggccagagcgagaggacagtatctgtggggctggccccttttctccctctgagactcacgtcccccagggcaagtgcttgtggaggagagcaagtctcaagagcgcagtatttggataatcagggtctcctccctggaggccagctctgccccaggggctgagctgccaccagaggtcctgggaccctcactttagttcttggtatttatttttctccatctcccacctccttcatccagataacttatacattcccaagaaagttcagcccagatggaaggtgttcagggaaaggtgggctgccttttccccttgtccttatttagcgatgccgccgggcatttaacacccacctggacttcagcagagtggtccggggcgaaccagccatgggacggtcacccagcagtgccgggctgggctctgcggtgcggtccacgggagagcaggcctccagctggaaaggccaggcctggagcttgcctcttcagtatttgtggcagttttagttttttgtttttttttttttaatcaaaaaacaatttttttaaaaaaaaaaagctttgaaaagggatggttggggttttaaaaaaaaaa

SEQ ID NO: 65674 - DNA, 1709 bp, Homo sapiens
ggacagtccttcgggtacattctctatgagaccagcatcacctcgtctggcatcctcagtggccacgtgcatgatcgggggcaggtgtttgtgaacacagtatccataggattcttggactacaagacaacgaagattgctgtccccctgatccagggttacaccgtgctgaggatcttggtggagaatcgtgggcgagtcaactatggggagaatattgatgaccagcgcaaaggcttaattggaaatctctatctgaatgattcacccctgaaaaacttcagaatctatagcctggatatgaagaagagcttctttcagaggttcggcctggacaaatggagttccctcccagaaacacccacattacctgctttcttcttgggtagcttgtccatcagctccaccccttgtgacacctttctgaagctggagggctgggagaagggggttgtattcatcaatggccagaaccttggacgttactggaacattggaccccagaagacgctttacctcccaggtccctgggttgagcagcggaatcaaccaggtcatcgtttttgaggagacgatggcgggccctgcattacagttcacggaaaccccccacctgggcaggaaccagtacattaagtgagcggtggcaccccctcctgctggtgccagtgggagactgccgcctcctcttgacctgaagcctggtggctgctgccccacccctcactgcaaaagcatctccttaagtagcaacctcagggactgggggctacagtctgcccctgtctcagctcaaaaccctaagcctgcagggaaaggtgggatggctctgggcctggctttgttgatgatggctttcctacagccctgctcttgtgccgaggctgtcgggctgtctctagggtgggagcagctaatcagatcgcccagcctttggccctcagaaaaagtgctgaaacgtgcccttgcaccggacgtcacagccctgcgagcatctgctggactcaggcgtgctctttgctggttcctgggaggcttggccacatccctcatggccccattttatccccgaaatcctgggtgtgtcaccagtgtagagggtggggaaggggtgtctcacctgagctgactttgttcttccttcacaaccttctgagccttctttgggattctggaaggaactcggcgtgagaaacatgtgacttcccctttcccttcccactcgctgcttcccacagggtgacaggctgggctggagaaacagaaatcctcaccctgcgtcttcccaagttagcaggtgtctctggtgttcagtgaggaggacatgtgagtcctggcagaagccatggcccatgtctgcacatccagggaggaggacagaaggcccagctcacatgtgagtcctggcagaagccatggcccatgtctgcacatccagggaggaggacagaaggcccagctcacatgtgagtcctggcagaagccatggcccatgtctgcacatccagggaggaggacagaaggcccagctcagtggcccccgccccccaccccccacgcccgaacagcaggggcagagcagccctccttcgaagtgtgtccaagtccgcatttgagccttgttttggggcccagcccaacacctggcttgggctcactgtcctgagttgcagtaaagctataaccttgaatcccaaaaaaaaaaaaaa

SEQ ID NO: 65675 - DNA, 1473 bp, Homo sapiens
gcgaccgcgggcgatgccaaaaacgaagccccatgtgccactcccctgatctgcagcttcggtaggccggtggacctggaagaaggacgactaccagaaggtggtgtgcaacaacgagcactgcccctgcagcacctggatgcacctgcagtgcttctacgagtgggagagcagcatcctcgtccagttcaactgcatcggccgcgcgcgcacgtggaacgagaagcaatgccgccagaacatgtggacaaagaaggggctacgacctgggccttccgcttctgctcttgccgctgtggccagggcaacttgaagaaggacacagactggtatcaggtgaagcggatgcaggacgagaaaaagaagaagtctggctccgagaagaacacagggaggcctcctggtgaggcggcggaggaggcaaaaaagtgcaggcccccaaataagccccagaaaggcccaagccacgacctcccccgccggcattccatggaccggcagaactcccaggagaaggcagtgggtgccgcagcctacggtgcccgttcccccggtggctccccgggccagtccccacccacgggctactccatcctctctcctgcccacttcagcggcccccgctcctccagatacctcggggagttcttaaagaacgccatccatctggagcctcacaagaaggccatggctgggggccatgtgttcagaaatgcccactttgattacagccctgcggggttggcagttcacagggggggacacttcgacacccccgtgcagttccttcggcggctggacctctccgaactcctcactcacatccccaggcataagctgaacactttccacgtgcgcatggaagacgatgcccaagtgggccagggggaagacttgcggaagttcattctggccgcgctcagtgccagccacagaaacgtggtaaactgtgccctgtgccaccgggcgctcccggtgttcgaacagttcccactggtggatggaactttgttcctaagcccgtcgagacatgatgagatcgaatatgatgttccttgtcaccttcaagggagactcatgcatctgtatgccgtgtgcgtggactgcctggaaggggttcacaagatcatctgcatcaagtgtaagtcacggtgggatggcagctggcaccagctgggcactatgtacacctacgacatcctggctgcctctccatgttgtcaggcccgcctgaactgtaagcactgtgggaagccggtgatcgacgtgaggatcgggatgcagtacttctccgaatatagcaacgtccagcagtgtccacactgtgggaacctggactaccacttcgtgaagccattttcctccttcaaagttctcgaagcttattgatgaaagctttgctttagtaatagctattttattgatattattactttattacatatcttttatagggaaaccatctcaataaac

SEQ ID NO: 65676 - DNA, 2039 bp, Homo sapiens
cccagacagaagagaccacggtaaagatcagctgacggcctctgtgggaacaaagacagggaaaggggaaatgagttcaccagaaaccaacaggcagcacaggaggtggtaaacccgaaaaagaaaatgaagaaaaagaaatacgtgaattctggcacagtcaccctgctttcctttgctgtggagtcagagtgcaccttccttgactacatcaaaggagggacccagatcaacttcactgtggccattgatttcactgcctccaatgggaacccctcacagtccacatccctgcactacatgagcccctaccagctgaacgcctacgcgctggcgctgactgccgtcggagagatcatccagcactacgacagtgacaagatgttccctgccctgggcttcggggccaagctgcccccggatggcagagtgtcccacgagttcccactgaatggcaaccaggagaacccctcatgctgcggcatcgacggcatcctggaggcctaccaccgcagcctgcgcactgtgcagctgtacggccccaccaactttgcccccgtggtcacccacgtggccaggaatgcagcggccgtgcaggatggctcccagtactcggtgctgctcatcattactgatggggtcatctcggacatggcgcagaccaaggaggccattgtcaacggttgccaagctccccatgtccatcattatcgtcggcgtgggccaggcagagttcaacgccatggtggagctggatggcgacgacgtgcggatctcctcccgggggaagctggctgaacgcgacatcgtccagtttgtacccttccgggactatgtggaccgcacaggcaaccacgtgctgagcatggcccgcctggcccgagacgtgctggcagagatccctgaccaactggtgtcctacatgaaggcacagggcattcgcccgcgttccccacccgcagcaccaacccactcgccctcgcagtccccagcccgcacgccccctgcgtgccccctgcacacgcacatctgaacctggtctcagcaggcaggtggctggggcctgggagaggccaggtgaatgggaggccagggccccagactccccgaagttggcctgcccggcctttgggacatctgtgtgcctgggaggctgccagggggtggggcttctgaagacccctcctcaatttcttggcctcacttattgcccaaacccagggagttaggggggtacgggtgaaagaggggtacacagggacccagcccttctcttcttccccaatacctggctctaacccagccaggaaggtgtaaacaataagggtgattggggtccctgtcgcccacccccggcaatcctatttgcttacctgtcaccctgaagcctgggcttggcctcctccagccccccatctccgtcccatcctcccatggtgtctactcctgtccctgagccccgccctgtggtctatcctgtgcccgatttccagtgaaccccatgaagctgatgggtttgcaggaaggcctgaacatgtgcaccctcccagggacactggatgcgctgggagccccggggaccccatggggtgctgtaatcatggaccgtaggccatgtgatgggcctgaagtggaggctgctcagcacagagccctttctggtgcctctcgaactcagtacgatgcaagttctagacacacagatggcctgtggaggcctctccctggtgtgggcccacaggtacttccatggttgactcctggcttcaggaatcccttcctccctccagaggcttcccagggccctcggtgcccacgcctctgcccatctggaggcctgagtaaggagtggctcaaccccacgttcccacactgctcctgctctttgccctgtatcccatgaggctaggagacaggagtcctgggtttgagccctgcctccccccactgcctaatgtgggaacccaagcaaggcccttctaccttttgggcctcagtttccatgtctgtacgacaagagggttggaccaagatggccc

SEQ ID NO: 65677 - DNA, 1324 bp, Homo sapiens
tttccgggtttttattaatgcttattgcttggtaatggtgtagtgttttgttttaacaggatttggggatgacagagctaagggcctttttcaattttccacttttaaccagaagacacggctataaaacaaaacaaaacatgattttcacggagaaaactgaaaggaaattggttaaattggctgttttcttgtttagttcttttaagacaatagaacttgtcattgaatggaacatgctttgtggggaagtaaaatttgagatatactttgaaggatgagaaacgggcttctcacagcattgcacagaacactgcgatggtgtcctcagaccgaagccaactttcctttctgcccacagaagctcaagcccaggtgtcgccgccacccccttaccctgcaccccaggagctcacccagcccctcctgcagcagccccgcgcccctgaggcccctgcccagcagccccaggcagcctcctcactgccacagtcagactttcagcttctcccggcccagggctcatctttgaccaacttcttcccagatgtgggttttgaccagcagtccatgaggccagggccctgcctttcctcaacaggtgcctctggtgcaacaaggttcccgagaactgcaggactcttttcatttgagaccaagcccgtattccaactgcgggagtctcccgaacaccatcctgccagaagactccagcaccagcctgttcaaagacctcaacagtgcgctggcaggcctgcctgaggtcagcctgaacgtggacactccatttccactggaagaggagctgcagattgaacccctgagcctggacggactcaacatgttaagtgactccagcatgggcctgctggacccctctgttgaagagacgtttcgagctgacagactgtgaacagaaggcagtggaacagaagaatgtttttctgcaacagccaaaatagaatggaatagaatgaagccagctgataccacgggctttcgttatcttgacatagaaggaagcaatgccacggctccagggtttcagatgagatcccatctcagacactgtggcttcctccagatcacacagctttgtactgcctctcccgcctgtggccaaagtcgtgttgcagcaggcaggctgcttggagcttcccatgaactggaaagctcacctccactgcatctttttactggccatccagtcagccgatgtgtaagagtaggaaatactgtgtcactggaggcctccgtagcattgtgtagtgtgctcagaaccactgatctccgtccgcaccgaaggcgggcccggagtgggagg

SEQ ID NO: 65678 - DNA, 1330 bp, Homo sapiens
cgcgcccattgatgatcgttagtccagtgccggggaattccaccacgctggtcttgggaggctccatgagagggaggtgggacttgagaggggcttacagcctgggtgagaggcaaagaggaggccagagaccttctgggtagagaggaccctcgggccaaggctcagaggtggatgaacgggggagccttaggtggaacagcacagggtggaacccggcagaggacaatgggagctgatggaggctaggccagagtggggccttcagtgatgcttgaaccccaggcttcagactccagaagagccaagggcaggtggcccggctgcagagcctgtggcaggcaggcctcactcactatacccttctgtgtcctttgcctgcagagacctgtctgggccgcagagaggagtctggaggccccccgagccaggctgagccagccgctaggggcacggagcagtgcccaccttgcgcccagtgtggccagagcttcggccggaaggagctcagtgcgccgcaccagcgcgtgcatcgtggcccccggcctttcgctggtgctcagtgtcccaagagcttcacgcagcggaccacccccgccagccaccgtcgggcgcacgtggccgagtgcacctacacccgcgcccaatgcggcaagaccttcctccagcagtcgacgctcacacccactactgcgcgcacatcagggagaagccctacgagtgcgccaagctctttggccgcctgtccacgctgctggagcaccggcacatgcacacgggtgagcggcccttccagtgcacgcaatgtggctgctgcttcagccgcctgtccacgctgctggagcaccggcacacacacatcagcgagaagcccttccagtgtgcgcagtgcgacaagcgtttcacgcgtctggccaacctgaccgtgcaccagagagtgcacttgggcgagcgctccttccagtgcgcccagtacagcaggagattcatgcagaagcccggcttcctgcgtcatctgtgtggccactcgcaggagaagcactatccttgcagcccttgtggttcccatgatcagtggtgaaatatagtgattttcacctgtgcttccattctgaagttctggaaagaagtactggatggactgaagtccaggacaacgtcccaaagaaaggcagagtccaggtaggcttggaggaccaagccctggatgagcactggagggcagaggcctcagtgtccagcactgtgccctgcacatggaaagcccctacgtttgtggaatgaatgaataataaaaatgttttcataagtgataaaaaaaaaaaaaagg

SEQ ID NO: 65679 - DNA, 3274 bp, Homo sapiens
ttttttttttttaaataaaagttttgcttttatttaaaataaaatgcatttatacagtctttgaaccatggattattgaacaatactggtaatccacctctccctcgcacccttttgggctatgtgagctaggaattttctgactagcaccaatacagattgtaacagcgcaacagactagaacatggccagtccaggcattagagttaaggacattgtggcaaatcatgatcataatgaagtcattcttaatttagtagatattaaaactgcacgttaattatatctcttaaaggcatttaattaacgcagagattgctacatttaagccatctgctagttgtgagtagtttttaaaaaactgtacaattttataaaatttgtgtttttacattagttacacaaaatgcatacttcatagaactttacttcatattgtaatgcaaagagttgcatattttaggcagacagtgattatgctggtgaatactaaaagtgtaatacaatatggtgtaaaaataaaaacacgagacaatatacataacatgcttattcaaggacaaaaacaaatcaagcacgacggactaatagcattttccttcaaggtcaaacacaatgacattactaaatatcaggcctcctgcatgcctgatttatttgggggtagggggaggaattaaatggctaccagaagtaggatattttaaaacatgatatcaaattaaacatacattaaatcacatgcattagacatgataaatagagttcatataggttaagccctggatagctttaaaatagatggcttgtttcttacagtttggctagcttaaatcagtaaatcagtgatggtttgttcctgatttgcccactatttcagttttcaattcatggccctaaggaatgtgtgccaaattcaagtttattatatcataacatgatagattaatagtcgtgcttgtttagtgcacatattaactggtctggtaaggcaaagaagttttcatgataaaatgataaatttcaagcttactttattaagcagcatataacaaacagcttttaaagttaaatattgttatggccgtggagtttcattaaacagtatttctattcacacccaaccactggtaagtttgtagaacatctcttcatctaaactctcgttttggtcttttgcacgtgttgagagaaatatgtagccaccaatgaattcatgaaccactttgcaatctacttcagtacaaatgaaggacaatcgtacttcatctgcaaactctacggtgaccattttgatttcccagttgacattccactgtttcatgttgctgaaacgccatgttttaattgcatctccagtgctggcatccatccgaatcagtctgttgtatgcaattccaataagttcttcttttttgcccccttggaaccttgcaatgaagtgagtgatgccaaattcaggtagtgactggccaagcttgaataaatctcatcttggcttcaattaaactcatctgagctacattctgatgggcctccaagattctcgctgttatctgcttgttcttatactgtgttagatagcggggagacaccaaacattgcagagttatatcagtccgtgatctgctctggtattaacttgaggatctgggtttaaatgctgcatcttcagaaaggaaagaatattcttgaacttctaagttgtaagaactgtcccgcccatggtccttggccctttgggaggctaatcctgccaggctgccatccagtgtgcatactgtttttcattgtcacaacgaagccagatttcattcatgccttctgcaactggaatcaggagtttaatgttaaatttttggcctgaaatgtttacatctggggtaacttcacatcccctgaggttcatctgatgagctggtgtgccactggattcttctttgctcttataacaagaaatggatgtgtctttgaaggtgcaccaatattgtttgtaacctttcagagtcagcttttttggcttgaaaactttaatgtagtcagcaagttcaggaatggaagtaatgtcacccaaaattgttgacgttttacccccttccagagtaatctccaggtctgaaagggcagcatcaacttcatcaacttctttgtcactgttgttcaaatgattctctgatgtcatgattgacagcttattgatatgatactgcagggctgcaaacatcatcatttcttcttctgtgcattcaatctcttccaggagaatggcccatttggcctgctcataaagctgattgattctgattgcatcatactttggattcaaatcaaaaaagctgtaatacttgaatcggagcagcaaggcctcattttccttcacatcttgttccatgagagatcttgaggaatcaagccatccttggttgatttttgctttatcaagaagagcttgaggcttgaacatttttgccaagatttctggtgacgtgattggttgactgacagcaagtataccaggattgccttctgacaaagcactgtcaccaaaccaagcagaagttggtgacaaggggcttccatcatgagcatcataagtgggggtcattgttttactatacagtcctgggcttgaatatatacttcctgatccaggagtgataagaggcccctctaattcaagtgcctcatcttcagactggtcatctagcttcttcttttttttttttgttggatctctgggtttctttaagagagaaagttcttcggggtgtctgatattaaaagtcttacagatgtcagaaacagctttgaagactctatcagagaaattcactttcaccttcacatacttcatgttgggaagctgcaggcggagcagtttgtgctgaggggtgaactgaagcttagcatctgcctgaataccatacttatctaaggtccaatgtgtcttcagaagccaagttctcttcttttcccaccagagagcatggtcagaccaatctttttttacatcgagtttctccaccagcttaagcatcacgcctccaatgtgcacctcgccggtcactctcagggtgacatcgcggttcaggtccgtcacatggacactcagttcccacgtcccgtccgcgtagcagccatctggcatccttatcccgtccagagccatggctccttccgcgcgctcctagcgctccgggcccgggactcgcgcggcaacaggcgaggggctggaggctcgcggggcggcggtgtccgcgtccgcccgggaatt

SEQ ID NO: 65680 - DNA, 1891 bp, Homo sapiens
accacactacaggcttagggtattacctgctattctttacaaagttcacatctcagcctggctacggtgggaggctctatgggccctccctaccaggaaacttgcagtattgtctgcgttttcattatgccatctatggatttttaaaaatgagtgacaccctagcagtttacatctttgaagagaaccatgtggttcaagagaagatctggtctgtgttggagtccccaaggggtgtttggatgcaagctgaaatcacctttaagaagcccatgcctaccaaggtggttttcatgagcctatgcaaaagtttctgggactgtgggcttgtagccctggatgacattacaatacaattgggaagctgctcatcttcagagaaacttccacctccacctggagagtgtactttcgagcaagatgaatgtacatttactcaggagaaaagaaaccggagcagctggcacaggaggaggggagaaactcccacttcctacacaggaccaaagggagatcacactactggggtaggctactacatgtacattgaggcctcccatatggtgtatggacaaaaagcacgcctcttgtccaggcctctgcgaggagtctctggaaaacactgcttgacctttttctaccacatgtatggagggggcactggcctgctgagtgtttatctgaaaaaggaagaagacagtgaagagtccctcttatggaggagaagaggtgaacagagcatttcctggctacgagcactgattgaatacagctgtgagaggcaacaccagataatttttgaagccattcgaggagtatcaataagaagtgatattgccattgatgatgttaaatttcaggcaggaccctgtggagaaatggaagatacaactcaacaatcatcaggatattctgaggacttaaatgaaattgagtattaagaaatgatctgcattggatttactagacgaaaaccatacctctcttcaatcaaaatgaaaacaaagcaaatgaatactggacagtcttaacaattttataagttataaaatgactttagagcaccctccttcattacttttgcaaaaacatactgactcagggctctttttttctttttgcatatgacaactgttactagaaatacaggctactggttttgcatagatcattcatcttaattttggtaccagttaaaaatacaaatgtactatattgtagtcattttaaagtacacaaagggcacaatcaaaatgagatgcactcatttaaatctgcattcagtgaatgtattgggagaaaaataggtcttgcaggtttccttttgaattttaagtatcataaatattttttaagtaaataatacggggtgtcagtaatatctgcagaatgaatgcagtctttcatgctaatgagttagtctggaaaaataaagtcttattttctatgttttattcatagaaatggagtattaatttttaatattttcaccatatgtgataacaaaggatctttcatgaatgtccaagggtaagtcagtattaattaatgctgtattacaaggcaatgctaccttctttattccccctttgaactacctttgaagtcactatgagcacatggatagaaatttaacttttttttgtaaagcaagcttaaaatgtttatgtatacatacccagcaacttttataaatgtgttaaacaattttactgatttttataataaatattttggtaagattttgaataatatgaattcaggcagatatactaaactgcttttatttacttgtttagaaaattgtatatatatgtttgtgtatcctaacagctgctatgaaattataaaattacctaataaaaataatttgaaaatcttaaaaaaaaaa

SEQ ID NO: 65681 - DNA, 1909 bp, Homo sapiens
aattttttttctgtattatttatttgtgtacaccagtgtcagggagtgtggaacaactggaaatgccagaacattagcaaccagtagtatcaaataacaaaattaaaagtatggcctaaaaggccccagagaaagtgcactttggggaacactcttatgtgtaaacagagcttcagtcggccttaggaaactcactcgaagttactgatatggtctgttggtgcttccctgtattcacatattgggaaacttgatcccccaatgtaacagtatgaagagggaggacctttgggaggtcatgaggtcagggcccttgtgactgggattagcacccttataaggggcctgaggaagtctgctgtttacaaccacgtgaagacacacatcaagacacaagcactacctatgaagaacataccccatcagacaccaaatctgccagagccttgatcttggacttcccgagcatccagaaccatgagtgacaaatttctattgtttataaattacccagtctaaggtcttttgttacagcagcaggaagggacttaagacagttgccttcacatttagctgcaaaaatcactataaaaataatctgtgctcagatgtatatacttattgaatccatgcatatttctttctgaatatcaaacctgctgctgtttcttttccttcttgcccctcccacaatcactgaagccgattttgaccagacaactggccaaaacagaagactgtttaaaataacatagtctcccttaattaaaagttttatttttaaaaaacgtaacagaccactctaagaaactttggcattcaaagcagtagttactgttatttgctaactctgaaaaaaaaatttttcccctcacaaacaaccggcaaactcctgccacttcctagcttggtggctgccagcgtgcactgcagggaaacggtgggtggagggataggaaggccctcacgctcccaacccacggagaaaatgcagatggtgacaagctgcatctggactccaggatgtatctgacaaagagggagatgtctcctccctcccctccaccagctccactttcccgctgaagaaacagagatgtggaggcaggcgtgacctgtcccagctctaggacagttactcaagagggctagtctggaaccctgatgtctgttaccagcggccatggctcagctacagtgaaccttgaagtgtccccagatacgtcagacaccgaggggcttgctttctgaggctcagtaaggagggggcatgtgtgatcagccagcccctccacaaccccacattcctgagctcccctgaccccgagtccccaccccaggggagaacttctcacagccctgctgacaaagcgcgcagccatctggcgtccgtcctgggcaccgccagtgagagccctgcacagaggcgctcaggtgtgaatccgcaggtggcgcgtcaggttcgtgttgcggctgaaggtcttcccgcactcgccgcatcggtagggcttctcgcccgtgtggatccgctggtgcacagtgagggaggagttcttgatgaaggacttcccgcactggccgcacctgtacggcttctcgccggtgtggatccgctggtgctcgatgaggtaggcgctctggctgaaggccttgccgcactcgccgcacacgtagggcttctccccggtgtgcacgatctggtgcacgatgagggacgagcgccccgtgaagtgcttcttgcagatgtagcactcgtagggcttctcgccggtgtggatgcgctggtgctgcgtgagcgaggagttcttgctgaaggccttgccgcactcgctgcactcgaaagcttcacgccgatgtggaagcgctggtgctggatgaggtaggagctctggctgaaggccttgtccga

SEQ ID NO: 65682 - DNA, 1638 bp, Homo sapiens
ggtgctgcctctggtgtgccccagacgggacctggcagggaggtggcagccacccggcccaagaccaccaagtcggggaaggcgctggccaagactcggtgggtggagcctcaaaatgttgtggcagcagctgctgccaaggccaagatggccacgagcatccctgagccggagggtgcagctgctgccactgctcagcacagtgctgagccctgggccaggatgggaggcaagaggaccaagaagtccaagcacctggatgatgagtatgagagcagcgaggaggagagagagactcccgcggtcccacccacctggagagcatcacagccctcattgacggtgcgggctcagttggcccctcggcccccgatggccccgaggtcccagataccctcaaggcacgtactgtgcctgcccccccgcaacgtgacccttctgcaggagagggcaaataagttggtgaaatacctgatgattaaggactacaagaagatccccatcaagcgcgcagacatgctgaaggatgtcatcagagaatatgatgaacatttccctgagatcattgaacgagcaacgtacaccctggaaaagaagtttgggatccacctgaaggagatcgacaaggaagaacacctgtatattcttgtctgcacacgggactcctcagctcgcctccttggaaaaaccaaggacactcccaggctgagtctcctcttggtgattctgggcgtcatcttcatgaatggcaaccgtgccagcgaggctgtcctctgggaggcactacgcaagatgggactgcgccctggggtgaggcacccattcctcggcgatctgaggaagctcatcacagatgactttgtgaagcagaagtacctggaatacaagaagatccccaacagcaacccacctgagtatgaattcctctggggcctgcgagcccgccatgagaccagcaagatgagggtcctgagattcatcgcccagaatcagaaccgagacccccgggaatggaaggctcatttcttggaggctgtggatgatgctttcaagacaatggatgtggatatggccgaggaacatgccagggcccagatgagggcccagatgaatatcggggatgaagcgctgattggacggtggagctgggatgacatacaagtcgagctcctgacctgggatgaggacggagattttggcgatgcctgggccaggatcccctttgctttctgggccagataccatcagtacattctgaatagcaaccgtgccaacaggagggccacgtggagagctggcgtcagcagtggcaccaatggaggggccagcaccagcgtcctagatggccccagcaccagctccaccatccggaccagaaatgctgccagagctggcgccagcttcttctcctggatccagcaccgttgacgaactgcagcgatcttactggccaagccagagcgcctcctctcagattccttctcgacacagcaccctaggcggcttcttcctgtcagtcggaggtggcatgcaagatgaagctctctttgctcttcctgctttcattttgtgcttttccttgtgttttcatgttttgggtatcagtgttacattaaagttgcaaaattaaaaaaaaaa

SEQ ID NO: 65683 - DNA, 2124 bp, Homo sapiens
tgccagccccgtgccctaccgacggccccgcttccttcgcggctccagctccagccccggggcgaccagacgcatcgcgccgcacagactcccggcccgtgcgcagccccgcacgaggacgcacgctaccctggaatgcaggctacgcgatgcattatcaatgcagagaaatctgaattcaatgaggatcaagccgcctgtgggaagctgtgcatccggagatgtgagtttggggctgaagaagagtggctgaccctgtgcccagaggagttcctgacaggccattactgggcactgttcgatgggcacggcggtcctgcagcagccatcttggctgccaacaccctgcactcctgcttgcgccggcagctggaggccgtggtggaaggcttggtggccactcagccccccatgcacctcaatggccgctgcatctgccccagtgaccctcagtttgtggaggaaaagggcatcagggcagaagacttggtgatcggggcattggagagtgcctttcaggaatgtgatgaggtgatcgggcgggagctggaggcctcaggccagatgggcggctgcacagccctggtggctgtgtccctgcagggaaagctgtacatggccaatgctggggatagcagggccatcttggtgcggagagatgagatacggccactgagcttcgagttcaccccagagactgagcggcagcggatccagcagctggcctttgtctatcctgagcttctggctggtgagttcacccgactggagttccctcggcggctgaagggggatgacttgggacagaaggttttgttcagggatcaccacatgagtggctggagctacaaacgtgtggagaaatcggatctcaagtacccactgatccatggacagggtaggcaggctcggttactaggaacactggctgtctcccggggcctgggagaccatcagctcagagtcctggacacaaacatccagctcaagcccttcttgctctctgtgccacaggtgactgtgctggatgtggaccagctggagctacaggaggatgatgtggttgtcatggcaactgatggactctgggatgtactgtccaacgagcaggtggcatggctggtgcggagcttcctccctgggaaccaagaggacccacacagtctatctgcaggatggtcttcacaggttctcaaagctggcccagatgctgatacacagcacacagggaaaggaagacagtctcacagaggaagggcaggtgtcctacgatgacgtctctgtgttcgtgattcccttgcacagtcagggccaagagagcagtgaccactgaggattcagacactgtatcccagaactgctctagtgcccgggtgtggtctgggcatccctccagtgtgaccaagagcaaatcctgcctgccctatccctagccaccgcccagtgctctcactatccacctcaacacacatccatctcaagaggaacatttataccaggcagtcagagctggaagtgtatggagagcccagcccaccaggtcctgccttttgcggtgataaccttctctggcagagtgactttacaacttaactaggaaacccatgtgaggctcctcagacaggatcttgaacagcccaaagtatcattctcagataggggcacccaagctaagggtattagccaaagatgccaggatgggtagctagcccatgtttagatccaggtctccaattcatggttatcagggcatgtgttcaacaacccccaaagtccacgcaggtggcttgtagaaacctttgggcagcctcatgtctgctaaaacagccatcttcaagacagcccctgaaaagagaccagttcaggtcctgccctgctgttctttgctggagatgaggaacaggtgctggggctaaagtttggggtagagcacaagggacaagaggaactcttggagttggctgggtgagagggctctccatttgctacctgtagtagcctgcctcttaactggttgcttctccctagttccagccctgccctggtctgatgccccaacactgcccttgctttgttttccctgtcacctccctattattaaatgttttctacagaaaaaaaaaa

SEQ ID NO: 65684 - DNA, 2042 bp, Homo sapiens
tttttttttttttactaaaacagaaagactttcaggaaaatgtcatttaatgatttcagctatacattacatatacaactctgtagcctagcaacaatcattgctacaccatcattaactttaaatattttgcttggtgagctattctcaaatgtagcacattttaagattttgccatcattatgactgtggaatcattgtttggttttcatagggaaacagatctgtcacagtatgaagctttgtttattttaaggaaactggtacacaattacatttccacttacaagaggaacgccacagaatataactaaagggcaggcttcgatggctccacaaagggttgcgtgcgggtaccaaccccacacctcctggcttccccgttcggcaccgccctggccagggttcacatgggtttcatttccaggaggatggctttgctctttcggcagttagggtaggttttaattccttcaaaggcacacaacttccatcttttttccagcgtggctcccacacccgtgaattcctgtttgaacatgcgtggcagcctcatcaaaagcatttctatttcatttgcagatatcttggagtccagctgctgcatgtatgaccaaagatattctatgttggctccaaaaggatggacgtgaagaaacgttgatatgatacatattagcagagcttctttctctgattttaagccttggcttcttttctcaatattgttctctcggtcttggttgactaatgcaactgtcaacacattgatttcatttgaatcctcatggctgtggccattggtctcgaccaattccttggtaccttttaattgttcctgcaggacttttagtaacgcttgtgtatgggactgctcttcctttgcttgttccaattctgactttttgttgtttaactcctcctggatggttagcaattgctgctgcatgccttgcatggtttgctgcagaaactgcagttgctggtccttggtgaggttttcttctgttcggaaaagctgttctttttcttgtttcagcagctccacctcattcctgtaggcatccagctgccagcggagactgtcattctcctctttcagagcgtaggcctgggcagccagggctgattcatcgactctcattttctttgtagggctgtcacagttctcatcatcagacatttccatttcttcttcgcggcggatgcccatgagctgctcactttgagcattccggagctcctcagaatgctttcgcccaaatgtctatgttcttgcgctgggctttcgagaaatggtcccaagctttttgtctggtagaagcgttgaaaacggccacaatctgctcaaattgagtgagaatcccagttaaggcatttttaaaattctccttggcttcctccatctcttgctcatgggtggctttttcattcattagccggcggacgtggctgttggccgactgcaccatggaatagaactggtttgcagcagcgccgattcacttcccctcgttcaatccaggaaagcagcactgtgcatagcctctgaaaacttgctatcatctttcagcttttcagccagcagagcggcttcgtgctccgagtagtgcattatggcaggcggggatgggggcctgagccggtcctcctccagcttgcgccggtgccgctcctcccgggcacgcatcctctgcttgcattcccactcatagaagtcatccctggcctgggcaaagtccacatgaaggcggcctgaatcctttttgtcggtgctagaccctaatcgcatcctataaccagaaaggtaaatggctttatcaaccatgaattcctctgcaaagcgaatgtgacaaaaattcttcttgcttttccgaattgctgtaatatcaccgcactgttcaaagacttcttgaataatttcctcagtagcattttctggtaatcctccgacaaacacggtcttacacccaggaggtcgttctcttgtggaaggaggtggaagatttggattttgaggaaaaagagtacagcttttgcag

SEQ ID NO: 65685 - DNA, 1985 bp, Homo sapiens
tgccaccagtgccacaatgcagtggctggacattcggatacagctcatgggggcggcagtggtcagcgctatcgcaggcatcgctctggtgcagcaccagcagggcctcgctaacccagggctggtgggcttgtcgctgtcttatgccctgtccctgacgggcctgctctcgggcctggtgagcagcttcacacagacagaggccatgctggtgagcgtcgagcggctggaagagtacacctgtgacctgccccaggaaccccagggccagccactgcagctgggcaccggctggctgacccaggggggcgtggagttccaggacgtggtgttggcgtaccggccagggctgccgaatgccctggatggagtgaccttctgcgtgcagcctggagagaagttgggcatcgtgggccgcacaggctccggcaagtcttccctgttgttggtgctcttccggctgctagagcccagttcagggcgagtgctgctggacggcgtggacaccagccagctggagctggcccagctcagatcccagttggctatcatcccccaggagccctttttgttcagtgggactgttcgggaaaacctggacccccagggcctacataaggacagggccttgtggcaggccctgaagcagtgccacctgagtgaggtgattacatccatgggtggtctggatggtgagctgggtgaggggggccggagcttatctcttgggcagaggcagctgttgtgtttggccagggctctcctcacagatgccaaggtaagatcctgtgtatcgatgaggccacagcaagtgtggaccagaagacagaccagctgctccagcagaccatctgcaaacgctttgccaacaagacagtgctgaccattgcccataggctcaacacgatcctgaactcagaccgggtgctggtgctacaagcggggagagtggtagagctggactccccggccaccctgcgcaaccagccccactccctgttccagcagctgctgcagagcagccagcagggagtccctgcctcactcggaggtccctgagcccaatcccacaccctgcagagttctcccctctctctgatccaggccgggcctatacagaggtgctggctgcttgtttacattcttctctggggctctacctctccacacttccccagaagggaaaagggcaccctggattactctttggaaatcactccttggtgggcagcatcctgaggcttccccagaaccaggcctctgctctggccctcttgcatctggaacgccaggtgggtttttctggcataggagcccacttgcattttcatagttttatttgataaaattccatcttacattctgtgtattaaaaaaataatatttctggtgtgaggctgaggtctcctctgtgtgtgtacccaagctgaagggtggtgagaacggaccactccagtctgaggggtggaagaggtgaggaagggggccagaaagcccctacctccatcacagtgctgtggtctttccaggctcagggggcaagtcaacgtgtaggggggggagcccctttgacagcattgctaacgtgaacactcgggttcctgacacgctggaacatagttttgggtcgggttagcaacagggttcaggggggacaaacaccccggcgccaggcccttcagggtcatcaacacagtaggccagtaaccaggggcagcagtgagggccccaaacaccaccagggccaccaagctaggctcacctagccccagcctcttggctccggacagactgctttaatgagatccggagcaaaacaagcccctgtgctgttggggagtggccccgtggcaaggtacacttaaactgaagttggcccaaaagggtttgccactgttgttggtgtgtttgggaaattaaaaagactccaaggtttgtcccctaggccctggtgaaagtgtgtgaatttttgaaaagtcctagaa

SEQ ID NO: 65686 - DNA, 1122 bp, Homo sapiens
cgtgtggaggaattcgtcagatctgggtgtcatactatcagaattccctctggcccctgagctggccaaagccctgctggcctcatgcgagtttgactgtgtggacgagatgctcaccctggctgccatgctcacagctgcccctgggtttacccgtcctccactcagtgcagaagaagctgccctgcgtcgggccctggaacacacggatggtgaccacagttctctgatccaggtgtatgaagcctttatacaaagtggagcagatgaggcttggtgccaggctcgaggtctgaattgggcagcattgtgccaagcccataaacttcggggagaactcctagaactcatgcaacgaattgaacttcccttgtccctaccagcctttggctctgagcagaatcgcagagaccttcagaaagcactggtgtcaggatactttctcaaggtggccagagacacagacgggactggaaattacctactcctaacccataagcatgtggcccagctctcctcatactgctgctaccgaagccgcagagctcctggccagacccccaccatgggtggcttttaccacaattttcaccatatccaaagacaactgcctttccattgtttctgagattcaaccacagatgctggtggaattggcccctccatacttcctgagtaacttgcctcccagtgagagcagagaccttctgaaccagctaagggaaggaatggcagattctacagcagggagcaaatcatccctcagcccccggagttcagagatcccctgtgtccctgcagtgaccctgcctgccctatggaatggagctgggttcatctcatcacattagattatccctcagggtgacaccaaagcacccagacagatttagaagcccaaagtttagggtcaaatgtaaaccctggaacctgagtcccaagaaatggtagactgggaatggaaagaatggggtaaaccacagtctacatagggaaggactctttccttagccttctcttattgattggagagggactgacatgctcctcattctcttaactttgccaaacccattcttgtactcccttgtgatctataaaagatttttctatgatgccaaa

SEQ ID NO: 65687 - DNA, 1773 bp, Homo sapiens
cgatctatgggagttagttttggaccgccattcggctcagggtattggcactggcttgcaatcaagtgggttaggttcttcaaacctgggaggattttggatctagctctggttttggatgcagcaccacaggggcctccacatttggatttggaacagcaaataaaccctcaggaagtcttagtgcaggctttggcagctcaagtacatctgggtttaacttcagcaatcctggcatcacggcatcagctggtttgacttttggggtgtccaatcctgcctctgcaggttttggaacaggaggacagctccttcagttgaagaaacctccagctggaaacaaaagaggaaaaagataaacatgggttgatgtgttgagagaatccatagcagcaccgttcattctatgagtctatttttctaatgatgcagtaattaaattgcatcccaggagatttataaaggtttgatatttttccctactctggaatttgaactttcttcatgtttgccatactgaacatcttttttcttgtggaatttaaagtccagctgtgttttctttttaatttgattctcagtgtaagaaatgttctgattacatcactgattggtaatggttagaaaccattaacctaaaacttactatttaacctagtgtttttgttgatgaggtttacattatgtgaatacatgcacatttgtttcttatacaggtggtgtgaactctagggcctatactagaatcaatttgttccttgttaaaggccttttgaattatactgcagggcatcttgtgaatatgtatgtaaatatatacagaataatacacacagttgtgtgtgcatataaaatacatatttacgccaggcgtggtggctcacgcctgtaatcccagcactttgggaggccgaggcaggcggatcacctgaggtcaggagtttgagaccagcctgacatggtgaaaccccatctctacgaaaaatacaaaaattagctgggcatagtggcgggtacctataatcccagctactcgggaggctgaggcacgagaatcacttgaagccgggaggtgggggttgcagtgagccgagatcacaccactgcactccagcctgggcaacaagagcaaaactccgtctcaaaaaagatgaaaataaaataaaatatatatttacaggcctacaacttttgcctcagactgttccccttttctaagggtattcaagttttcaccttttaagcttcatatcctcagtgcttgtagaatgatgagcttagaggtaccaggtcattgcagttgtttgcttaaagacttattgaaatggttactggcgtaaatacttggccaactcaactttattgcccctgatcttttccatttttgtttccaccttaacctatagcagctcctccaaatgaggaatgctgtaagtaagactcatcaaacagattttaaccattttattatcctgtgtgtccttacattgcttctgtgagatgtttttttcttatctgagatgaactttcaggagcctatttgaactccagactggtgttctggggcaaagagctattagccaaactgattctatgcaggtgaaggatgcactaaagttctcactttagtgagaacttttctagctattccaatacagagttctttcttatagggctattgatattgacaccaaatggactggcttctcagcctcttaatgtcttaagtaagtgcttaatttggaatagagaaaccagtatattctatagaag

SEQ ID NO: 65688 - DNA, 1854 bp, Homo sapiens
gagagctagcaccatagcttcaataccctgattgaatgtcacccttgactgcctaactcatctctttcccaagtcataggttatccctggtcctggctgattatcacaggcagggagggagggaaagaggcaaagggagaaggccctgtgtgggactcaaacttgctcaccccttttctgtaatctgcagctcactcttgctgccactcagcagatctggtctccctaactcttttttcccctgcctctactttgagactcaattgcttccccaggactttttttctccccaagccaaagaatgaaagttcaatcatcccagctcagttcttatcaagcattccagctagcctatgccagagatgttacacagctctttaataatagtggccatagctgtaataacaatgacaacagtaggtagcggtagtcataccaacagtagggcagtgcattttatattacaactggtttcttgctctagtaggcttggggatgggtgaagacggacagggctggcgcagaccctttccttctcctctccagcccacagtgatgtgggcttttgcaagacagcctgcttccattcagtagtgtgggaaaagttcctttttggcttaacaatacccctgagaccttgttcagtgggctgtgtctctccctgggatgctgggagcaccaagtgtggcccgagctagggctgctgacttcctctgggcgcctctgggctgcgagggtctcttacaggaattgaggccctttgctgctccaagaaatgctgaggctgtgggcagaggggtgtacccaaggggactcttgctctgtgtctgactttgggggatccccaggtgggcagggcaggaaggaagcggctcccagcactgcaaaggggcagcagcattacagctcagccttccagacattgtagatccagttgagataggctgagaccttggtgtatactcctggggtgctcgggcccccgcagccatagccccagctaacgatgcccaccacatgccactggtcagattggtacatcaggggcccaccactgtcaccctggcaggtgtccacacccccttccgggatgcctgcacacatcatcttctcggtgacttccccctggtacgcatcgtctgcattgcaccgtgtgctgtcaatgacctggactgacgcctgcagcagtatgtcagacatcttccctccattctgcttcgtaaagccccatccaatgatccagagtggggtggctggagtgagctcctcatcaaagaagggcagacagatgggcctgactgtgcctgagaaagtgagtgggaactgcagcttcatgagggcgatgtcattgtctttggggtacatggggttgaattcaatgatgatgatcttggccacagccagggatgggaagctgcccagtttgtctgagcctgcccgcaccttccagttgaacacatcggtatgtttcctgaagcagtgggctgccgtgaggacccagtgggggtccaggatgctccctccacagacgtgctgtttgtcgtactggatgctgacctgccaaggccaagaatccacagaggcctcctccccacccaccacacggggggtcttcaggctctccccacaggcaagacagtgcagggagaccagggagcctgagagacagggcccacttgagttccgcatgcgaagctcctggctgttttctgtgatttcaacaacatccagatcctggtctgggccaatctccacagctctgaaagtgggtttgctgctgtagcccatctgcctacaggctgtctcagcgagagcttctgtaagttgtcgaaacaggcaggaattcctgccaca

SEQ ID NO: 65689 - DNA, 1147 bp, Homo sapiens
ggaccattagtacagtgcggtggaattcgcgcattgggatggtgctgggcgtggccatccagaagagggctgttctctggcctgtattgcgtttgaagaagcctatgcccgggcagacaaggaggcccctaggccttgccacaagggctcctggtgcagcagcaatcagctctgcagagaatgccaagctttcatggcacacacgatgcccaagctcaaagccttctccatgagttctgcctacaacgcataccgggctgtgtatgcggtggcccatggcctccaccagctcctgggctgtgcctctggagcttgttccaggggccgagtctacccctggcagcttttggagcagatccacaaggtgcatttccttctacacaaggacactgtggcgtttaatgacaacagagatcccctcagtagctataacataattgcctgggactggaatggacccaagtggaccttcacggtcctcggttcctccacatggtctccagttcagctaaacataaatgagaccaaaatccagtggcacggaaaggacaaccaggtgcctaagtctgtgtgttccagcgactgtcttgaagggcaccagcgagtggttacgggtttccatcactgctgctttgagtgtgtgccctgtggggctgggaccttcctcaacaagagtgctacctgggtaaggacttgccagagaactacaacgaggccaaatgtgtcaccttcagcctgctcttcaacttcgtgtcctggatcgccttcttcaccacggccagcgtctacgacggcaagtacctgcctgcggccaacatgatggctgggctgagcagcctgagcagcggcttcggtgggtattttctgcctaagtgctacgtgatcctctgccgcccagacctcaacagcacagagcacttccaggcctccattcaggactacacgaggcgctgcggctccacctgaccagtgggtcagcaggcacggctggcagccttctctgccctgagggtcgaaggtcgagcaggccgggggtgtccgggaggtctttgggcatcgcggtctggggttgggacgtgtaagcgcctgggagagcctagaccaggctccgggctgccaataaagaaaaaaaatgcgtaaaaaaaaa

SEQ ID NO: 65690 - DNA, 2076 bp, Homo sapiens
gtggaattcgggcgtatccctgaggaggggctattggaggtgcaggtggaggtgaacggggttccacgctgggggagcgtgtgcagtgaaaactgggggctcaccgaagccatggtggcctgccgacagctcggcctgggttttgccatccatgcctacaaggtgcaccagacctggtgatgaacgcccagctagtgcaggagacggcctacttggaggaccgcccgctcagccagctgtattgtgcccacgaggagaactgcctctccaagtctgcggatcacatggactggccctacggataccgccgcctattgcgcttctccacacagatctacaatctgggccggactgactttcgtccaaagactggacgcgatagctgggtttggcaccagtgccacaggcattaccacagcattgaggtcttcacccactacgacctcctcactctcaatggctccaaggtggctgaggggcacaaggccagcttctgtctggaggacacaaactgccccacaggactgcagcggcgctacgcatgtgccaactttggagaacagggagtgactgtaggctgctgggacacctaccggcatgacattgattgccagtgggtggatatcacagatgtgggccccgggaattatatcttccaggtgattgtgaacccccactatgaagtggcagagtcagatttctccaacaatatgctgcagtgccgctgcaagtatgatgggcaccgggtctggctgcacaactgccacacagggaattcatacccagccaatgcagaactctccctggagcaggaacagcgtctcaggaacaacctcatctgaagctgtcactgcacactcctagctgctgccgatacaccagatacctcagcttattggagccatgcccttcacagagtcccaactcagaggaaaagggccagtgccaaggggcaccaagaacctgctcaggaagccttttgatggcaagatcaccaatccagatggtattgctccctcaggatggtctgggcctgcccctaagggcctgtggcctatggaatatgtcctccaggctttgcttagctgagctcctcttctgtaaggaaacccagtcatccctgaatcttgccacagagatccgggattcaggagctctcagtttcttagggatggactatggcccagtcccccatctaagtggtgctttgcaaatgtcttggaggagtataggacagaggaccaaaatacacagcaggtagtgttagctctctgctaggagctcaaagcaacacaacttgtatcaaaatcacaactggcagagaagctggtggatccaatcctttcttcatctgttgttatttagaactcacctctcacactctgttctttagtgtccttacctttatcttaccacacacatgggtgtttctattatccttggaagcacagacctcgggcatccccttattgcctgatgggccaacaccaacagttacggagtgcttgagaaggggcaagtttcacagaaatggccagatagggccttcctacagagcagcaagagtaggccaagcagaaagactgctgaggtaacacggaccccagcccctgtcagggcctctgccaaggaaataatatggaccatttacctggcaggcagtctgctctctctcaggatcaccacgcatctcaggattggtctaaacttcaagtctcaaccaagtgtctgaagtgaactttgcattgaataaatttttgccatggaaagaacatcaaacaagccactcatctctacagagataagaaaacaagtttggcagagcaagagacagaagaccgtggagaaatcagaagggggaacagtcagtttagttaaggatggaacctgggaaaggccaccattcctgcttgatggggctctgatttgctcttgctcaagtggaataaaaccccatggtcttcttgacatgattcttgatcttttctccactgagacacacttaagtgatgatccttacaggactgacaccctaatgccaataaaagttgctcattatggactgctacaaagacc

SEQ ID NO: 65691 - DNA, 1226 bp, Homo sapiens
tttttttttttcagaataaacttgctttataatcaatataatctctgggcctttgaatctaacaggacacctgggtcccagacgcctgggaattgggtctctcaattccctttggttttggagggaggagtttaaaactgtgcatgggaccaggagggactcaagggtggcagtggtgagtgggagggaaatacacttttgggatgacttcgtcacccctgagagaggggtgtgagttacccagggaatgggtagggaaggtttaaagcaacacccaaggaaagaagggaaactcatctcttgtagtgattcaaccctgagaacagatggggagtggggttggctgtcccccatggatggatgaaaggtcacctaatcagtagtcaccaggacatagtggtggaggcacaagtggccaaggagtgctcatttggtggagactgggaaagcggctgttatttagtgtctgtgtagtagagggagcgcagctggtcccagaagaagagggagaggatggtgtgggggccgaggcggaagtaggaggcacctatacccttgtacatgccaaaaatgccctcggtccgagctgtctgcagcagagcgtccagtatcccccggtacatgaggcccttgccctgtgcatctgtgcggctggttgtagagccttgtgcaggccacatcatagggtgccatggccaagacaactgctatgccactcatcatggcagccaccagcgccaacttccagctctggggaggaaagatctcccactggctcaggaggtccttggtggatgagaaggtgcacagctgggtggaggaaccgacgataactcggggcaggccgcccagagccccacgccataaccccaccagaccatgtttctggccaatctcggttagcgcctgaaacatgccctgatgcttatactggtgccctacagcaatttctgaggctgcctgtgcctgcaggtgtgtcttcaccatgtagatggggctccccaagtaggctcccatgaccccagccatggccccagctgctgcgctgcgggcaggactgtgggtgccttcggctgtgtgcaggtagcccccagcctcagccagcccataggtgcccagtcggatgccattcatcaggaactggtacaagagggaaagggacaggcctttctgcaggccagcaaggccatccacctgccgaggtgataatcaaccgctttgcgatc

SEQ ID NO: 65692 - DNA, 5703 bp, Homo sapiens
ttttttttttttagctagtatcttttattgtcaagaacttccggggaccaaaaaaacagttttgcatggttgtacacaaagggacaaggcaaatttcttttttcgtgtgggtagacttagttggcccaagtccttaaaacttttccatataaaaataaaaagtccaagaccagattatttttcttctggtcataaatgctgatttatttacaaggtgccttgttcagaccaccatttataaacttggggataaaatatgtggtgtattaaagcctcagcatttaattgtcaggggtctttgaagattccctccaagtggttaaagaccgtttcctgggaatgcagcgtctctcccccataggtcaacatggttattatatctgtaatctatccagaatggatagaagctaaccttccaagtaacactttggttttttaacttaaatctttttagacatggaaaagactccaaaatgacttcattcctggttctaaaaaccagcactgggagccagctggttggaagagtgggtttataaatacagttatcctgtaggctgcttatctggttataatacagcagacacagatggcagactttgctacatgtaaaacaatggagtcaacacgtgtttttcaaaatacagcaaagacaggaaaatccaggatttgggtttgttaataaaaccaccttataaagtaacaattgagactatagctctgcattattaaaatatacagactgtgtacaccattacacatcctttttccctttgctttttaatgctcatgaaaccatgattaaggtgttgagtttatgaacacatgcacgaacaggcaagcacgtacacttaaaagatgaaacaaagaaaaaagttgattcatgtcattccatgagaaaggctgcccgcagcactccagctcaaacacactgtcccctcgagctctccatcccccttcccactccctcaccttccctcagattcggggaaatcaggttgggaggttagtgcatcattgacagagaatgccccccttccacgctctgttaagttcttccccagaagggggaaaggcagttccccttcagtagcacagttacggtcgattagtgttggttccacaagttaaggccacttccggctgctttggtggcaaccgtggttcctccccctccctttttttaaggccatgtgtcctcctaagaagtaagtaaagctttggaaaactgtgccaaaactgttaaaagttgaacagcttaaatacaggatcaatgaaaggcggcaggcaaaaggatcctcggagacacctccctcaagaccagaagcttccagaaagcctgggcagctctgtgtttgttttggctgggcatggcacactggagccagcctaggcccagagggtggtgcgttcaggtagcaaaagacaggtgggctctgtcccgccttcacctggagctgcccttggctgctggcggagcgtgtcgtgctgtagcgcttcttcacgatcatgctgatgtaggctttcatgagcttggccacatccaccacctcactggtttcaaagagcagctccctctcatcgaccacgatcttatacgtattcgccaggggtgccccaaaagagaggatgtgttcatactggaagacttccagtggtcttccctctccacgcttgtagacggagacggcgtccgcgctgacacccaaccagagttcctgagggaagccaccttccttgcactggtgggcaagagtcaacagaagagttaagtcatgaagtggttggcaacagaaagcatctaaaccataagacaggctttgagtgaagtcctctgtgcagaagattaaatatattcgatgtgcatgcatgcatggaggggcctgaaatatgaaaaatggcacctctctggctatcttgatttctaactagttaatctcacgcttttgggaaaacctcactaactggcagagtctaacatcttgctttgactctccacttctcagcattattctactagctgtttggattagctacgtggaagtggcctggaaacgtacatgcttggccgggggacttaagaaagcttccctgcaacccaagccaagtctactcttgtattaatatctccagttctgcctccaatcctctttgcggatggttagtcttcaaatacaaaatctaggatcacagaggaaaattctccaaatcacgcatgctgagcagttctggctcctcttcacaaggagcagcaatggccttccatatgcagagtgggaacagggactttaccagtttaactgtagactttcctgtacagattggtggaagaaaataagaccccatatgaaggggctaacaacacagggctgatccaaacctggacaagcaggagggctataaattggagacgctgaaaagagtctctagtttatatccctaataaccagacattctctgcatcctccatgcaaaagccagtagctttctttttttctttttttttttgacggagtctcactctgtcgcccaggctggagtgcagtggcgtgatcctggctcactgcaacctccacctcctgagttcaagcgattctcctgtctcagcctctcgagtagctgggattacaggtgcatgccaccacgcaagtctaatttttttttttgtatttttagtagagatggggtttcaccgtgttagccaggatggtctcgatctcctgacctcatgatccgcccgccttggcctcccaaagtgctgggattacaggagtgagccaccgcgcccggccaagccagtagctttctatgctaattcacagctcacgttttgcaggaagccaagagtttaactgctattatctattccttgtcagggagaaatggaattatggctttgtacaaagcacctgatttttttatacttaaaaacaggcataattgaaccaaccaaaccaatcaaaaacatcacctaatgaaaagccacccacggattctagaatttataatatttagaattttatacagcctcaatataaagtcatcagatatacgctgaattactgtgatcataaaaaatggaagctaatctagacgatgagctggcacacttatctgttaagggctgcatagtaaagatttttagactttgtggatcacatggtctctgtcacaactactcaactctgtacaaaaacagccagggaatatatctaaaggaatgagcttggctgtgttccaataaaactttgtttagaaaaaaaggaggcaggcaagatctgacccacagaccagtttgccaaactctcatctagacaattagtaagatttcttttcaataagcggtctacttaaaacaaaacaaaaatcagtactgggttgatgccaatggctaaattccattacgagatagacattcttcctttcaaacagatggctgtaaagaaaaaacaaagtaaaatgcaagtatatccaaagtttctaatttgtatatacagctataacatttttttaaatgtagatttttatcagtgtttaaaaaattagatctatagcttccctaaggaagggtagaagaatagatgacatcttaattttgcattcattcctaatattacagatgcatttactacacaggagaagagaaactgtgaggagaagggaggcgttaatggtacaattctgggggctcgaataaaagaggttgagagagcaaaatgctccatcttgtcttctctccacatgaacttggccgtgatccatgttctcagatgccagcacccagcccaccccaacacacggcagccagttctcacctccacatcaaacagcgtcgagccatagccaggccactccttgatcaaggccatgtacttggccatggcctgttcctggttcattccctgaaatttcctccacttgtcaatgatactggctcgagcagaggagacttcttccttaatccacatgtccagcatctgctcctcctcgaccttctgccggaccacggatcctgtccgggaagctccgcctcagggtcccctctaggaagctcgtccgcctcttctccagccgttcacaaggggtgaaggttttggttgactggctgatgcgggccttgagtctctgcagggaataaacctcttcgatgaggtgggatggcatgcgtgcagatgtataatccccctgcatgatactggatgtcgcatgggcagcaagaacctggaggttttcttccggggctggatggtggccatggataaccgcttcgtgggcctgttcaaacataaatgcaaactccacactgtcttttggcacgttgtctgtgtccaggaagcagtaaagtttgaagtagaatttccatggcaggtccccaacctcggatgtggcagccagcttttcaaacttggctaagacatcacgctacgacggttcgactttcaatggctttgtcgacgtggccgttgtattcaaacaaagcaaacatgttcctgctgtcctccatggccaggcctcggatcagcttctccaccacctccccagcggtggtgtgggagttgatggtgatcttgcaggagccgccgccatggcaatagaccgtggatgtcatttcctgcctgtggatcagagcttctatttcatctcgggaaggcacaaactctcggcatttggttttcttaagagattcgtaagtgaagagagcgtatttttccatctcggttcctggaaactgttcccgtatccttttcagatggaacttgagatacttgagaatccctcgactcggcaggaaggtgcagctcaggcatgtcaggatctgccagctgtacaggttgcccacactgccggggtggggcactttgttggtctgtttgataagctggcagtacagctcgtcccgcagaggtcgcaggtcatgccctgtctgtaggatgccctggattattggaattgggtcagacatggactccagttgctgcagggaattgaatatcttgatggcctcatcctgaagggtggtatagcctttgtctttgagcaagttgagatttatgtccccatacggaaggggcaggagcggggagtgcaaggggtgatgggtgtatcgaaggatcggggttccgcattgtaaatctgttccaccacatccgagttcaggcagttctccttgatatcttgaatcagctgctgggtgggggtgtcgatcggggccttggtgtcagtcacgttttgaatggcactggaccaccgggtggcctcgttgagcagcttggtgtagagccggtaacagtgcttgcgcccgtacacggtgacgttccagtagcctgtctctttgaatatcttctcatctggggggacgacagagcagaggctgttggaggaccagggtcccccagtttgagcggcggttcttctctgaactcttgtagtaatccagggaattgtgggtgagtacaaaccaccgtttcttcagtttcaagtgaagacatctttggactgttcttcacctctttgtgcaaccatcctctcacgatgaattcctggccctccactctggtgtcccctttggacctctgcagcagggttatccagtggtgcaatctcctccggcgtgtcggcgttgcagtgcagcacccggttggccgtgatgatcacaaacgagttgggtctatcagggctgtcagaggcacacacagaatcaat

SEQ ID NO: 65693 - DNA, 2904 bp, Homo sapiens
ggagaccgcgtctgcttcaacttgggccgtgagctctatttctacccaggctgctgtcgtcgtgggagccaacggtccattgacctcaacaagccaattgacaagcggatctacaagggcacccagcccacctgccacgatttcaaccagttcactgctgccaccgagaccatctcgctgctggtgggcttctcagcgggtcaagtgcagtacctggatctcatcaaaaaggacaccagcaagctgttcaatgaggagcggttgatcgacaagaccaaggtgacatatctgaagtggctgcctgagtcggagagcctgttcctggcatcacacgccagtggccacctgtacctgtacaacgtcagccacccctgcgcctcggccccgccccagtacagcctgctgaagcaggtcatggggcttctctttctatgctgccaagagcaaggcaccccgcaacccgctggccaagtgggcggtgggtgaggggcccctcaacgagttcgccttctcgcccgatggccggcacctggcctgtgtgagccaggatggctgcctgcgcgtcttccacttcgactccatgctcctgcgtgggctcatgaagagctactttgggggcctgctgtgtgtgtgctggagccctgacggccgctacgtggtgacgggtggcgaagatgacctggtcaccgtgtggtccttcaccgagggccgcgtggtggctcgaggccatggccacaagtcctgggtcaacgctgtggcctttgacccctacaccacaagggcagaggaggcggcgacagcagccggtgctgatggggagcggagcggcgaagaggaggaggaggagcccgaggctgcgggcacaggctcggccgggggcgccccgctctctccactgcccaaggctggctccattacttaccgctttggctcggcgggccaggacacgcagttctgcctgtgggacctcactgaagacgtgctctacccgcacccgcccctggcccgcacccgcaccctccctggcacacctggcaccacgccaccggccgccagcagctcgaggggtggcgagcctggcccaggccccctgcctcgctcgctgtcccgctccaacagtctcccgcacccagctggcgggggcaaggcgggcggcccgggtgtggcggcagagcctggcacaccattcagcattggccgcttcgccacgctcacactgcaggagcggcgggaccggggggcagagaaggagcacaagcgctaccacagcctgggcaacatcagccggggtggcagtggcggcagtggcagtggtggggagaagcccagcggccctgttccccgcagccgcctggaccccgccaaggtgctgggcactgcgctgtgcccgcgcatccacgaggtgcccctgctggagccccttgtgtgcaagaagatcgcccaggagcggctcacagtcctcctgttcctggaggactgcatcatcactgcctgccaggagggcctcatctgcacctgggcccggccgggcaaggcgttcacagacgaggagaccgaggcccagacaggggaaggaagttggcccaggtcacccagcaagtcagtggtagagggcatctcctcccaaccaggcaactccccgagtggcacagtggtgtgaagccatggatatcgggcccccccaaccccatgcccccagcctcctagccataaccctccctgctgacctcacagatcaacgtattaacaagactaaccatgatggatggactgctccagtccccccacctgcacaaaatttgggggccccccagactggcccggacacgggcgatgtaatagcccttgtggcctcagccttgtcccccacccactgccaagtacaatgacctcttcctctgaaacatcagtgttaccctcatccctgtccccagcatgtgactggtcactcctggggagacactccccgcccctgccacaagagccccaggtctgcagtgtgcccctcagttgagtgggcagggccgggggtggtccagccctcgcccggcccccaccccagctgcccttgctattgtctgtgcttttgaagagtgttaaattatggaagcccctcaggttcctccctgtcccgcaggacctcttatttatactaaagttccctgttttctcagcgggtctgtccccttcggaggagatgatgtagaggacctgtgtgtgtactctgtggttctaggcagtccgctttccccagaggaggagtgcaggcctgctcccagcccagcgcctcccaccccttttcatagcaggaaaagccggagcccagggagggaacggacctgcgagtcacacaactggtgacccacaccagcggctggagcaggaccctcttggggagaagagcatcctgcccgcagccagggcccctcatcaaagtcctcggtgttttttaaattatcagaactgcccaggaccacgtttcccaggccctgcccagctgggactcctcggtccttgcctcctagtttctcaggcctggccctctcaaggcccaggcaccccaggccggttggaggccccgacttccactctggagaaccgtccaccctggaaaggagagctcagattcctcttggctctcggagccgcagggagtgtgtcttcccgcgccaccctccaccccccgaaatgtttctgtttctaatcccagcctgggcaggaatgtggctccccggccaggggccaaggagctattttggggtctcgtttgcccagggagggcttggctccaccactttcctcccccagcctttgggcagcaggtcacccctgttcaggctctgagggtgccccctcctggtcctgtcctcaccaccccttccccacctcctgggaaaaaaaaaa

SEQ ID NO: 65694 - DNA, 1623 bp, Homo sapiens
caacttctccgagttctacgttgagctggaggccaacaacgagggtgtcgagtgcctgcggctactcaatgagatcatcgctgactttgatgagatcatcagcgaggatcggttccggcagctggagaagatcaagaccatcggcagcacctacatggctgcctccggcctcaacgactctacctacgacaaggtgggcaagacccacatcaaggcactggccgactttgccatgaagctgatggaccagatgaagtacatcaatgagcactccttcaacaacttccagatgaagatcgggctcaacatcggccccgtggtggccggggtgataggggcacgaaagcctcagtacgacatctggggcataccgtgaacgtggccagccgcatggacagcaccggtgtacccgaccgcatccaggtcaccacagacatgtaccaggtgctggctgccaacacgtaccagctggagtgccggggcgtggtcaaggtcaagggcaaaggcgagatgatgacctacttcctcaatggagggcccccgctcagttagcagctgttggccaatggtggccaggcagcctggcctccagaggcatggaagcagcttctctgtgtgccgggggtggcggggaagccatgctccagcccgcagggctgcgctgctgagattttccacttggactccagagcagcttctgcctttgctggtgggcagcggcctctgtcccaggccccggggtgccagcgtcctgcgagcacccagctgaccaaagatgtttccctctgtagaagactctgctagactgggtctgaagcttgagttttctaacaggtgctgctgcacaggtggaaaggagccgtgggaatgtgtgtgtggcacggcccagacaagggcagggctgaggggcctccgactcagctgggggtagacgggctcgaatgtggcctgggagagcctagggggccccaggggtctgcttttctatgtgagcctttaaacttcagacaggccaccaccctgcacctgcaggggctttggcacaggagtgctggctttggagggactgtggccttcatcgtggtcctctgcccacacctccacgcacacagacagtgccctaggagggaaacagaactaattacgagggggaggcaagaggacgccaagcaaggagtggtgattctgagaaaaatatttattaaataaaacaaaacaagttctccgtgcccttctttagactatgctagttgtatgcgtgtaagagacacacaagcaaacgaggacgccactcggggggagggcggggatccccacttgtcttttttgtattttttattttgtattattgaaagccttggagatctcacagatagatatgccaaattctatattttgtaaattctctatattagaaaacagctgtgcacagcagggcgggtgtgctcatttgtactgtgtgtatgtcggtgtatgtactggtgtatatgtgtgtgtgttcatgctgtggaactggtctcacacaggatgtgtttccctcatttcagatttggcagttttgggttttccaaggtaccaccagagcagtgggtgtgtgcttttggggtaccatatgctcagatt

SEQ ID NO: 65695 - DNA, 1311 bp, Homo sapiens
gctttagactattttccttcagttctctgcagtcgcagtgaaatacttcaagcgcaatttttgctgaactcttcttttcagcagtggaaaagctgcggaaatggaaacttacccccaacatatttcaatttggaagttcaacttcaaagaaaaatcataaaaatgtaagttttattgagtgcctatagtgtgcatgggcctttattagacacgccaaattcaggcacaacagacacaagatccctgggctcaggtaccttatgatctaattaatagatattagaaacagtaggaaaggcaagttacacgtcaatgcccaatgactagagtcaacattaaagagttgtaatttaagtaatccaaactgacatctaattccaaaatcatttataaaatgtatttggctttggaatccacaggacttcaaacaagcaaagtttcactgcagatagtcacaaagatgcagatacactgaaatactttaagagccttattaatgatttttgttattttggatcttctgtttttttcttattatggtccgaagcctccttaataccaatttatcagacagaagcatgtcatcttgttgttcaagataatccagtaaattttcagtcccatccaagtgccgctttatggctaatatgcttctctggattcagttctgtttttctactcttactggaaggcttttgctcagcagccttggtctggtcctcagcactttcactgtcagtcagcacctgacagcttgagtcactgctccgagagtcgaaccactgatcaatattctcaatgtcaacatgttcacattcttctgtgttctgtaaaactgttggtaaattagctgctaaaatggctccttcatcaatgttcatacctgaattctcttcattgccagggaaaagttttttccatgctttggttatggtacttgattttaccatgttccaagctcttgacacttcataaattgcatccaacactgtcaagttcttccaaaatatttttgggtcatttccttcatccatgtatttctggagaagtcctgctcgatagtatctttttacagtggctagaactccctggctcattggttgaatcagacttgtgacatttggtggcaaatacttcacaattattctgccatcatctgaactcaacatttcttcatttggacgtgctggggggaaatctaaaagaagcactgctttttctaaaagtcccttggatttcaaatgcttctgtacctgtggcacaaagtacttttcaaaccactgtctgaaaacagactgttctactcgtgcc

SEQ ID NO: 65696 - DNA, 3886 bp, Homo sapiens
ttttcttttttcccccccggtggaaaaggggtgttttttccaggcgatttaagtgggggaccccctggtttttcccctccccgcgttgttaaaccgcgggccgtggatttaaatttgggggccccataaaaaaaattttattttgcaagcccggggcgtataaattgggtcctttaaaacggccccccccttttttttttttttgcaaaatgctcaagtgtatttatgcaacagattggccatgtactgaggaggggagcgcaggctgagggctgaggtaggagtgaggttcttcctcctgcagccaccaggcagctgatcaccatgtccaagcgtcattcctgagaccctcaggtgatgctcacgtccccagaacagcaggctggatgcatggccagaggagctcggccagccccggggctggtcctgagaggtggctgcaggcggggtgggtaagggcccctcctccaggcagcaggtgacccatagcccacaccctccacaagaaagcgggcgtggacagtgtgttcaaagctgcagccgcctggacaggggcacaagttccactggccttggaagccgagctcagaggacatatgggaggttctccttggaggtcaggaggggcggcagtgctggtcagtgcatgggggacactgggacgcctctctcccagctcccactctctgcctcctggctgggctcgggttccgcctcctccgagtgctgggtgtcgcccggcgcagggcagcgccggcccatgcagccgcactcttccacctcggtgtagctgaaggcccggctggagccgtcggtgcagtgcagggtcacattcctcagcgaggtccgcagctcctggcagcactggcacctgtgctccaccgtgttgccctcgaggcgagtacatggaagagctgtccccacagttcccccggcagtaagccaggcgcacgggctccgaggagctgcagccctgctgctggatgatcagggctcctatggtacacagcacaggtcgactggttctggtacgggggcgggggcagcgggcagaagcggcagcagccgtccttgctcatgcgggcctcatccagagaacagctgagcggggggcacgccttcttcgtggtgaccaccacgagcccatcctggtgcttctcacactggtgggtcacacagtggttccctgcgtctgaccaggtgctcgccagggtagaagaggtgggcggggctcttgctggtgttggtgacacaggcgacctgcacacaggtgccacagcactgcccgctctgctcctggtactcgaagcccacagggcagtgtgtgttgcagatctgggtctcacagctgaccacaaacgcgtccgatggggggccacccggcagctcacacctgcaggtttcgcacaggctcgaggagaccacggcgccgggctggtacagggtcccgttgatgctgcacactgtccagctgcagttttggactgggcagcaggccccctcctggtaggtcgggatcgcgcgggcgccctcaggacagcccacgggcgcggggcagcggctggtgttgcaggcgcagctgtactgggggcagcactggccggcctgtggggctgcaggcacaggcacgaagccgggcagggggcaggcagggggcagcgggcagagcttgggtcggcaggtcagcgtccacgtggccgcctcacacgtgcactcctggcagtccatgccgacggtgtggcccaccttcaccggctctccgtggggccccagacacctggggcagcccgtgggcacgcagacttgggcactggtcgtgaagagggtcatgccctccggacagaagcagccttcggtgatggggccggcctcccggagagccccgaggctggcgctgtcattcccgtagcagtaggaggggttgctcgggccgcagggctggtacaccttgtcggctgggcaggtgaatgggcacatgtggccggtccggcctctccaatcgatgcagatgtcgtgggacgcgcagagtgccgcgtacagctccaggctggagcacaccacatccaggtccgtcatgtggcaccggtcaaagacgcagccctcatagaacagcagtggggggatcacagtgtggcacggctcaaagaccttgctcagaatcagctggcagatgggtgatggcaggcacggagcaggcggtgtggtgggcccgacggtggtagacccaactgtggtgggcccgaccgtggtagacccaactgtggtgggcccgaccgtggtgggcgtcgggtgaggccggtggcaggctggctggtcagggatgctcacgttccagaggccggacatctcggagcaggaagcgaccaccgtccccctaggcgtgcggcactcatccttcctgtcgttggtgcaagtgccgcactggccctcggtgttgttggcaaacttgctgaagggcacctccacggagaagatgaggccggagaacatgacctggactcccagctccgggatggtcgcgtacatcttgacgccgatgcgcgagaccacgatgccgtttttccggaagccggggctgaccaccttgttgttgaagatgatctcgttcgtcatcaccccgtggactggcttgcgggtcagcaccacgcggtcctggtggtactccaggatgatggacctcgggcaggagagcccgtcctccgcaccgcagaagtagttgtcgacgagcacgcggaagtggccatacacgggcacaatctgctgcaccagcacgtacgtgcagttgtccaggaaggtgtagtaggtgccgtcgaaggtgatgtagtgggggtcaccccagccgctgcacacacactggcactggtagtgatggcagcagccatcttggtcagccaccttcacagccgggtagccgttggcacaagtgggcttctccaccctcgggcacgtgcgcgggctcagggagatgacgttgttgccctcacaggtggcctcggagcagttgggtgtggcccaggtctcacctttctttctggggggaaccgcatttgggcatcccagctcagtgacgggctcggaggtggatattgaaggggacgtggctggggcaggaggcagcgtggtggacggacagtcactgtcaacccctctgaccacttggcagtcctggctacacagggcataatagcaatggccagcgaggtctctgtggcggtatatggtggatcctgcagggtagagccggtcagccacgttgcagaagcaggtttgggtggagtaagccacagagctggatgccacagagctggatgccacagaggtggatgccacggaggcggataccatggaagtagacagggaaggatacagagcattggtaggagaagtcccatatggggtcacagaggtcaccgggcagcctctgggggtctcgcagcagagcacgcgcacctcgtagttgaggcacatcttgaagggtccctgctggtcctggttccggcacaccaggccctcttcccggctgcactgcaccacctggcccaggtgttcgatgctcacctccgggtggctctcggctcggcactggagcctggtgatctcctcaggtcggcggcagattttttccccactcctgatgatgttgttgtaggtttccttgtccccaccgtggggtccaggggatggaaagtccacgtcaaaccacttggtccaggtgcaccggggatgacagtctctggtgactggttgggagtgggttgtcttggatacagaaacatggcttgtgctggtctttgaaacagaggctgtgctggtggtgggaacggggctgggagtagttccagaaccgaaggttgtgctgcttgtagcagctgagcgcacgcgtggg

SEQ ID NO: 65697 - DNA, 1086 bp, Homo sapiens
ttttttttttttggggcttaaaaaaatggttttatttcttaaagacaaaagctttttggttttaatacacaaactaaatgaggtccttggcaggctcttccaccttccggcccaacccctccaagggttgtgggctgcagtctctggtggccaaggacagaagagctgggcccggctgcaggggcctcaacagcctcgtgggctcgggagtccaggctggacagacgggccaggagagctcatccaggagaaggtcacttcctgggcgtctgcccccttttctattgctgtccacccagggaggcgtctgggtcctggggggactggacttcagttcaccgtaggcacctggctgtggtgcaggctgaactccttggccttgagacggaggctggcgatgctgttggccatgttgacccctggggttgcggggcctgagctcccagggctgtagggtggcactgtgctgtagggggacgaggctgtccaggagagataatctggactcaagggcggtgggccggggagcccacgggctgctcgatggcggcctccttgctgtaggacttgagcagcgaggcagagcgggctggccagcatggccctttcattcctgcggaacttggcgcggcggttctgaaaccagacctgaacgcgcgcctcgctgaggttgacgcgccgggcaagctcctcgcgcacaaaggcgtcggggtagtgcgtgcgctcgaacacgcgctccagcgcctgcagttggctgctgttgaacgtggtgcggttccgccgctgcttcttcttccgcttggcggcgctaccgcgccccgggctgggacactcaccatcctgcggcgccgcctcgctgccgctgctgcccccggacggctcccgtgctgcgccctcccgcgcctcggccctggccccggggcgcgccgccagccgcccggccgccgccacctcttccaggtccaggaggtggctcaccgagaagttcttgcgcgcctgggcgcagtcgccgggccccagcgcgggtggaggcggcggcggccccgggcccagcgccggcttgtccagggcgaaggcggcggccgc

SEQ ID NO: 65698 - DNA, 2973 bp, Homo sapiens
caagctttacaaggacccagcgggaccgtcgcgcgtgcttctgccggtgtgggaggcagaagctgtacaaaggctactgaggagttcaacgtgtcctgcctgacagacagcaatgccgatacctactgggagagcgatgggtcccagtgccaacactgggtacggcttactatgaagaagggtaccattgtcaagaagctgctactcacagtggataccacagatgacaactttatgccaaagcgggtggtggtctatgggggtgaaggggacaacctgaagaagctgagtgacgtgagcattgacgagaccctcatcggggatgtctgtgtcctggaggacatgaccgtccacctcccgatcatcgagatccgcatcgtggagtgccgagatgatgggattgatgttcgtctccgaggggtcaagatcaagtcatctagacagcgggaactagggttgaatgcagacctgttccagccaactagtctggtgcgatatccacgcctagaaggcaccgaccctgaagtactgtaccgcagagctgtcctcctgcagagattcatcaagatcctcgatagtgtcctgcaccacctggtacctgcctgggaccacacactgggcaccttcagtgagattaagcaagtgaagcagttcctactgctgtcccgccagcggccaggcctggtggctcagtgcctgcgtgactctgagagcagcaagcccagcttcatgccacgcctatacatcaaccgccgtcttgccatggaacaccgtgcctgcccctctcgagaccctgcctgcaagaatgcagtcttcacccaggtatatgaaggcctcaagccctctgacaaatatgaaaagcccctggactacaggtggcccatgcgctatgaccagtggtgggagtgtaaatttattgcagaaggcatcattgaccaagggggtggtttccgggacagcctggcagatatgtcagaagagctgtgccctagctcagcggatacccccgtgcccctgcccttctttgtacgcacagccaaccagggcaatggcactggtgaggctcgggacatgtatgtacccaacccctcctgccgagactttgccaagtatgaatggatcggacagctgatgggggctgcccttcggggtaaggagttcctggtgagtagccttatccacacccccgtccgatcagccctggcccttggaaggaaaggccagccaaacctgggcagctcagggtgagaagacagtggggagtgtttgtcacacaggtcctggccctgcctggttttgtgtggaagcagctttctggtgaggaggtgagctggagcaaggacttcccagctgtggactctgtgctggtgaagctcctggaagtgatggaaggaatggacaaggagacgtttgagttcaagtttgggaaggaactaacattcaccactgtactgagtgaccaacaggtggtggagctgatccctgggggtgcaggcatcgtcgtgggatatggggaccgttctcgtttcatccaactggtccagaaggcacggctagaggagagcaaggagcaggtggcagctatgcaggcaggtctgctgaaggtggtaccacaggctgtgctggacttgctgacctggcaagagttggagaagaaagtgtgtggggatccagaggtcactgtggatgctctgcgcaagctcacccggtttgaggacttcgagccatctgactcgcgggtgcagtatttctgggaggcactgaacaacttcaccaacgaggaccggagccgcttcctgcgctttgtcacgggccgcagtcgcctgccagcacggatctacatctacccagacaagctgggctacgagaccacagacgcgctgcccgagtcttccacttgctccagcaccctcttcctgccacactatgccagtgccaaggtatgcgaggagaagctccgctatgcggcctacaactgcgtggccatcgacactgacatgagcccttgggaggagtgaggcgtgccgccggctgtgggaccagcaagactgcacgtgtccctcttggccttgcccagggcgaagacaccttccctgccctggtttggctgacgtgctcagcaaaaccccatgtgccctgctcctgtgtgcagttggggtaggggcagctggcatggtcaggtaacactagtggcccagccccgcagacccacaagccctacccgtgctggggcttgcttcccgaggtatttcacctcttaagagggaatcttccacaagcccagcacaagctgccaggcctgagctacttgaagggggccatctaggtccccaacccatggactttgcctccattttcagctccgccttttttctcctattttctctctggctttcttcagccatgactcacaactaaaaacataaaacactggaggttagtggaggcccctccccaagcagggagcctgggatgggcagggagtgatagccaaactccttggtcacctgctccaagaaggaagcagtagctgagcacctgccctcacatactgctcttttcccctctccctccacaccagagatgtggtgagctctgttcttctaccaacccagtctcaacacacaaagtgccaccaccttccctgactcagaacccacatccactcaatgtgaactctactaccacgacctccccatattcctcacttctccatcacctccagcctgactccctgtctgccctttcacccccaagattttgcacaggttaaggccagttatggcctttttgaaatctgtaatagctcccctttccccaactctaaagcctagaccttaaacctgttcctagagctatgcacacccctgccccagtttaccgttcctccctcagggcctccgtgacactccatgaaaagaagttcttgcataccggaaagttgaataaatggatgaattcccaaaaaaaaaa

SEQ ID NO: 65699 - DNA, 2186 bp, Homo sapiens
agagcccaccgcaagccgccgcggccagactaccgcgagcagcggcgccgagacgagcggccctcgcagcccccccagaccgtgccgccaggcctcctccgcccgcctcggcgtcatgcggtccggccaccgcctcatgcttctcagcctcttcgggctcgctgcccgacgacagcggcagcaccagcgacctcatccgcgcctaccgcgcgcagaaggagcgagacttcgaggacccctacaacgggcctggctcgtcgctgcgcaaactgcgcgccatgtgccgcctggactactgcggcggcagcggggagccaggcggggtccagcgcgccttctcggcctcgtccgcgtcgggcgccgcgggctgttgctgcgcctcctcgggcgcgggggccgccgcgtcctcgtcctcgtcctccggctctccgcatctctaccgcagcagcagcgagcggcggcccgccacgccggccgaggtgcgctacatctcccccaagcaccgcctcatcaaagtggagagcgccgcgggcggtggggccggggaccccctggggggcgcctgcgcgggcggccgcacctggagcccgacggcctgcggaggcaagaaactgctcaacaagtgcgccgcctcagccgcggaggagagcggggccggcaagaaggacaaggtgaccatagccgatgactactcagatccctttgatgccaagaatgatctcaagagcaaagcaggaaagggggagagtgctggctacatggagccctatgaggcacagaggatcatgacagaatttcagaggcaggaaagtgtccggtcccagcataaaggtatccagttatatgacaccccttacgaacctgaaggccaaagtgttgactcagactcggagagcacagtcagcccccgactgcgggagagcaagctgccccaggatgacgacaggcccgccgatgagtacgaccagccttgggagtggaaccgggtcaccatcccagccctggcagcacagtttaatggcaacgagaagcggcagtcatccccctcaccttcgcgggaccggcggcgccagcttcgtgcccctggagggggctttaagcctatcaaacatgggagccctgagttctgcgggatcctaggagaaagggtggatcctgccgtccccctggagaagcaaatatggtatcacggagccatcagcagaggagacgccgagaacctgctgcgactctgcaaggagtgtagctaccttgtccggaacagccagaccagcaagcatgactactccctctccctgaggagcaaccagggttttatgcacatgaaactggccaaaaccaaagagaaatacgttctgggtcagaacagccctccgttcgacagtgtcccggaagtcatccactactacaccaccagaaagctacccatcaaaggggctgagcacttgtccctcctctatcccgtggctgtgaggaccctgtgagcggaccagacctgccctgctctgtgacagagcctgagacttggaggtgccagaggccccccaccaaccagcccagccactgttgctggctgtgtcgtttgtgttgtgtgtatggtactagcacaccactgcatgtctctagaatgctgttgccacttacgggggctggagaaggcctggataaagacagaagggcggcaacacaccaccccagcccccacccccaccctctccttgagtttctgtgaattaaaatatttgcaaatccaaagagatgccttccaggatgaacaaaggcagaccagctccgaggggcggggtagggtggggcgggagctccctggctgacatctctttgttctccagctgtctcaaattcacacctctgtacagggcaaagttttcccacaggagcccccctactgatgctgggagccaaatgctggtgctttgagagtcccggaggccccggggttcccgccccgctggtgtgtatatgtgtgtctgtgtgagtgtgtgtgtgagtacagatgtgagaaggtggtcacacacagatgggtaagcccactgatctacttgtagtcactcagtgtaatcattaggctatcttcaaggaattcattgtgcagtcaaaaagaggatctcaatctatttatgacataggagtgtagtaaataaaaataagtccatttaactataaat

SEQ ID NO: 65700 - DNA, 4308 bp, Homo sapiens
ttttttttttttaaaatcaaaatgtttattggagtgttgtacaaaaaagtttccagtcataaaatgtatattacaaatcattggaaaaaaaaaagaacacattaggcatgcatcttcttaaaaaccgaatctctgaaatgaaagtccatgccagccccagctgcagcccagctccgtttttgcaggttgtgctgtgacgctcgctggacgcagggcttggaagaggctgcaggcggcgacgccccaggactgaggagtccctcagatctttaacaaagaactgccgcgtgcaggcttcagaccaaccccagccaaagccgctggcatgaggacaggtgcatgatcggattctgggtcagcccgcaggcctcccggctcctgggctcagcggggcaggcttcagcgttaacctggcgctgtgcaccccagaacccgcgttggtccagcaggcgtgggcctccccccagggctgggtggcgtctgatgcttcgcagggagggcgctaggcttcgagtcacacggcacgggcttacacagagggatggtttcgcatcgttctaagcggcacacagctaagcgtatttggggacaaatgcaaattgtttcccaggccataaataacttttaaaaatttgattttcttagtgtttccaaagactcaattctcaatgaacctccaattacccacaggctgcccagtccacgcttctccccacccccttcagctaagggcacccgcagtcctaggaccacccccagctccacccaaggcaaatgtagggtggggggttctgtgggcctggggcgtgctgttttcaggacaggactgggcagcgtctggacatgaggacctgcgggttttgggggggactttgtccctgagcccagcctgcaaggctgtcggcaaatcacagaccaactccaggatacagctttgctcctccagagccaaaatacataggatgtggctgagaccactgcagactccccataggacaagatcaccaagacccacccccagaaccctcgctagcacgaagcccagccagtcgggtccgggtgattcctgctatgaaggtgggaaagaggacacagtctgtcgccagcattcccacttccagcggctggcagagggtatccccggggcaggcaaagctccctaccagccgcctgactgggagcacagcggcgtagcctccaggaggaaatgctttggtaagatgcgcccccctctatctacatgggaccgggacttctgagagcaaggacagcgagcaggggctacgtggagcagcgggtgtttctgctttgtcggccgctggctccttcccggcctggggctggggccccccattccttcctgccacaggcaggtccccagggaggcgggatgcagtcacaggggagcggtgccgcccccgccctgcagtgaacgccatggcccggagacggcgcgtgcccatggctcagttttggtgtctttaagacttgagctgcactttctgaaggaggctctgccgtcggagggtgccccagccccacgccaccccggggaggagggtcagcctgtcctcaaggccctggcgtgagctcctgacctgtgtactgaccaatgtaaaaaaataaatatccattaaaaaaataacttctgtgtatctatgagggagggtgtaaacggtgagctattgccgaaggggggtgccaggcattgggaagctggactgaggggcttgggtgcgtcgtgataggagtcaggtggccttggcctgtctgagaaacatggtttcagcgagaaaatcacagataaaagcacagtatggatagacgcatgtgtatatataggcacagggcagacggagctggaacacgggaggggctccacagcgctctcctccagagggtcaacatggtggcgttccctgcagacagctgttctgaaactcacagcttctgcctccaaggcaaccagatgtgtcccctccacatctcccctccctgcttattgttgtgacaggtcttacgacgggactgtcctcattcttccttccccaggtcttcccgtctcctgccctgttggccttgcacagtcaggaactgaactgcgggaaaactcccccaaataaagtcaacggtccgagaaacccggccggtgcgctgccagaacgggaatctggaagcccaggcagcggagtgaaaacccgccctgggggccacgccatccccatgctggcccacacccgctgcgtggctgcctgaggagttcccgctgtccgaagctgggcagccagaatgcaggcttggccccgggccccaccaggtcgacgcctggattctgaatttggttttgtagaaagccttaaaaaaaacccaccaccactgaattcctacgcagtttccgcgctccgtccgcagcagggccgtctcctgtcccctcgctagcctcgccggccctcctccctccaagcccaagcatcttctaaacctcggggtcctggccctgggcttccaatttgaccaaatggtgagatgaggagtggggtgggattgaaaagtctccggggcagcggcgaagtggcagcgaagtgaggctggaggagacccgccaggagggagggctgggggagacccacccacacgttctggcagttcgcttagaaattctctagaaatgtatcaagaactaaagaaagccaatgatataaaaatagttttcagtggctctgggtaaagaaaggtgtgtggatgaggagtgtgggttcacatcacgtagcagcctcttgaggtggtcctcgggtccccctgttggtggaaaagatcctcctcgccaaactcggcttcctcctcctcttcctccccattctcattctcacgcatcaccgaggacttcttcacagtcctcatggccacttcctcgccatccgcgttaaccaggacggtgcggaagctctcgcccgtgccccagctgctctggcccttccacaccagcgtcgagggggggctgtgggccacccccgcaccagctgcccacaccgtgaccatctggccggcgcgcaggatgtacttgggcgtgaacttgtaggcgatctcctccccctccaagacctgcctcttgattctccagttccccagagactgatccttgtccgagttgttcttgagctgcacaaacttgccctccaggtcgatctcctcgatgctgacgctgcccgaggccgaggcctgctgggccaggtggaagccaccgctgccacccgtgcccgtgcccaggacgcttgggccgctgcccaagggctcctccacctccagccgcttccgcttactgcggcccaggcgcccggtggcggacaagctgccgctgctgctcgaggtggctcgtgagacggtgacgcgcgaagatgggctgggggacagcttcagcctctcctcctcgccctccaggagcttccggtaggcgttgatctccatgtccagggccagcttcacgtccagcagctcctggtactcggccagctgctgctgcatcacgtcccgcatctccgtcatctcctgctccttggcgtccagcatcttccggaacttgtcccgctccccggccatggcctcctccagctcccgaatgcgatcttcagcggcactggcctgcttctggaggccggagagctggtagctgagggactccaggcgcatgcgggcctccttcagctcctcgcgagccgcactggccgccttgtcgttctggtcagagctcagcttggcgctgtccagcttggcctggtaggtctgctccagctccagcttgtagagccgcacttgctcgtcgtgctggctccgcagctcctccagcgcctgtgccatcttgaagtcgtactcctgctgccggctgctgtccacctccaccaggcgccgctcgtgccgccgccgcgtctcccgcacctcctcctcgaacacactcttccggaagtccagctcctcctgcaggctctggcagcggttctccaggtccacacgcatcagcgtctccttctccagctgctttttggccactgcatgaccgtcctcggccttggccagctgggcccgcagctcagccacgtcactctccaggccgcgcttgtcgctgagggcagctgccagctccacctcgctccggtggaacagggactccaggtccttcacacggccctgggccaccgtaagctcgccctccctcttcttggcgctcttgttgacctcgtccaactctgccctcagcttcccaatctctatctgcagccgggcacgctctcgagccgtctcatccaggactct

SEQ ID NO: 65701 - DNA, 2457 bp, Homo sapiens
ggcacgaggcttcgtgaagataagaaccataacatgtatgttgcaggatgtacagaagttgaagtgaaatctactgaggaggcttttgaagttttctggagaggccagaaaaagagacgtattgctaatacccatttgaatcgtgagtccagccgttcccatagcgtgttcaacattaaattagttcaggctcccttggatgcagatggagacaatgtcttacaggaaaaagaacaaatcactataagtcagttgtccttggtagatcttgctggaagtgaaagaactaaccggaccagagcagaagggaacagattacgtgaagctggtaatattaatcagtcactaatgacgctaagaacatgtatggatgtcctaagagagaaccaaatgtatggaactaacaagatggttccatatcgagattcaaagttaacccatctgttcaagaactactttgatggggaaggaaaagtgcggatgatcgtgtgtgtgaaccccaaggctgaagattatgaagaaaacttgcaagtcatgagatttgcggaagtgactcaagaagttgaagtagcaagacctgtagacaaggcaatatgtggtttaacgcctgggaggagatacagaaaccagcctcgaggtcccacttggaaatgaaccattggttactgacgtggttttgcagagttttccacctttgccgtcatgcgaaattttggatatcaacgatgagcagacacttccaaggctgattgaagccttagagaaacgacataacttacgacaaatgatgattgatgagtttaacaaacaatctaatgcttttaaagctttgttacaagaatttgacaatgctgttttaagtaaagaaaaccacatgcaagggaaactaaatgaaaaggagaagatgatctcaggacagaaattggaaatagaacgactggaaaagaaaaacaaaactttagaatataagattgagattttagagaaaacaactactatctatgaggaagataaacgcaatttgcaacaggaacttgaaactcagaaccagaaacttcagcgacagttttctgacaaacgcagattagaagccaggttgcaaggcatggtgacagaaacgacaatgaagtgggagaaagaatgtgagcgtagagtggcagccaaacagctggagatgcagaataaactctgggttaaagatgaaaagctgaaacaactgaaggctattgttactgaacctaaaactgagaagccagagagaccctctcgggagcgagatcgagaaaaagttactcaaagatctgtttctccatcacctgtgcctttactctttcaacctgatcagaacgcaccaccaattcgtctccgacacagacgatcacgctctgcaggagacagatgggtagatcataagcccgcctctaacatgcaaactgaaacagtcatgcagccacatgtccctcatgccatcacagtatctgttgcaaatgaaaaggcactagctaagtgtgagaagtacatgctgacccaccaggaactagcctccgatggggagattgaaactaaactaattaagggtgatatttataaaacaaggggtggtggacaatctgttcagtttactgatattgagactttaaagcaagaatcaccaaatggtagtcgaaaacgaagatcttccacagtagcacctgcccaaccagatggtgcagagtctgaatggaccgatgtagaaacaaggtgttctgtggctgtggagatgagagcaggatcccagctgggacctggatatcagcatcacgcacaacccaagcgcaaaaagccatgaactgacagtcccagtactgaaagaacattttcatttgtgtggatgatttctcgaaagccatgccagaagcagtcttccaggtcatcttgtagaactccagctttgttgaaaatcacggacctcagctacatcatacactgacccagagcaaagctttccctatggttccaaagacaactagtattcaacaaaccttgtatagtgtatgttttgccatatttaatattaatagcagaggaagactccttttttcatcactgtatgaattttttataatgtttttttaaaatatatttcatgtatacttataaactaattcacacaagtgtttgtcttagatgattaaggaagactatatctagatcatgtctgattttttattgtgacttctccagccctggtctgaatttcttaaggttttataaacaaatgctgctatttattagctgcaagaatgcactttagaactatttgacaattcagactttcaaaataaagatgtaaatgactggccaataataaccattttaggaaggtgttttgaattctgtatgtatatattcactttctgacatttagatatgccaaaagaattaaaatcaaaagcactaagaaatacaaaaaaaaaa

SEQ ID NO: 65702 - DNA, 678 bp, Homo sapiens
aggttgagaacccaccctcccgtgctgcctcttctccctctctctacactagtaggctcatctgtccctcacagacagagattttggctgctgcacacacagatgtttattgttttccaagctccctggtgttaaacatgcagggtcagggggctagcaggctgagatgaagctcctctctacttggtcttcttatcgtaggtgccagaacccttgtaaccactcacatagcctgtgttgtcagtcatctcttcccgtcccgcaatgcccttgcccttgccactctcatcaaagcgctccttgtgggtgccggtgtacttgctggtgtctgtcaaacggtccactgcacccactgttgttgctttagtagcgccagtggtggctgggtctttgccctccatgagtccataaatgttctccaggacttcatctggactcttccctttgaagcgcttctggcccagttccttcactgcctctttgaactgttgaaacgtgatggttcgggcgttcttggccttgactttgctgaacacgatgtccacgtccgtggaggtgactgtcttgccatccatgatgccacagtctttgcacaggctgggagaagttcttgttgttcatttcagtgccactgcttgatgattctccaaacgcagcaaaccgatggaatgttttttc

SEQ ID NO: 65703 - DNA, 1042 bp, Homo sapiens
cccttttcatcctccagtgtctcctcaaaaggatcagatccctttggaaccttagatcccttcggaagtgggtccttcaatagtgctgaaggctttgccgacttcagccagatgtccaaggtaaaagtacacctgtaagccagcttggttccgcagactttcccgaggcccccgatccattccagccactcggggctgacagcggcgacccgttccaaagtaaaaaggggtttggggacccgtttagtggaaaagacccatttgtcccctcctctgcagctaaaccttctaaggcctctgcctcgggctttgcagacttcacctctgtaagttgagtcctccgcctccgggccaccccactcccttccgcttgcagcttccctgggatttttgtctccttttaaaggcaaacctcccagcttctttagcctcttggtacctcacactctctgtccctcgcgttatttattctacactgccacttctgtaagaaaaacagtttctcaataaaaaaaaaaagagccgcagtttggatgctctatcataagggcacgttttcttccagcagggaggcgggacctatctgtccttcacggtagattcattgtattatttctgacgcaccgaggctgttgggttcactggtttttggaagccaaaatgtcaaacacttccgaagtatgaaaagaagattgcgaaagttacattagggttctgctgtccccaaaaagccctttgtgcacaagttctcacagtcccgccccatgcattttgtgccacacgtgcaaattgaaggacttcaggcagatcgcgccagggaagagcaatttgaagtttttttttttttaaagcttttaaattccaccccccacctccaagaaaaaaaaaaatccaggttaaaacagcccttttgaaagccaaaccaaaaagagctccaaaaacctgtggagcaaagttaagggccttttcgaaagcaaatctgggaattacaaaagcctgcctttttttttttttgggggaaaaaaaattccaaattgtaacc

SEQ ID NO: 65704 - DNA, 2198 bp, Homo sapiens
tttttttttttttaatgaaaatatgtgacacttttatttacaagcttttttgcataaactatacttaacatgactaaacaacaaaaagttcttgacttccatcctttatgggtagaaaaataaattattttaatagttatttaaacatgcctcctgcttccagagaaattaatgtgttaaatatatatatttttcaaattatccctaacatttacacaaacttgagtagatactgctctatttttacacagaattgtaaacagccttttaaaaagctagagtaactttccactagttagaactgaacattgtaaaatataaaaattttataaaccctataatgcaggtaatttaattatgactgatctgtaggaatatacaataaaaatttgtcagtcatccacaattaagtacaattatttatggagaaaaattttactatgtccagaaaaagattttattcatgttcttgaaagatagctttgttcccaataaatattccctcctactatttttgtacattttaggaaaagatgtattcagttcaaaaataagtaacatccagttatttgactttttgcttttttcttgcttgaaactgctctgttttggtttttatagatttaatcaacattgacaaagcaggatcaatggacttcctttgtgattccttttcaatctcactctcttttttctttattgcctgagtaagttcttgttctttccgttctctttgccgggccttctcctcaaggattttttccatagcttttgttttcttgaaattgggatctgaggggtccaaattgaacaagtgggaagtgtacattgcctgaaaccgtgcatcgttaacatttacctcaaagtcatcctctattaattccttctttttcatgagctgctttttcttctttttgctcagattctggtgctccacaatcttgttgtaattgaagtgtttcttactgtcctcgtcctcatccatcataagcaaagccatttcagccttttgtctttctatttcaatttcttcttctggagatgtgccatcttttgcagattttaccgattttttatttatacctatttgtttaacttcttcagcaaagtatgggtcattcaaatcaacatcagagggaagttcctcttcactggcctcttcagcaagagccttctgtttccttttcagtctttttttctctttcttcttctctaaaaattgttcccaaggggtcagtttatcctttccattccaatttgtttttgaccatctcttctgcactttctttaagacctggaacccatttaatttccatttccatatcattttctttgccttttttttttttttcttgaataacctgcaagagctgcctgtatttagcaatttgttcttcatcatccttctgacttttctttgttttcccatcttcttctacattgactccatcatcaccttgtagctcctcttctgtctcctcttcatcttcactagaggaagctaagtaggcttgaaaatccatgtccaaaagctcttcctttttaaacttcctgttgagcattgtaattctttcatgatcagtctcatcccaagtgatttccaccgttgatgttcccattgcagcagaagtgaaatattttggtttatatgctgttaaattcacttctgaggctacatccttaggctcatcatcaaaagtaatatcatctggtataaaccttagatctatgaaagaacaactactttcaaattccaggccatcacaatcctcataaattttactagctgtttccggagaatcacagtctactactgcataatagtacttcagtcgtttgaattgataatctctcaatttttctctagacgtccagtctttttctggggcatcttcaggaatacttaatagctctactggtccttgaacttgctcttccttcatcctctcctttccaaattctgaaggatatatcttgacggaaaatattacacctcctttgggtttaaatgaattgaacagagccagcaaatcttttgcctttaatctatcccagtccatgttacaaactgctaatcgacgtgtaatctcatcagcacgaggagcatctttatctaattctctccaagcatgctcaaaaccagattcttctggaaacaaatctgccgtatcatcttcatcttcagaactagtttctat

SEQ ID NO: 65705 - DNA, 6839 bp, Homo sapiens
ctccagaaggtttttgttgcatttagagaatttaatctgtctgaaagcaaagtttgtgaactgcagttgccggatatcaatctcgtgaatgaccagaagaaattagtatcttcagatctttggagaattgtcttgaacagcagtcaaaatggagctgatgaccaaagctctgcaagtgagtctggttctcaaagcacttgtgatccacttgtgactccaacagccctggctgcctgtaccagagttgactcctgctttaccccatggtttgtcccatccctttgcgtttctttccagtttgctcacctggaattccatctttgtcatcaccttgaccaactaggcacagctgcaccacagtacctacagccatttgtttccgacagaaatatgccatctgaactagaatacatgattgtttccttcagagaaccacacatgtatcttcgacagtggaataatggttctgtctgtcaggagatccagttcttagctcaagcagactgtaaacttctagagtgcagaaatgtcactatgcaaagtgtggtgaaacccttcagcatcttcgggcagatggcagtttccagcgatgtagtggaaaagctgcttgactgcaccgtgatagttgattctgtatttgtaaaccttggacagcatgtagtccattcactaaacactgcaatacaagcttggcaacagaacaaatgccctgaggtagaggagttggtcttcagccattttgtgatctgtaatgacacacaggagacactgcggtttggccaggtggatactgatgaaaatattctgctggcgagtctccacagtcaccagtacagctggcgctctcacaaatccccacagctgttacacatctgtattgaaggttggggcaactggcgttggtcagagcctttcagtgtggaccatgccgggacttttattagaacaattcagtacaggggtcgaactgcttctctcatcatcaaggttcagcaactcaatggagtacaaaaacagattatcatctgtggaagacagatcatctgtagttacttgtctcaaagcatagaactaaaagtcgttcagcattacattggtcaagatggacaagctgtagttcgggaacattttgactgcctcacagccaaacagaaattgccttcgtacatactagaaaacaatgaactgacggagctgtgtgtgaaggccaaaggagatgaagactggtcaagagatgtgtgcctggaatccaaagcccctgagtacagcattgtcattcaggtgccatcttcaaacagttccattatttatgtctggtgcacagttttgactttagaacccaactctcaagtgcaacaacgaatgattgtgttcagccctctttttatcatgaggagtcatcttccagaccccattatcatacatttggagaaaaggagtctgggattgagtgaaacacaaattattccaggaaaagggcaggaaaaaccactgcaaaacatagaacctgaccttgtacatcacctgacattccaagcaagagaagaatatgatccttcagattgtgcagttcccatctcaacatccctcattaagcaaatagccactaaggtacaccctggaggcacagttaatcagatccttgacgaattctatgggccagaaaagtcgcttcaacccatatggccctataataagaaggattctgacaggaatgaacagctaagtcagtgggatagcccaatgcgagtgaagctgtcaatctggaagccatatgttagaactttgttgatagaacttctgccctgggccctgcttatcaatgaatccaaatgggacctctggctatttgaaggagagaaaattgttctacaggttcctgctggcaaaattattattcctcctaattttcaggaagcttttcaaattggaatatactgggcaaatacaaacactgtgcacaagtcagtagcaattaaactggtccataacctgacatctccaaagtggaaagatggaggtaatggtgaagttgtgacactggatgaagaagcgtttgttgatactgaaataagacttggtgcttttccaggacatcagaagttatgtcagttctgcatttcctccatggtacagcaaggtatacaaattattcagattgaagacaagactacaataatcaataatacaccatatcaaatattttataaaccacagctatctgtctgcaatccccattctggaaaggagtattttcgtgttccagacagtgctacttttagcatttgcccaggtggagagcagcctgctatgaaatccagctcccttccttgctgggacttgatgcctgacatcagtcagtcagtactggatgcatccctgcttcagaaacagatcatgctgggcttttctcctgccccaggtgctgacagctcacagtgctggagcctgccagctatagttagaccagagtttcccagacagagtgtggcagtacccctcgggaatttccgggaaaatggattctgtaccagggctatagtgctgacatatcaagaacacctcggagtgacttatttaaccctctcagaagaccctagtcctcgagtaattatccacaatagatgtccagtaaaaatgcttataaaggaaaacattaaagatattccaaagtttgaggtttattgcaaaaaaattccctccgagtgctcaattcatcatgagctgtatcatcagatttccagttatccggactgcaagaccaaagacttacttccaagcctacttttgagagttgaacctctagatgaagtaacaactgagtggagtgatgccattgacatcaacagtcagggaacacaggttgtgttcctgactggctttggctatgtgtatgtggatgttgtacatcagtgtggcacagtcttcatcactgtggccccagaaggaaaagcaggacctattttaaccaataccaacagagcgccagagaagattgttacatttaaatgttcatcactcagttaagcctggcagtgtttgatgacctcacccaccacaaagcatcagctgagcttctgagactcacactggacaacatttttctctgtgtggccccgggagctggtcccctccctggggaagagcctgtggctgcgttgtttgaactttactgtgtggagatctgctgtggggacctgcagctagacaaccagctttataacaagtccaatttccactttgctgtcttagtctgccagggagaaaaagcagaacccattcagtgttccaaaatgcagagtctcctcatatccaacaaagagttggaagaatacaaggaaaaatgttttatcaaactttgcatcaccttaaatgaaggcaagagcatcctctgtgatattaatgagttcagctttgaattaaaacctgctcggttatacgtggaagacacatttgtatactacatcaagactttgtttgacacctaccttcctaacagcaggttggctggtcactccacacacctctccgggggtaaacaggtgttgcccatgcaggtcacacagcacgccagggccttggtgaatcctgtgaagttacggaaactggtgatccagccagtaaatttgctcgtcagcatccacgcttccctcaagctgtacatagcctcagaccacactcctctctccttctcggtgtttgaaagaggacccatcttcaccactgcgaggcagcttgtgcacgccctggcaatgcactatgccgctggggccctttttagagcaggctgggtagttgggtctctggatattcttggcagccctgcaagcctggtgagaagcatcgggaacggggtcgccgacttcttcaggcttccgtatgaggggctgacccggggccctggagccttcgtgagtggcgtctccagagggaccacatcgtttgtaaagcacatctccaaaggtaccctcacatccatcaccaacctcgccacaagcctggcccggaacatggaccggctctcactggatgaggagcactacaaccggcaggaggagtggcggcggcagctccccgagagcctgggcgaggggcttcgacagggcctgtcccggctgggcatcagcctgcttggtgcaattgctggtatagttgatcagccgatgcagaacttccagaaaacatctgaggcacaggcttcagcaggacacaaggccaagggtgtcatctcgggtgtggggaaaggaatcatgggggtgttcacaaagcccatcggaggagctgctgagctggtgtcacagactggctatggtattttacatggagctggactttctcagcttcccaaacagcgccatcagccaagtgatggtacatgctgaccaggctccaaacagccatgtcaaatatgtctggaaaatgcttcagtctctgggcagaccagaagtccacatggccctggacgtggttctggtgaggggctcaggccaggagcatgaagggtgcttgctgctgacatcagaagtgctcttcgtggtgagtgtcagtgaggacacacagcagcaggccttccccgtcacagaaatcgactgtgcacaggacagcaagcagaacaacttactcacagtgcagctcaagcagccaagagtggcctgtgatgtggaggtagatggagtccgagagagactgtcagagcaacagtacaacagactggtggactacatcacaaagacatcttgtcacctggcccccagctgttcttccatgcaaataccatgccctgtggtggctgcagaacctcccccctccactgttaaaacataccattacctggttgatccacattttgctcaggtcttccttagtaaatttaccatggtgaaaaataaagccctgaggaaagggtttccttgagtcccctctgaggtgtttattcctgcttgtgtgatttagtttttgggtttctttgagacagggtctcactgcattgcccttgctgacctcaaattctggggttcaagcaatcctcccacctcaacccacaagtagctacgactgcaagcacctgccaccataagggctgcattttgccaccataaagggctgcatttttttaaaaagcctaggcagctctaacatcatctgatatggacacaaggccaacagtttccttatttacatccttacctctaaaagatacttcaaagtgacaaaaacgtgttccttccccacttagagacaatgattaacagggccctatatgttcttaccacatacagaggatgcatttatttttgctctatgacacttgcaaaaatctctactgtaattaatttgggtctattaactctctgttccatcatagaatgtggccaggccttacaatggagagccagagttaaaacttcaagttgcatctgtttttgggctgagtcaccacctttgcctcatgctcctttgtctgcaaaggcctaggattctttctttaaatgaaatgcttaggactttttgtggcttgttacatttgtcatttaactgcagtgctattctttgaaagctgctatgtgtattttctctgaagtctgcattttactaaaatttacaacagtctgatgattgattgattactgtccaggtacattttagaaaaagtgttcttcttccagtttgttttactaagcaaactttgagtaaatcctttgtcctatattgaatccagtcccaaagtgttcaggtgagtttctctagttccataaacaaaacatacatagtgggaactccctggtatgccatagagcacacaagaaccccaatattaatgctaacaattataccagtccattttgtttattctgtggaattgacttgacaaagcatgaagatattcccagtgtctgtctgataatattttgcatctaagaatgggtttgactcaagatcttgggttaccaagatgtcttaaatgttcagtaaatatctttcttacagtccagtagcttagagcatgtttgctgattgatattacatttaaacttggggctacagcttgttacctagaattttgagatactaagagaatgcaattttaaatgcccactggttttatttgttttggagagagggtctcattctgtcacccaggctagagtacagtgggaacagtcatggctcactgcagcttaagctcactgcctgggctcaagtgatcttactccagcctcccaagcagctgggactacaccaccacaggtatgcaccaccatacctggctgatttttaaaattttttctagagatgaggtctcactatgttgcccagctggtctcatactcctcagttcacgcattcctcccacctccacctcccaaactgctggggattacaggtgtgagccaccatgcccaacacccactgatctttaactctccaccatgttgggccataagaagtcactatataattgttactggaaagcaagacttaacgaacaattctgactatgaaaaatgtctctttcagtttgttctgtaaatatttagaaaagtgacagctgtcaacctcagagtaactatttctaaaaatgtaaatatgtattaatccttgtatcttttatggtaattttgcatattgatatgaattatataaaattgtttaaaataaaaggtgtccttgaattactgaccacccatagatgtctactgttaccaggttttacaatgcaaattttcactaatacctgggtttaatacagctcacatcactgaatgttacacatgaatttaaatgggtaatatacaggttttgttataataaagttactgattaaattaaaaaaaaaa

SEQ ID NO: 65706 - DNA, 3457 bp, Homo sapiens
ttttttttttttggaaaaaccaagtgtctttattcctcgatcgtttagtatggcggtgggcggcgcccgcgcgggggagcctggagcccagggaatcgacctggagggccagtggagggagcggagggtgcgaggatcggctcctccgcaggccggccctggaggggttcttggggggatcgcgccaggccaaaagtttttcattggcggccccgagcctccctgagccggcgcgcccccgggcgtggggagatggccgctctagggcgcggtgccgctgcgggcccgggtgcggcgctcgcccaagggctaaggtgccccgtctcaggcgagaccccaggagcccgccgcccccgctgtctcttcagccgacgtagacacgtcgggccgggaaccccagtcttaacgcgtgttcaagctctgggtcccccatagagcagggccccgctgaaagatggtaagcggctccttccgagtgcgccagctgccccatgaccaggtcgacgcagaccgtgtccccaggctgcagcggcaggatgaggctgaagacgcccagggtgcccgggctgggctggctctcggccaccggcttattctccaggccctcaggctcgtagccaccggagtctacgcgggccacgccctggttggagcgggacagcacggcctccactttctcgtgccggtgcccagtcagcaccgcgctcagcaagtagcgtccagccagtggcgctgtgaacacgcctgtctctggatcataatagcctccatcattgagcaggactctgtcgaaggggaccgtgcctggttcagaccggggcaaactcagagcagctgaaaatgccacttggggcacaggggctgctggtgccccctccactccctgttcaccttgaggacctggtggcccgatggggccctcttgcccgtccttgcctggtgatcctggaggtccagcagggcctgggggtccctgcagcccaggaggccctgggggcccagcctctcctgcaggcccagtgaggtccttcaggctgagctggtgcagacggtcctccaggagctgcagggagctgttaagggcacccagccgcctgcccaggcccgcctgtcccccgaccagcttctccagcagggctgcctgcatctggctggtggtgttggtttcccggagcccagcccagagcccagccacgtgtctggaaaggccctcgcgcaggccctgcagtcccccagccacagtgtccaaccgttcacagacaccctcaagacggcccaatcgcccctctaagctggggcactggccggcctgtgcttgtccctcctctaggcctcggaagcgctcttcactctctgtagcatgctctgtggcctcctgctgcagcctgttaatctcagaaatgatacggtccttggttgcccccaggtcagccagatcagcgccctggccctccacagtggtctggagctcattcagtgagtcattgagggagctgaagctgagaataacctcagagagctctccttgcagggcctgcagggctgagcctgagctgcccccaaacacgctgaagccgtccaggggcccacggcttgggcccccaacacctggaccagccccaggaccccgaggaggcaacagggggcaggagcagcgctccacaccatcccgaaggcggcctagttcctcttggactccgccacaggccccacagccctcatccccatgggcctgcagcagcccctccagttggcctagccgggccgcagtgagattcagccgtagtgtgaactctgcagctgtctcatcctgggcatccacacgatcctggagccggcccacaacctcttgtaatccctccagcgtggcctgccgggcctcccccgctgcttccaccgtgtgcaggccggagcccaccagccgcagctgcccctcactgtccagcaccctgcgctccaaggcactgaggatctcgctgacttgagagtcctgctccccaggggccccagagcagagctgcccgcatgcctgcatggcccctgccacctgctcctccaacagatccaaccgcccccccagctccccgctcacattggccagcagcccccccaactgctctagtcggccccgggcagcaggcagccagtggctcagccccccaggagccccaggccagctctcctcctgctcctccgaagggcccagggtggagttgaagcggtcctccaggcgagacaggcgggaggccaagctggtgtagcctggggggtggcctccctgccccgcggctcctcccagctctgtgcctcgccgcccactcagcactgtcactgagccggccacgacatccagcctgcgctccagctctgccagtcgccggcccagctctggagagcagcattcctgagggggcctgcggcccaccgccagccctgcgaggtgccgttgccgctcctccaccgaggccagcagcttctccatcgctcgcagccgctccctgtcctcctgctgctgccggcggaagccatctagcccggccaggcacacggagcaggactcctgcaaccgctgctccagctgccgcagcagctcctcactggggcccggaggggctgaggctggggctggggccctgctgcccccactgctgctgctgccgccatgatggttgttgaggtgacccagctcctggtcgtgggtggagacgcgggtgtccaggagctgcagctggtgctggatctcattgagggtttcatgcaccccagggcgggcagccgcgtcagctggctgctgcctcccgttgaaggccgtctccacagccctctgcacatcctctgccaggcgcccgctcagtccttgcaggacgccccgcaggccttgcagctccttggtcaggctctgcacctgttcctccagctgctgcaccttctctgactccccaggaccttctccccccagtccactgagggggctgcctgcactggagccagagaggttggggcgggcaggccgggccaggggccgtggtgtggaagacgcaggccccagcgctggagcgggactctcagcacagtcatcgcccccataaccctgacagcacctccactccatgtcggtcactgtcttgtaggccacacggtagcgagggcggaggaagcggcggtacatgatgctttggggacactggggctggccccaggcacaaggctggtacttgacatatgtctccactccatcctcaaggacacagctcactgtccgggtcaccacgtaggcacaccagttcctgtggcggctggctggccggggggcaatctgggcctggggccccccggggctgagggccccactggaacctgtgtagaggctgaaacctcgaggagggtagctggcggcccctgcagctgccgtcagcaggcagcagaggtagcagctccagagggtgcggggggccat

SEQ ID NO: 65707 - DNA, 1602 bp, Homo sapiens
ctcgcgcgagcgatttagtctgaggcgaagcttcggagcggccggtactgttgaaagcgacaagtggaggcgccgctctagcggccgggactctgaactatggcggctagtgatacagagcgagatggactagccccagaaaagacatcaccagatagagataagaaaaaagagcagtcagaagtatctgtttctcctagagcttcaaaacatcattattcaagatcacgatcaaggtcaagagaaagaaaacgaaagtcagataatgaaggaagaaaacacaggagccggagcagaagcaaagagggaagaagacatgaatccaaagataaatcctctaagaaacataagtctgaggaacataatgacaaagaacattcttctgataaaggaagagagcgactaaattcatctgaaaatggtgaggacaggcacaaacgcaaagaaagaaagtcatcaagaggcagaagtcactcaagatctaggtctcgtgaaagacgccatcgtagtagaagcagggagcggaagaagtctcgatccaggagtagggagcggaagaaatcgagatccagaagcagagagaggaagaaatcgagatccagaagcagggaaagaaaacggcggatcaggtctcgttcccgctcaagatcaagacacaggcataggactagaagcaggagtaggacaaggagtaggagtcgagatagaaagaagagaattgaaaagccgagaagatttagcagaagtttaagccggactccaagtccacctcccttcagaggcagaaacacagcaatggatgcacaggaagctttagctagaaggttggaaagggcaaagaaattacaagaacagcgagaaaaggaaatggttgaaaaacaaaaacaacaagaaatagctgcagcagctgcagctactggaggttctgttctcaatgttgctgccctgttggcatcaggaacacaagtaacacctcagatagccatggcagctcagatggcagccctgcaagctaaagctttggcagagacaggaatagctgttcctagctactataacccagccgctgttaatccaatgaaatttgctgaacaagagaaaaaaaggaaaatgctttggcagggcaagaaagaaggggacaaatcccaatctgctggaaatatggggaaaaattgaattttgggaaacaagggacccaaaatgtcaaatttaggaaattgatgggtattaaggtgagtttcacatgtgccaggggatctttgtattagctattagccctcctgcactgttcttccctcattttcttagttctggtctttactcaggtgtcagcgtttttgagttctttcccaccaccttttgtgaaataacaagcaatcccattctgaaacatttccatctcccctacccactgtcctccctacacacacacttggagagagagagagagacggggttttgctctgcttgctctgtcacttgggctggagtacagtggtgcagtcatacctcactgcagccttaaacttcgaggctcaagcagtccttccacctcggcctctcaaagccctggatcacagttctgagccactgcgcccagcc

SEQ ID NO: 65708 - DNA, 2255 bp, Homo sapiens
aacaaaaaatgaataattttatagaaaaggtgaagaccaaaagcagaaagttttccaagatggtagccaatgatatagcaaagatgtcaaggaagttaagcttacctactgacctaaagcctgatttagatgtaaaggataactcctttagccgatcacggagttcaagtgtaacaagcattgacaaagaatcccgagaagcgatctccgctcttcatttctgtgaaacgtttactcgaaagacggactcgtccccttccccttgtctgtgggttggaacaacgctaggaacagtgcttgtcattgcactgaaccttcccccagggggagagcaaagacttcttcagccagtaattgtgtctccaagtggtactatattgaggttaaaaggtgcaatcttgagaatggcatttctggataccacaggctgcttaataccacctgcgtatgaaccctggagagagcacaatgttcctgaagaaaaagacgaaaaggagaaattgaaaaaacggcggcctgtctcagtatccccctcctcttctcaggaaattagtgaaaaccagtatgcagtgatatgttctgaaaagcaagcaaaagtaatctcactgccaacccagaactgtgcttataagcaaaatattacagagacctcgtttgtgcttcgtggagatattgtagcattgagtaacagtatctgccttgcctgtttctgtgccaatggacatataatgacttttagtttgccaagtttaagacctctgttggatgtgtattacttgccccttaccaatatgcggatagccagaacgttctgctttaccaacaatggacaagcattataccttgtttcacctacagaaatccagagacttacttatagtcaagagacctgtgaaaatcttcaggaaatgttgggtgaactcttcactcctgtagaaacacctgaagcaccaaacaggggattctttaaaggcttatttggaggtggtgcacaatctcttgacagagaagaactatttggagaatcgtcctcaggaaaggcttcaaggagccttgcacagcatattcctggccctgggtgggcattgaaggcgtaaaaggggcagcatctggagttgttggtgaattagcacgagccaggctggcactagatgaaagagggcagaaacttggcgatctggaagaaagaactgcggccatggttatcaagtgcagagtcgttttctaaacatgctcatgagattatgttgaaatacaaagataagaagtggtaccagttctgacaaccagaatccaataagtccaacttcagccagaaggaaaaaagttttccatttttattacattctttaggaaagttaacgttaaagggatgttcgtcactgaatactgttctttcctagcacagtcatgcactgttttacctcagtcatgtggctttaactgaggagtgttcacacgcactcgaaatggagtatatggtgtgtgccagttatgagttgaccatttgggaattaaacaggtcacacgtgacagatgaagaaaccaagggggctgctgaggagacctggtgcagggactaatcctggatcattcctgtattaaactttcatatgccaaaagggtttgtgccgttttatctgccatcagtgtttgacctgtttagggcagaggcaataagtcagaagtcttgaagttgaaatagttatatgtgtgtcattggactggattataaacagctgtcttggactttccctctcttaacactgactggttatcagtatcattagtgaaaaagaaacaaattgtttgttatcatctctttagacagataagctgaatggtgggctttaaataataaaaacatacacatagttgacttgtgtatgagctactcttggattcttgttattatagacttgtatttagttcatattttgtcaaaagcaaaacaagaagatacatcacttttcattgaaaagaaaagtgtagagcatgactgaattgctcatcattctgggagtttccatgtagtggctatgcagtgtggaaagtgagaaaaacctccattgtggtgaggagaatacttcaatgtcccttgtccttgttctcattaattcagctaaaggtggatttgaccaaaataatgctggttaaatttgtagaaatgttgaaattggctgtgttttaaattttgcttgaatttttataaaatgtttaaccaaaaaaaaaaaaaggggggcccccttaaaaag

SEQ ID NO: 65709 - DNA, 1310 bp, Homo sapiens
cgcacatgatccggctgctgcggctgcggcgctgaagtccggatacccgctggtgtaccccacgcacccgctgcacggagggcactcctcgctaacggccgccgcggctgctggcgccacaccgccctccctggacggacaccccctctacccctacggctttatgctccctaacgacccactcccccacatctgcaactgggtgtcggccaacgggccgtgcgacaagcgcttcgccacgtccgaagagctgctgagccacttgcggacccatacggcatttcccgggacagacaaactgctgtcgggctaccccagctcgtcgtctctggccagcgctgccgcggccgccatggcttgccacatgcacatccccacctcgggcgcaccgggcagccctgggacgctggcgctgcgcagcccccaccacgcgctgggactcagcagccgctaccacccctactccaagagcccgcttcccacgcctggcgcccccgtgccggtgcccgccgccaccggaccgtactactccccctacgccctctacggacagagactgaccaccgcctcggcgctggggtatcagtgagggcggccgggagggcgagcgagggagaggagggagagggggaggggaggagtccagggagaggcgggatcacggcccaggctgctgacacccgcgcgtggggaggactcgggccacgaaaggaaagaaatgtataccgtatctatctacccgacagcagcgaccgagacccggtgggacactccccttctccccactttcacctccccacccaaactttataaaagttgaaaaaatatcatttgactttttatagaaaaaaaaaggaaaaaataattgagaaagtgttcatctgaggactgcatcggtggacactggtatttatttatgttagctccaagcggaccggtggttcaaaagtgcattatttagtttgagctctgtaggtaaaaaggaggtgggaaaaattttaaaacttgagggtaaaaatgtggaaaacaaaccctcccatcccttgtagattataaataaaagcaaaaccgccacagaactagaggtcttctctttaatgttactttaaaattgctatgattgtattgtacgttatttaatgtctgattgaaacacaaatttacatgcatgtttgttacaaaaaaaatgaaaaaaaaagtcacaatttgtcagctctgatttcaaattgcaattatttttaaggtgtataccatcgaagagaatgggtatttttttgtatgtattctggaagaaaacaacaaaaaaaaaa

SEQ ID NO: 65710 - DNA, 498 bp, Homo sapiens
tttttttttttttgggtttctacacaggtttatttgtgcaaagttagaggggtaatggtggttgaagacccaagtcctggggtaaggtgctgggaccttaaggaacagaacaagaagggaagatgctgggacctgatcaggagtggggtcacatgctgggtgctaaggctgggctgggtaccagggtcaagccctaggagtactgtattcaagcgatgggacagagactgaggccagcccctcaggtcttgattttcacttccctcaccaggttcagcagtttgtccagtttcgcaatctccacagctggacccttctgcacctcctgccccttcttttcctttggcatcttgcgcaaattgggtgagagcttgaggctgatgatgtgcccacggtcatcgcccacaatgatgatggggtggatgagattgaactgcacgtgggtgagcctgttctttttggccgccacaggctgggttggcagatggcctcatacct

SEQ ID NO: 65711 - DNA, 1673 bp, Homo sapiens
ttcccgtgcctggggagtgagagaaggctttagagaggatgtagcatttgactagtcttaaaagagtagaattttgccaagcagagaaggttatgtcccatatcaagggcaggagattcaaatcagtggttgtggtattgagaagtctctgatgagcacacccaggctggagagggggtccttccccactggcagcaacctcaccacatccctgtggctctgcatgcagggaggccagactgcgctgatgctgggagtcagccacgacagggaggacatggttcaagcgctgcttagctgccaggcagatgtcaatctgcaggaccacgatggatcctcggccctcatgctggcctgtcaccatggcaacgtggacctggtgcggctgctcctggcacacccagcctgcgacagcagcctgactgacaaggctggccgcacagctttgtccatcgctctgaagtcacccacccatatggaaattgctgggcttctgagagcccacgcggagcagggcaggtccctggggctgtaggggctgcagaagaactggccgtggggaacaaaagccttcttctctggactcctccctcgcccttgaagagggcagaggtcacaggccagagagccacccttctagagaagaaactatgtcaaatatgcacatacattcctgttgtataattctgctcattaggatgctttgtagtttttgccttaggccaagcctgaaaactacacgggcttcagagcagggttcaaggtgcaaggtgaggggtacgtcggtgtcatccaaacatccaaaacatcttcagccttgaattcctcatgactctaccctctgtaacattgtgtagcaagcaggcaggcaggagcacattagcacattagaaaagcaatactttttacatggaattttacagtgcactatctttctgttttttaagcaagtgtatacaaatatgtcccattgatatgcatgtctatagatgggaggggatttaagccaaccccctggcaagcattctgtaggggaccctagaagaatcaccgtgcagactggtgaaactgaacaagcaccatttgggagctttgtttcgatggggttgacagagaaatcttaaaatctgacagggtagaagaagcactttggcatcaatgccatatgtacagtcttgactatttctgagtcatctagtggctccaatttgctccagggaaattggaattaattaagaaatttattatctagtaagttgctatgtaataaagaaaaaaaagaaattcaatccaatgacacacaccacatgtatttgggcagagtcagattctctcagctattttgagtctgtggaagaaacaaaaaaaagcttcctcctgaggatgggttattgtcatcaagaagccacctgcatagccgtatccattacctcatggtaattcccggtgctttcccctcatatcccctagaagcaaatatctgttctgaggttttttgggacttctggctgcaataggagcaagggacccaggcagggcagagcaataccttccgaagcttccatattccctggggccagcacatgcaaggtttatatggtcagtagctcacgtgaagtcatctgaatctttcttaaatctgctctcttaaaatctcttatgcaaaaaaaaaa

SEQ ID NO: 65712 - DNA, 604 bp, Homo sapiens
aacctcaaatgttttaatggtgggatcttattcactgtgtacaggattctctaaagagaccacctggctgggtgctcaaaccacacgggctgacccaaaagacaccaaaaccaagagttgctcgggaggcactaaatgttgacggtcttggccagcttcacatcctcaatttcagcagacagccagcagtaagtgtgatgaagccgcagcacctcaatggccttgagttccagtggtgttgcctgaataccaaggtcttctaagctgggcaggtgagacaaggtcatgtctgtgatgtgaatacgctccactttatcccttgttgtccaggactcaaatgggcttatttcaaagtcttcttgctacccactgataggccaaaaggtggcaagggggtacgggaggaagtaccccttttggctgtgagccacagcaaagatgtacttcaccaggtcaaagaggagatatcgatttggcccaacgaaagcaaaggttttcccattggcatcaggatccttaactgcattagcaattcctttggatacatctacgacgtatactggttgtttaactgccttccagcccaaggaaacaaggggtatag

SEQ ID NO: 65713 - DNA, 1180 bp, Homo sapiens
agcagctggtgcggaaggcggccagcctgttgctaccttctctccaatgaaggcaccatctcactgccttgccagacattttaccaagtctgccatgaaacagtaggaaagtttatccagtatggcattcttacagtggcagagcacgatgaccaggaagatatcagtcctagtcttgctgagcagcagtgggacaagaagcttcctgaacctttgtcttggagaagtgatgaagaagatgaagacagtgactttggggaggaacagcgagattgctacctgaaggtgagccaatccaaggagcaccagcagtttatcaccttcttacagagactccttgggcctttgctggaggcctacagctctgctgccatctttgttcacaacttcagtggtcctgttccagaacctgagtatctgcaaaagttgcacaaatacctaataaccagaacagaaagaaatgttgcagtatatgctgagagtgccacatattgtcttgtgaagaatgctgtgaaaatgtttaaggatattggggttttcaaggagaccaaacaaaagagagtgtctgttttagaactgagcagcacttttctacctcaatgcaaccgacaaaaacttctagaatatattctgagttttgtggtgctgtaggtaacgtgtggcactgctggcaaatgaaggtcatgagatgagttccttgtaggtaccagcttctggctcaagagttgaaggtgccgtcgcagggtcaggcctgccctgtcccgaagtgatctcctggaagacaagtgccttctccctccatggatctgtgatcttcccagctctgcatcaacacagcagcctgcagataacacttggggggacctcagcctctattcgcaactcataatccgtagactacaagatgaaatctcaataaattatttttgagtttattaaagattgacattttaagtacaacttttaaggactaattactgtgatggacacagaaatgtagctgtgttctgggaactgaatcttacatggtattattagttgctggctgggtaatttgtttggtatattatctggttagtggttaatgcttcctttaaaaataattgagtcatccattcactctttttcagttttatctgtcaatagtagctacatttttaatggcagcaccaccaataca

SEQ ID NO: 65714 - DNA, 415 bp, Homo sapiens
ctcgtggtgaaggctttttggcactgatgacattcatgcatttttctcccgtcgtacatgctcatgtgctgagtgaggtgcggcctgcccttgaacgctaccccatagtcgcggcggtgatagggcctcttgccagcgtgccttcccattggctgagtgagatgagggtccatgccaaagacttcgaacaagtgagcgtattcagtggacttctctccaagaccggctctttccatcgtcacaccactgggcgtttccttcccaaaaatatcttccataagaagtgaccacttggttttagatggagtctcccaatctgcacaagcgccctggtgagcgcccctctcctctgtcctcggctcctcctcctgctccaagtgtgagatgaggctgggtttgccgacctgatacccca

SEQ ID NO: 65715 - DNA, 746 bp, Homo sapiens
gcggccgcggagtggcctaccggggaccctcccccagaggaaccgtgccctgggcggggagatgaacggcttcaagcacggaggaaggacagccggggaggggccccccgcggcccaagctgcggcggccccgggctacggccaagagctgctgcctcaatcgaggacggcgagcgctgcgtccggcccgcgggcaacgcctccttcagcaagaggggtcaggaagagcatctcgcagaagaaactcaagctggacatcgacaagagcgtaaggcacctatatatctgtgattttcacaaaaatttcatccagagtgtccgaaataaaaggaagaggaagacaagtgacgatggcggagattctcccgagcacgacactgacattcctgaggttgatctgttccagctgcaggtgaacaccctacgacgttataaacgacactacaagttgcagaccagaccaggcttcaataaggcccagttagcagaaactgtgagtcgacacttcaggaacatacctgtgaatgaaaaagagacccttgcctacttcatctacatggtgaagagtaacaagagtagactggaccagaaatcggagggtggcaagcagcttgagtgaggatgaagcacatcttaaaggaatgaagtgtaatgcttgatgcacaggtgatatctactacatttaagcccataaagactgttaaatattattgtaaataaaaaagtttgaatgatgaaaaaaaaaa

SEQ ID NO: 65716 - DNA, 1419 bp, Homo sapiens
aatagtttcaccagtagttccgagtttgttatacatcagagaatccacactggggagaaaccgtatgagtgtaatgagtgtggcaaagcttttgttggtaattcacccttacttcggcatcagaaaatccacactggagagaaaccctatgagtgtaatgagtgtggcaaaagctttggaaggacttcccatctaagccaacatcagcgtattcacacaggggaaaagccttattcttgtaaagtatgtggacaagccttcaattttcatacaaaactaactcggcaccagagaattcacagtgaggagaaaccctttgactggtgtagattgtggaaaagccttcagtgctcaggaacaattaaaaaggcatctgagaattcatactcaggagtcttcctatgtatgtgatgagtgtggaaaagccttgactagcaaaagaaatcttcatcagcatcaaagaatccatactggagagaaaccctatgagtgtagcaagtatgagaaggcctttgggacttcttccccagctaggtcaccttgagcatgtctactctggagagaagcctgtgctggacatttgtcgttttggcctcccagaattttttacccccttttactggtaatagtacactccagtgaaatgtactgagtggattccgtcttctactcaggaatggaatgtgtgacacaggcctgactcagcctctgatccatccctcaagccacagttaatgattcagatgtcagtagatgaccaaagatggttcaattagagtcccaggattgcaagagctaataggaacaaatactctccccccgcccacccccattggttttaatgctgagaagaagaactagactcttacagaggtgagaatgaagtccacacagcaaaaatgcatctgagaattggagagcagtaaaagactgaagataatgtttgaacagccacatacaccatgcctgaagctaaaaatatatacgggtttttgaattgcagcagccaataaattccatttttgtttggttggttttggctttggcacacctgagttaggttttcttgccttggaacagaattttgacttaaacagtgttgtcattgtagcagttgtttgaagttttcagggataacatacctgatggagaaatgttttgtgtgtatgatataagggaaagtctttagttatagtcatggcagctcctcaaccccatgattgtgatgagattgggaagcccactgtaacactggagagcccaggttatatcagacaccactagtagatagaagttctaacaacttgagctctgtaacaaaaatctcattgtactacaaaattatgtctgcaccagtgaatccattctcaagaaaagtcttaactaggaaactaaaagctttcactcttaaaaaaaaaa

SEQ ID NO: 65717 - DNA, 4917 bp, Homo sapiens; identical to SEQ ID NO: 65230

SEQ ID NO: 65718 - DNA, 2141 bp, Homo sapiens
ttttttttttttaagaatatagaattttatcttcctttagttaaaaaaaataatcgtaccccggaatgaagaagtagcttttttggggggtggggtcggggagaaggaaaggtgagaagggggggaaaaaagaagcaaaaagcccaaagaaaaaaacattttatattcatctgtataaacatatccgctaaggcaaacgcaatccgggtccgaggctgctgcgctgggctcggtgcctcctaatttctgcagattctaaggccaaaaaataaaacctctgcaagtccgcgtagcttccaggactcctgggcattttactaaaataaagagttatcgagtttaaaaagcagtgacgtcgttatgacacacactgaaagttgcataactgtggcctcgagggccactcacttgtttggactgagtgatggtcacagtttcacgacacagcaacagacaccacacacaggcacacgcatgtcagcaagcacgtgggaagctgtggcagaacccggccggtggcctgggcctgaccacggcctgtctggtgcagggcaccagggtgttagggtccccatgcttcctcagggggtgggcatgacaggcaggtcgctggtgacaaggcagtggacgtcacttggggaaggatggcgggagagggctggacaggcccccgctgcccaccgcctggcgcatgcaaacacacttaaagcacttctcggaggcttctcggagaatcaaggcgaagcgctcgtctccttccctaggaaggtgccaattcttcctcccgccccactctctccagagccccgagaccctcagggtgttctggctgggggtgctaagcagcggtgtctccgacccccagagccttccctgcccatgatcccacggcatgcccggcagggggtgggcctgtgaggtagattggcacagctgcccccacaccctgcctggctgggccccagagatctggggttctccaagtcagcatggggtgctgggggcctgcccgggtcccttcaccagaacagaagctccccaccccctctcccatttcagtagatggaagacgcagaggaggaaaaggccctggggaggggtcccctcgtgcctccaattagccccttgggtcccactctgtgggggcagccctgattctatctcttctgccgtctcccagcctgggaaggggctggcagggggccccaggggcggtgcggcctgctggaggagggcaggggttcccgggttggggggacagggatgtgtggagggcaggcggcaggcacatggggctgggagggacctagggccaggagctgggcctggggcagtgccggagcaggcagggggcagttaggggtgcaagagagcccagggattgccagggagggccgggccgggcagggagccagcgccggtgtggcggcctcgtgcagagtggaagggagcggggaggggccgggccacctccataagacccctgaacttgctccattcacagatatttttaggtttttagtagtggtcccgtcagacacaggcaaggattcaggctcggcctcccatgcgccaccctcgcccaccacactggggccggagcagggcggtcggctgcagcccccgctacttaaaggtggactgcagctccttgaaggccgctttccgctgcttcatctcctccgcctgcttcttcctttcctcctgctctgccttgatctcctcctcgaagcggctggacacgttgatggcctggaccttggcctcaaagaagctcttggcccccttgacaccctcactggagacgtcgatctcagagaggcgggccagcacgcacagcccgctgtcctcctgaagctccccggccgccgccttgcggaagatcaggaggaactcccggaagctcagcttgctgtcaaagtcctcatccacctccttgatcatgtttttcaggcccaggtgggtctgaggggccccaagtttctccatcatgagttttagctccatcaggtcgatgaagccgtcccggcccggcatcatactgcttgaacatcttctccatgtccttgatctgcttcctggagaactccttgaactcggtgtaggggttgaagacgcggcggctgggcgactggggctcg

SEQ ID NO: 65719 - DNA, 2296 bp, Homo sapiens
agctgcaacacttgaaggctggaaactgtaccatgaccctaatgttaatggaggaacagaattagaacctgttgaagggaatccatatagacgcatttggaaaataagttgctggagaatggcagaagatgagctttttaatagatacgagagagcaatttatgcagctttaagtgggaatcttaagcagctgcttcctgtctgtgacacctgggaagacacagtttgggcctacttccgggtgatggtggacagtctggtagaacaggagatccagacatcagtagcaactctggatgaaactgaagaactccctagagaatatctgggagcaaactggacgttagaaaaggtttttgaggaacttcaagctactgacaaaaagagagttctggaagagaatcaagaacattatcatatagttcaaaagtttcttatcctgggagacattgatggtttgatggatgagtttagcaaatggctttccaaaagcagaaacaatctacctggacacctgcttcgctttatgactcaccttattttgtttttccgtactctgggactacagaccaaggaggaagtttctattgaagttttaaagacatacatacagcttttaataagagagaaacatacaaatcttatagcattttatacctgtcatttgcctcaagacctagctgttgcccagtatgcattatttttggaaagtgttacagaatttgaacagcgccaccattgcctggagttggctaaagaagcagatttggatgttgcaacaataacaaaaactgtagttgagaatattcgaaagaaagataatggtgaatttagtcatcatgacctggccccagccctagatactggcactactgaggaggatcgtttaaaaattgatgtaattgactggttggtatttgacccagcgcagagggcagaagcactgaaacaaggcaatgcaattatgagaaaattcttggcatcaaaaaagcacgaagctgcaaaagaagtatttgtgaaaattcctcaggattctatagcagaaatctataatcagtgcgaggaacaaggaatggaaagtccacttcctgctgaagatgataatgctatccgagaacatttgtgcatcagagcttatttggaagcccatgaaacctttaatgagtggtttaagcatatgaattcagttccacaaaaacctgctttgatacctcaaccaacttttactgataaagtggctcatgaacacaaagaaaagaaatatgaaatggattttggtatttggaaagggcatttggatgccctaactgctgatgtgaaggagaaaatgtataacgtcttgttgtttgttgatggagggtggatggtggatgttagagaggatgccaaagaagaccatgaaagaacacatcaaatggtcttactgagaaagctttgtctgccaatgttgtgttttctgcttcatacgatattgcacagtactggtcagtattcaggaatgcctacagttagccagatatggttatcctctgagcgccacaaactgtacctgggtattttctaaggaagagctaaggaagttgctgcagaagctccagagagtcctcttctaattgctcctagaccaggggactttgacccattagggtatggaatttcagttattagtttaatctttgtaatctcactaattttcatgataaatgaagtttttaataaaatatacttgttattagtaattttttcttttgcattaccatgtaaaatttagacatttgaattttgtacttttcagaatattatcgtgacactttcaacatgtagggatatcagcgtttctctgtgtgcttgttaataaaactatataaaaattaaaattttctgtttttacaaattccagggttgtctctttttcatgtaataagaaaattaaattttctgttctagttttttctgtaatcataagcattctgatattttaaaatcataaagatgatggaaagtagatttatttttaagccaggtacgtaattttttatttatcataaaatttagtatttttgaatattaaaattaagaagatgactataacaagaatttttctaacataacatgctattattattttagttattttgaagacatttctagtttaactttcatttagcaaacttcctatcaaaataagagcatataaagacttagcgtagtacctggcacacagtaagcactgaatatattggagattacagatcccgctcttctaataggggaaataccataagtacatttaaaa

SEQ ID NO: 65720 - DNA, 4134 bp, Homo sapiens
ttttttttttttcccgattaaaaactttttatttcagcaaaataaacgtgcctgtgaaagaaccacacggtggcttccgagagaccccactgtgtacctgagccccaggtggccacacctggtgttctggaaaagggagtccagggccagtattcaggccctgctgtactgcaccctggaaactgcaccaaaccccagctccgcccccatccacggctcccagaatggtttctggagtccctgcaacagacctgtgaggagagggcagggcagggcctgcctcctgcgtccccgtgatgacctgggggatgcactgggcagggacagcttcctccatccacacagccctgtgggcaccaacaaggccactgtgacttcacacgacagcagtgttccccagctcagctgagccggggtgcaggggacagcacagggcacagtcctgtgccgcaaggccctcgtgctcctggaagcctctgggaggaggcgcccgctggtgggacgtcgaagtccaggcgctctcggcagcgaccccaggacggcgcacctaagctatgccgtggtgcaggggacgtgctggagggacaggagcaggcgagagagaagccacctgtggtcccagccccaccccagctcacacgaattccggctgcctttccctgcaggagcccagtgtcatccgcccgccacggagcctcatggggggcagtggggcctgcagcacgttgttggactggttggtgttgaatcctgagagctgctgggccgggccgtcctcgtccccgtccccgtcctcccgggctgtggcctccagctgctcctcactgccgctgtggctgccagaagccacctctaggctggcctcgctctgctgctgctccaggaagctgaggtggcccagggcactggcctccgatgaggacagcagctcggaggcctcctctaggtccgagtccgaatcgttggacacaactcgggattctctgcacccgtccgccgccgcctcctgcagcgggtagaccaccgcctcgcccgcctccaggtacggcacctggacgactacctcagctcgctggttggatgactcgtcctggcccccgggggtctcctccggctcctcctcgaagaccaggccgtagtggacgatgagagtctcgatgacgcgggcctgatggggataatccaccagggaggagagggacacggtggcctcggtgggccgtggccgaagcagcgtgggcccgaacacgatgcccaggttcccgggggtcatcttgttgtcctgctccacctccacgatcctgcgtaggtgacgcagcaggtactgcagcgaggcccggttctcaggcggcaggtcccgcaggagctcccgcagccgacctgccagggccaccgccactgcctcgctctccgagccgtcctgccggccccgggacgccgccttggcctcggcctctgccttcaggctgtccttggccagccctacgagctcgtggtagaggcggaaggagatgagcggctcgggaagctgacgcaggtagagcttgaggacgttgctgatgtcgtggggcgaggcctgcgacagctcgaccagctccttgccgttctcgaaggcctggcacagcttctccacgcgtgtctttaccccattgacccggtagatgcccttggtgcgcagcgcccgccgctcgatctcgcagacgcacttcttgacgatgaagggcacgccgtcgggggcgctgcgggccgcgtggctgaagtcctggccgaacagctgcaggcggccttgcagcttcttgtgcccgcactgtatggccagcgtctccagacatttcttgtggcaggccaggcagcactcttcacactcagcaccctggaagtagacgtagctgttgcactcgcggcacttggcgggcgtgcggagcttcccggagccggtgagtacgggccgccttggacagcccctcgtggcggaacggtccactgggcacggccaccggcagctcgggggtcatgccgttgaggtcagcctgctcaaaggctgaagccccggctccaccgtctgggtccaccagctcctccgtggacgacatggtaccactggatgacgtccgctcgaacttcttaaagtcccctgcgccagggccggggtccagcccactgtccgagtctgagatcgagagcggccatgacttgtgaacctggtgtcctcgcccggccctgtggtccttggcaggtgtgccctcagtgcacccgccttcttctggggggctcccggcagcctccggccgcgccacatcactcacgttgaagctgctcttccgggcacgcatgacgggggaccaggcgttggcggagacgtggggctcaaagtcgtagtgcacatcgggctcctggtcccgctgcagctggcgcacgtgggaggcgtactgctggcctgggtcatacagcttgctgctctcacacagcatctggaagtgcacgggcagcggcgccgtctgcatatgcatcatctggtagtaggagatcgtggccgacttgatggtttggtcgctctgccggatgacctcctggatctgccgcagcgccgtcaccttggtatcctccagctcctgcttctgcgtcttcgcgtcggccacgcaggtgcggtaggtggccatagcttcctccgccttgttcttggcctcctcctccagccgccgccgcttgtccagggtcttggtggccgtgctgcctgctcccggcgcgctgccagcctgctcctcctccgccttggccacgaggaagcgagccttgtcgtggtcctcgcagcgctgcacgtaaccctgcttggccttgcgcaggttggactccgcctcttgcagcttcctctgggcacggtgccaggcctccttgatctccttcctgcgcttctcgtgttcaagccgccgcagggtcaggggctgcatgaaggtctgggtctgcaaggtgcccaccgcctgcaccatgctgtggccgaactccaggtcctgctccagggccagcgagtagatggacaggagcggcatgtggggctcctgcatgacgctctgtctgcagttgtgagcgatcttctgcaggcccttggcaaactccatctccagcgtcgtccgcttctccaggtagctgatgaggtccttcatgtacttggccatgttcttggcatacagcagtgcggcatccacgcccccctcacagcgctgtagcagcacgtccacctcctcggcgggcaggcagccggcgtcacagtcttccaggctgggaggcgtgccctcactgcccggtccatacaggctttccatggactggctcgagtccccaggaggcactgctaggagggtgctgctgtccacttcacccatgaggaactcggacactgtgctactgaaggccacagcaatcgtctccagggccttctcgaactcctgtttctccagatcattgttgctctcataatggaaggctttgaccttggcaatgagggtgccggctgcggtgagcgtctccacggtgttcagcagcgggtacttggagatgatctgatgcatgacacgcagagcctcacccaggcactcgtgggcccgcgggcggcgggcctcaaggaggtcgtcatgcagcacacactccttaagtttctcaaggccctcagcgaagcgggccacgtccgccagcagatgggagatgtcctcgacgacgtccgggccggcaccctcggtgggcagctcgcccgggctggcggctgtcagtgggctccggtggctccggcccagtgtccaggaggcagcacccgacagggggaagccagccgcgctggcgtggcggctcaggctggtgggccgcttgagggtccctgtggccttgacgccggaggacccagcgggcggctccaggcttggtccggggaacaccgcgtcagccccatccttcctgggcagctcccccgagggctgcgggctggggcttcccgcgcggttctttttcgagatggaaggggttttcatgagctctcgtttcttcctggagaacatgatggggccccggccgggagcccgagggggcgggctgggggtctcagcgctgcagctcccggcgctggccgcttcgggaccacattgt

SEQ ID NO: 65721 - DNA, 1849 bp, Homo sapiens
atgtcgctcatggtcgtcagcatggcgtgtgttgggttgttcttggtccagagggccggtccacacatgggtggtcaggacaaacccttcctgtctgcctggcccagcgctgtggtgcctcgaggaggacacgtgactcttcggtgtcactatcgtcataggtttaacaatttcatgctatacaaagaagacagaatccacattcccatcttccatggcagaatattccaggagagcttcaacatgagccctgtgaccacagcacatgcagggaactacacatgtcggggttcacacccacactcccccactgggtggtcggcacccagcaaccccgtggtgatcatggtcacaggaaaccacagaaaaccttccctcctggctcacccaggtcccctggtgaaatcaggagagagagtcatcctgcaatgttggtcagatatcatgtttgaacacttctttctgcacaaagaggggatctctaaggacccctcacgcctcgttggacagatccatgatggggtctccaaggccaacttctccatcggtcccatgatgcaagaccttgcagggacctacagatgctacggttctgttactcactccccctatcagttgtcagctcccagtgaccctctggacatcgtcatcacaggtctatatgagaaaccttctctctcagcccagccgggccccacggttctggcaggagagagcgtgaccttgtcctgcagctcccggagctcctatgacatgtaccatctatccagggagggggaggcccatgaacgtaggttctctgcagggcccaaggtcaacggaacattccaggccgactttcctctgggccctgccacccacggaggaacctacagatgcttcggctctttccgtgactctccatacgagtggtcaaactcgagtgacccactgcttgtttctgtcacaggaaacccttcaaatagttggccttcacccactgaaccaagctccgaaaccggtaaccccagacacctgcatgttctgattgggacctcagtggtcatcatcctcttcatcctcctcctcttctttctccttcatcgctggtgctccaacaataaaaaatgctgcggtaatggaccaagagtctgcaggaaacagaacagcgaatagcgaggactctgatgaacaagaccctcaggaggtgacatacacacagttgaatcactgcgttttcacacagagaaaaatcactcgcccttctcagaggcccaagacacccccaacagatatcatcgtgtacacggaacttccaaatgctgagtccagatccaaagttgtctcctgcccatgagcaccacagtcaggccttgagggcgtcttctagggagacaacagccctgtctcaaaaccgggttgccagctcccatgtaccagcagctggaatctgaaggcatgagtctgcatcttagggcatcgatcttcctcacaccacaaatctgaatgtgcctctcacttgcttacaaatgtctaaggtccccactgcctgctggagaaaaaacacactcctttgcttagcccacagttctccatttcacttgacccctgcccacctctccaacctaactggcttacttcctagtctacttgaggctgcaatcacactgaggaactcacaattccaaacatacaagaggctccctcttaacgcagcacttagacacgtgttgttccaccttccctcatgctgttccacctcccctcagactagctttcagtcttctgtcagcagtaaaacttatatattttttaaaataacttcaatgtagttttccatccttcaaataaacatgtctgcccccatggt

SEQ ID NO: 65722 - DNA, 1666 bp, Homo sapiens
cggagacccacctacacaccccctagcatcatgccacagaaacactgggtatacgtgaagcgaggtggtaattgcccagcgccaacacccctggttccccaagacccagatctggaggaggaagaggaggaggaagatctggtgttgacctgtgaggatgatgaagatgaagaactagggggtagctccagggttccagtggggggagggcctgaggctaccctcagcataagtgatgtccgtaccctgagtgagcccccagacaagggggaggagcaggtcaacttctgtgagtcctccaatgactttggcccatatgagggtgggggtcctgtggcaggtcttgatgactcaggggggccaactccctcttcctatgccccctcccaccctcctcgaccgctccttcccttggacatgcagggcaaccagatcctgggtcttcccgtcgtcgtcttcatcctcatcctcacaggctcctggccaaccaccagggaaccaagcagaacacggggcagtgaccgtggggggcacgtcggtggggagcctgggtgtgccgggtagcgttggtggggtccctggagggactggcagtggggacgggaataagatctttctgtgccattgtgggaaggccttctcccacaagagcatgcgggaccggcacgtgaacatgcacctcaatctgcggccgtttgactgccccgtgtgcaacaaaaagttcaagatgaagcaccatctgactgagcacatgaagacgcacacaggtctcaagccctacgagtgcggagtctgcgccaagaagttcatgtggcgagacagcttcatgcgccaccgaggacactgtgagcgccggcaccgcctgggcggggtcggggccgtacctgggcctgggactcccacggggccatccttgccgtccaagagagagtctcccggagtgggcgggggcagcggcgacgaagcgagtgcggccacgcccccgtccagcagacgtgtctggtccccacccagagtccacaaggtggagatgggcttcggtggaggtggaggagcaaactgaaggggcaggctactggggtggggtagctttcgggaaagggaataaggagcacgatgcaagggcgctgtggcccccgggtgatctcccaccacacttactgtcttcctttatctctgtggacttgtatatattctggaaggggaaccacagtttcaccatcgcccgcccattctactactcaacccctcccccccaaggtatttccagaactaaacccttcctttccctctgatgggtacactgaagcccctgctccacagagtagattgcacatggagggagggagagggggcgtgttgaacatcctgcagtcacagggtcaggggtcaggtggttgtagtctgtgcctgaagtctgtgtttgtgttgtcgtggagacaaggcctttgagccccacccttgtcctagaacctaccccctctcaaggatgcgctctttatttctaccctgtctctccccgccacccccgacttcccgtggaaattcccaactcggttctcatggaggagtgggtggagacaaggagggagtaagtcgtaggagtacaaggtttttattttttttaacagtgattaaaatatttattggtcatttaaaaaaaaaa

SEQ ID NO: 65723 - DNA, 5527 bp, Homo sapiens
atggcggcggctgcgcttctgctggggctggcgctgctggcaccgcgggcggccggcgcgggcatgggcgcgtgctatgacggcgcagggcgcccgcagcgctgcctgccggtgttcgagaacgcggcgtttgggcggctcgcccaggcctcgcacacgtgcggcagcccgcccgaggacttctgtccccacgtgggcgccgcgggcgcgggggctcattgccagcgctgcgacgccgccgacccccagcgccaccacaacgcctcctacctcaccgacttccacagccaggacgagagcacctggtggcagagcccgtccatggccttcggcgtgcagtaccccacctcggtcaacatcaccctccgcctagggaaggcttatgagatcacgtatgtaagggctgaagttccacaccagtcgccctgagagctttgccatctacaagcgcagccgcgccgacggcccatgggagccctaccagttctacagcgcctcctgccagaagacctacggccggcccgaggggccagtacctgcgccccggcgaggacgagcgcgtggccttctgcacctctgagttcagcgacatctccccgctgagtggcggcaacgtggccttctccaccctggagggccggcccagcgcctacaacttcgaggagagccctgggctgcaggagtgggtcaccagcaccgaactcctcatctctctagaccggctcaacacgtttggggacgacatcttcaaggaccccaaggtgctccagtcctactattatgccgtgtccgacttctctgtgggcggcaggtgcaagtgcaacgggcatgccagcgagtgcggccccgacgtggcaggccagttggcctgccggtgccagcacaacaccaccggcacagactgtgagcgctgcctgcccttcttccaggaccgcccgtgggcccggggcaccgccgaggctgcccacgagtgtctgccctgcaactgcagtggccgctccgaggaatgcacgtttgatcgggagctcttccgcagcacaggccacggcgggcgctgtcaccactgccgtgaccacacagctgggccacactgtgagcgctgtcaggagaatttctatcactgggacccgcggatgccatgccagccctgtgactgccagtcggcaggctccctacacctccagtgcgatgacacaggcacctgcgcctgcaagcccacagtgactggctggaagtgtgaccgctgtctgcccgggttccactcgctcagtgagggaggctgcagaccctgcacttgcaatcccgctggcagcctggacacctgtgacccccgcagtgggcgctgcccctgcaaagagaatgtggaaggcaacctatgtgacagatgtcgcccggggacctttaacctgcagccccacaatccagctggctgcagcagctgtttctgctatggccactccaaggtgtgcgcgtccactgcccagttccaggtgcatcacatcctcagcgatttccaccagggagccgaaggctggtgggccagaagtgtggggggctctgagcaccccccacaatggagcccaaatggggtcctcctgagcccagaagacgaggaggagctcacagcaccagggaagttcctgggagaccagcggttcagctatgggcagcccctcatactgaccttccgggtgccccccggggactccccactccctgtacagctgaggctggaagggacaggcttggccctgtccctgaggcactctagcctgtctggcccccaggatgccagggcatcccagggaggtagagctcaggttccactgcaggagacctccgaggacgtggcccctccactgccccccttccacttccagcggctcctcgccaacctgaccagcctccgcctccgcgtcagtcccggccccagccctgccggtccagtgttcctgactgaggtccggctcacatccgcccggccagggctttccccgccagcctcctgggtggagatttgttcatgtcccactggctacacgggccagttctgtgaatcctgtgctccgggatacaagagggagatgccacaggggggtccctatgccagctgtgtcccctgcacctgtaaccagcatggcacctgtgaccccaacacagggatctgtgtctgcagccaccataccgagggcccatcctgtgaacgctgtttgccaggtttctatggcaaccctttcgcgggccaagccgacgactgccagccctgtccctgccctggccagtcggcctgtacgaccatcccagagagcggggaggtggtgtgtacccactgccccccgggccagagagggcggcgctgtgaggtctgtgatgatggcttttttggggacccgctggggctctttgggcacccccagccctgccaccagtgccagtgtagcgggaacgtggaccccaatgccgtgggcaactgtgaccccctgtctggccactgcctgcgctgcctgcacaacaccacgggtgaccactgtgagcactgtcaggaaggcttctacgggagcgccctggcccctcgacccgcagacaaatgcatgccttgcagctgtcacccacagggctcggtcagtgagcagatgccctgcgacccagtgacaggccaatgctcctgcctgcctcatgtgactgcacgggactgcagccgctgctaccctggcttcttcgacctccagcctgggaggggctgccggagctgcaagtgtcacccactgggctcccaggaggaccagtgccatcccaagactggacagtgcacctgccgcccaggtgtcacaggccaggcctgtgacaggtgccagctgggtttcttcggctcctcaatcaagggctgccgggcctgcaggtgctccccactgggcgctgcctcggcccagtgccactataacggcacatgcgtgtgcaggcctggcttcgagggctacaaatgtgaccgctgccactacaacttcttcctcacggcagacggcacacactgccagcaatgtccgtcctgctacgccctggtgaaggaggagacagccaagctgaaggccagactgactttgacggaggggtggctccaagggtccgactgtggcagtccctggggaccactagacattctgctgggagaggccccaaggggggacgtctaccagggccatcacctgcttccaggggctcgggaagccttcctggagcagatgatgggcctcgagggtgctgtcaaggccgcccgggagcagctgcagaggctgaacaagggtgcccgctgtgcccaggccggatcccagaagacctgcacccagctggcagacctggaggcagtgctggagtcctcggaagaggagattctgcatgcagctgccattctcgcgtctctggagattcctcaggaaggtcccagtcagccgaccaaatggagccacctggccatagaggcccgtgccctcgccaggagccacagagacaccgccaccaagatcgcagccactgcttggagggccctgctcgcctccaacaccagctacgcgcttctctggaatctgctggagggaaaggtggtccctaagaccccatcgggacctggaggacaggtaccaggaggtccaggcggcccagaaagcactgaggacggctgtggcagaggtgctgcctgaagcggaaagcgtgttggccaccgtgcagcaagttggcgcagatacagccccgtacctggccttgctggcttccccgggagctctgcctcagaagtcccgggctgaagacctgggcctgaaggcgaaggccctggagaagacagttgcatcatggcagcacatggccactgaggctgcccgaaccctccagactgctgcccaggcgacgctacggcaaacagaacccctcacaatggcgcgatctcggctcactgcaacctttgcctcccagctgcaccagggggccagagccgccctgacccaggcttcctcatctgtccaggctgcgacagtgactgtcatgggagccaggactctgctggctgatctggaaggaatgaagctgcagtttccccggcccaaggaccaggcggcattgcagaggaaggcagactccgtcagtgacagactccttgcagacacgagaaagaagaccaagcaggcggagaggatgctgggaaacgcggcccctctttcctccagtgccaagaagaagggcagagaagcagaggtgttggccaaggacagtgccaagcttgccaaggccttgctgagggagcggaaacaggcgcaccgccgtgccagcaggctcaccagccagacgcaagccacgctccaacaggcgtcccagcaggtgctggcgtctgaagcacgcagacaggagctggaggaagctgagcgggtgggtgctgggctgagcgagatggagcagcagatccgggaatcgcgtatctcactggagaaggacatcgagaccttgtcagagctgcttgccaggctggggtcgctggacacccatcaagccccagcccaggccctgaacgagactcagtgggcactagaacgcctgaggctgcagctgggctccccggggtccttgcagaggaaactcagtctgctggagcaggaatcccagcagcaggagctgcagatccagggcttcgagagtgacctcgccgagatccgcgccgacaaacagaacctggaggccattctgcacagcctgcccgagaactgtgccagctggcagtgagggctgcccagatccccgggacacactcccccacctgctgtttacatgacccagggggtgcacaccaccccacaggtgtgcccatacagacattccccggagccggctgctgtgaactcgcccccgtgtggatagtcactccctgccgattctgtctgtggcttcttccctgccagcaggactgagtgtgcgtacccagttcacctggacatgagtgcacactctcacccctgcacatgcataaacgggcacaccccagtgtcaataacatacacacgtgagggtgcatgtctgtgtgtatgacccacacgtgttcaagtctaatccatccagtcagcagcttacggtccacacacattacagtccacagctgttgtgagagccacctgtgtgctggacaccctctggatgttgggcaagttgttacatgagatgccctggggtgctacatccactcactccagatagcagggaggtctcagcagatctgcagagatcaagggggtcagcaacagccaaagcccctagtcccagagctggctgccctctgtttcacagcagctccctgacctgtgttgctgcgtgcactccctacagctcgacacagccaggggaccaacaggccaagaaatgcaagatcccgggagggttctcagcagcagaatctgaggcccagagaccctgaggccgtggccaggcctgctagtctggctagagcaaggcccactcctggcgggggtgtcattgccttcaccggacc

SEQ ID NO: 65724 - DNA, 868 bp, Homo sapiens
cattgcaggtgtggcagtattcttctatcgagacatgtttgttcggaaagacagaaagatccataaagatgcagagtccgcccagtcatgcacagactccagtggaagttttgccaaactgaatggtctctttgacagccctgtcaaggaataccaacagaatattgattctcctaaacttatagtaacctgctaaccagtcggaaagagctaccacccaatggagatactaaatccatggtaatggaccatcgagggcaacctccagagttggctgctcttcccactcctgagtctacacccgtgcttcaccagaagaccctgcaggccatgaagagccactcagaaaaggcccatggccatggagcttcaaggaaagaaacccctcagttttttccgtctagtccgccacctcattccccattaagtcatgggcatatccccagtgccattgttcttccaaatgctacccatgactacaacacgtctttctcaaactccaatgctcacaaagctgaaaagaagcttcaaaacattgatcaccctctcacaaagtcatccagtaagagagatcaccggcgttctgttgattccagaaataccctcaatgatctcctgaagcatctgaatgacccaaatagtaaccccaaagccatcatgggagacatccagatggcacaccagaacttaatgctggatcccatgggatcgatgtctgaggtcccacctaaagtccctaaccgggaggcatcgctatactcccctccttcaactctccccagaaatagcccaaccaagcgagtggatgtccccaccactcctggagtcccaatgacttctctggaaagacaaagaggttatcacaaaa

SEQ ID NO: 65725 - DNA, 1296 bp, Homo sapiens
ttttttttttttgatatgatttttttattaacatataataatatatttaataaaaaatagtatccactctggctctctcctccactgcaaggggaagagtggtgaggaggggctggcactgcccacccctaggcatccggaaaagccctgcttccagggctcccctctacccctgctttccaacaggctctgacctccagacagacggttcaaagttacaagtgctttaggccctcccttgagttcccccaggcccatcccttgcgcagaattcaggggccacctggacaaaccccttgctttttctcattcttggcatccttcattcatgctagaaagaggatctggggacagagagtagagtctctacctgccagggggaagggaggaaaggaatggtggtgggggatggggccaagaagagggatggtgatgaggtgccctcattggagccggtcactgcggaatgactcctccacagcaggatcaggcagcagggcacaggggtcactcagcatgtttagcccttccaggcccagtggctccatgcgcagctcatcttctagcccaagccctagctccaatccagctgctgacacctcaaagccaggcactccggccagggctgctgcaatctccttagagaaacctggagaggagtcccctgtgaggatgatgttaggccctgagccatggcgggaacagtgggtcaagttctggtggttgaaggtgtggggatcctgggggccacccattggcccctcaccccctaaaaatccaggcccttcagaaaagccagggggatccagcaccaggctggctgatgggctctccatgctgaactgctccagattccccaggttgaagtcactcattggccggtggtaagactgttgcccatgcccactgggcccaggtgggtacggtgtcccataatgagactgcctgcctgggggctgcccacctgaggactgcactgaacaagactgagagggcagccctggctgctgtagagactttggggtgtggggctgggtaggcagaaccagacttggggagctgtatgggtatgggggtaaccgctggtcagtggacagtttactggtatccagggggacgccctgagtgatggaagacaaggtgggtgacattgttggcgaaaactgtttgggcagctgctgttgggaccttctggcgtcggctgggcccgcgagcaaactcagggggctgaggggcacacggcggtggtggggggaggccccacgaaatcgtcgacccgggaattcgaacatgaag

SEQ ID NO: 65726 - DNA, 6140 bp, Homo sapiens
cactgccagtggtcaagggtctgttaagtatgatagcaccgatcaaggatcaccagcctccaccccctctactacacggcccctcaactctgtggagcccgccaccatgcagccaattcccgaagcccacagcctctatgttaccctgattctctccgattccgtgatgaatatctttaaagacagaaactttgacagctgttgcatctgtgcctgcaacatgaacatcaaaggggcggatgtcgggctttacatccccgattcttccaatgaggaccagtaccgctgtacctgtgggtttagtgcgattatgaaccgcaaacttggctacaattcaggactcttccttgaagatgagttggatatttttgggaagaattctgatattggtcaggctgcagagaggcgcttaatgatgtgtcagtccaccttccttcctcaggtggaaggaaccaaaaaaccccaggagccacccataagccttctcctcctcctccagaatcaacacacacaaccttttgcttcactgaatttcctggactacatttcctctaacaatcgccaaactcttccctgtgtaagctggagttatgaccgggtgcaagcagataataatgattactggacggaatgctttaatgcgttggagcaggggcggcagtatgtggataaccccactggtggaaaagtggacgaagctctggtgagaagtgccactgtgcactcttggcctcacagcaatgtgctggacatcagcatgctctcctcccaggatgtggttcgtatgctgttgtccctgcagccctttctccaagatgccatccaaaagaagcgcacgggcaggacctgggagaacatccagcatgtgcagggaccactcacttggcagcagttccataaaatggcaggacggggaacctacggttcggaagaatctcctgagccgttgcccatccccactctgctggtaggctatgacaaggatttcctcaccatctcgccattctccttgccgttttgggagaggctcttgttggacccatatgggggccaccgtgatgttgcctatattgtggtgtgtccagaaaatgaggccttgctcgaaggagccaaaactttcttcagggacttgagtgctgtatacgagatgtgtaggcttgggcagcacaagcccatctgcaaagtgctacgtgacgggatcatgcgcgtgggaaaaactgtggcacagaagctgacagatgagcttgtgagtgagtggtttaaccagccttggagcggcgaggagaatgacaatcattccagactcaaactttatgcgcaagtttgccgccatcacctagcaccttatttagccactctgcagcttgatagcagcctattgataccacctaaataccagaccccaccagcagcagcacagggacaagctacgccagggaatgctgggcccttagctccaaatggatcagcagctcccccagctggcagtgcatttaatcccacctcgaatagtagttctacaaatcctgcagcaagtagttctgcatctggttcctctgtgccaccggtctcatcgtctgcctctgctcctggtattagccagataagcactacctcttcttcaggattcagtggtagtgttggagggcagaaccccagcactgggggcatttctgcggatagaacgcaagggaacataggctgtggtggagacactgaccctgggcagagctcttctcagccctcacaggatggacaagagagtgttacagaaagggagagaataggaattcccacggagcctgactctgcagacagccatgcccaccctccagctgttgtcatttacatggtggacccgttcacgtatgctgcagaggaggactccacttctgggaacttttggctgttgagcttgatgcgctgctacacagaaatgctggataatttacctgagcatatgagaaattctttcattctccagattgtgccttgccagtacatgctgcagacaatgaaggatgagcaagttttctacattcaatacttgaagtccatggcattttcagtgtactgccagtgcaggcgaccactgcctacacagatccacattaaatccctcacgggatttgggcctgcagccagcattgagatgaccctcaagaaccctgagcggcccagcccaatccagctttactcccctccctttatattggccccaatcaaagacaagcagacagagctgggagagacgtttggtgaggcgagccagaaatacaatgtgctcttcgtgggctattgtctgtctcacgaccagcgctggcttttggcttcctgcactgacctccatggggaattattagagacctgcgttgtaaatattgctttaccaaacaggtcacggaggagtaaagtatctgcacgtaaaattggactacagaagttatgggagtggtgcatagggattgtccaaatgacatctctaccctggagagttgtaatcgggcgacttgggcgtcttggccatggggagcttaaagattggagtatcctccttggagaatgttcactacagacaatcagcaaaaagctcaaggatgtgtgccggatgtgtggaatctctgccgcagactctccttctatccttagtgcctgcctggttgccatggagccccaggggtcctttgtagtgatgccagatgctgtcacaatgggctctgtttttggccgaagtactgcactgaacatgcagtcatctcagctcaacacccctcaagatgcttcttgtacacacatcttggtgttcccaacatcatcaaccatccaggtggctccagccaactaccccaatgaagatgggtttagccccaacaatgatgatatgtttgttgaccttccattcccagatgatatggacaatgatattggcatattaatgactgggaacctccattcctctcccaactcttccccagtaccctccccaggctctccttctggaattggtgtgggctctcacttccagcatagtcggagccagggtgagcgtcttctttctagagaagcaccagaggagctaaagcagcagcccctggcccttgggtattttgtatcaactgccaaagctgagaatcttccccagtggttttggtcatcgtgtccccaggctcaaaaccgagtgccctctcttcttaaaggcttcgctgcatcaccacatttcagtagcacagacagacgaacttctgcctgccaggaattctcagcgggttccacaccctcttgactccaaaaccacgtcggatgttttaaggtttgttttggagcagtacaacgctctgtcctggctcacgtgcaatccggccacccaggaccgtacttcctgccttcccgtccactttgtggtgctcactcagttgtacaatgccatcatgaatatactttaattggaaaagcacttgttctctctggctcagttccttctccctgcaacctcagtccaaggaacctgctacactctgcaaataacccacatccttttcttcagaccactctccacagtcctgcactgtgattccttctcagcaggcacatgtcaattctgcagtgttcattaccagagtgactccttgacacttctctcatggacctggaaacttccataagtggtgactttcagccagtgcggtggtgtgtgtagccccaaccactggtccccaggaagtggtggtggttgatggcttttcagcgggaaacagaagagacagtgtccttttgcacaagagtctgtgttttcagcctctgtatacaattgagggcagtctagccctttggatgaaatcctcttagttactggtgtatggcctgtgggttacctgaactccataatctgggactttttaaaaataagaaccagctcaagtacatggtttcatactggggtttctgtctccctagtgttcccatccagattaccatgagtgctttggttgacttcaaacctgtgtgtcaatgcagaaggtctggagacagcttcattttgtttatttattttaatttgttttgtcatatggtttttgtgactttatttttttaattcacaaggaccaggtacagtagctgaaacccaattcagatccaccataggattctttgactacatacctctgtcctagaagccggaaaaggagtaaaaacacattggggagatcatgcctaaaagtaatatattcaaaaccacccagcagtaggttttgttaacaacaaactggattttaaaagttctgccatgttaagtggccagcatttcatgaaggataacatttttatacagaaggcagtcaagctcaactcagagccatggaggcaagtaccttaattagttttatatagtcacaacggaaatatattttctagtgaattcttattggaagccaggtctctcctctcattagatcaaaagggacttatgtacatacaacaattgaaagtgtttgctcatgaaatcagttataaatatggtgaattttttctggaccataggaatattatttcaaagaaatattacaacttaaccattaaattagtacttgaagttgagcctttgtggtgggactttttaaaaaaatgcctttttaaagcattaatggctaattgaagtattttatgactcctcattcctggcccagagggttgtctttgaaaccctgtttctaacccttgtgttgtgtgtttctgtctgaggacagtgggtgtgtactggcctcccgggagccactgtgaccaggcctttgagctcttgtcatctgtggagagaatcatgcaaattttaaaagttcttccaagagacttccatgtcctggttattaacaaaaaaggaaaaatgtaataattgatatgattttgtaaaagtatttttcttgaaataatctaaagtttaaaacattatattaaaaaaaaagttgtgtggtgggaatgtgaaagcagagaaataacttgtaaatggataattttgttctctgtaccaccagttgaagggggggttgactttcgcaatgtataggataaaaaatctgatatatcaaaccatttgtatctaatgtgtacagtgtaaaattgactttaaaaatattgcagtgctattttttcttaatcagaaaggaaaattctcaaggccttttgaagagcataagaagatgaagattgtaaacttgtataaaattatcttggtgagaagacaaattgtaaagtagatatttgtaatcttttaccactttggggttgcttttttcccggaattcatcagaactttgaattttttttttaaatgggctgtttttaatgcaggggcttttcttccctagaaacccaattctaagcagaaaaagaaaaaaaacacaaaaaataaaaaacccctacaaaaaaactttaaaaaaaatggcagcaaagggtagttttcatctggtgtcttttatttaagttttttaagttaagaaaagctggtgacatatttatacgtttttgtgcaaaaataaatgaatggcaatagattttaaaaaatcttattatgtacttctgtgtgaaaaagtctgtataatatttcccttaaatatgcattattttacttgtgagttttttactgaattaatctgaaatgtacaagccctggatttgctacagagtgagaagttattttatttttttttatttttaattttggaaattctgcagaaatcagaactcttaccatggtttgaacaaaaaaaggggaaatggggaggggaaaagggtgggattgtccagcatgcttgtatgtatatttcagaaccttttttaaatgtaaaagctgtacatttctgggaagttctgaatttcttttgtttccttttttccttcaagcattttgcagtgagcttcttttatatatagcaaacaatttgaaagaatacaaaaatatgtgaagttcatttaaaaaaataactacagtatagcgctggtacagtacactaaaagactttgataaaaagaaacaataataaaaggcctccattttaaatgtcattcatatataccttgtggatgagagctatatacttttacacacttttttagaggaataaattattgaattactaaaaaaaaaa

SEQ ID NO: 65727 - DNA, 3485 bp, Homo sapiens
atggcgctgccatcacttctgctgttggtggcagccctggcaggtggggtgcgtcctcccggggcgcggaacctgacgctggcggtggtgctgccagaacacaacctgagctatgcctgggcctggccacgggtgggacccgctgtggcactagctgtggaggctctgggccgggcactgcccgtggacctgcggtttgtcagctccgaactggaaggcgcctgctctgagtacctggcaccgctgagcgctgtggacctcaagctgtaccatgaccccgacctgctgttaggtcccggttgcgtgtaccctgctgcctctgtggcccgctttgcctcccactggcgccttcccctgctgactgcgggtgctgtggcctctggtttttcggctaagaatgaccattatcgtaccctggttcgcactggcccctctgctcccaagctgggtgagtttgtggtgacactacacgggcacttcaattggactgcccgtgctgccttgctgtacctggatgctcgcacagatgaccggcctcactacttcaccatcgagggcgtctttgaggccctgcagggcagcaacctcagtgtgcagcaccaggtgtatgcccgagagccagggggccccgagcaggccacccacttcatccgggccaacgggcgcattgtgtatatctgcggccctctggagatgctgcatgagatcctgcttcaggcccagagggagaatctgaccaatggggattatgtcttcttttacctggatgtctttggggagagtctccgtgcaggccccacacgtgctacaggccggccctggcaggacaatcgcacccgggaacaggcccaggccctcagagaggcctttcagactgtattggtgatcacgtaccgagaacccccaaatcctgagtatcaggaattccagaatcgtctgctgataagagcccgggaagactttggtgtggagctgggcccttccctgatgaacctcatcgctggctgcttctatgatgggatcctgctatatgctgaagtcctgaatgagacaatacaggaaggaggcacccgggaggatggacttcgaattgtggaaaagatgcagggacgaagatatcacggtgtaactgggctggttgtcatggacaagaacaatgaccgagagactgactttgtcctctgggccatgggagacctggattctggggactttcagcctgcagcccactactcgggagctgagaagcagatttggtggacgggacggcctattccctgggtgaagggggctcctccctcggacaatcccccctgtgcctttgacttggacgacccatcctgtgataaaactccactttcaaccctggcaattgtggctctgggcacaggaatcaccttcatcatgtttggtgtttccagcttcctaattttccgaaagctgatgctggagaaggagctggctagcatgttgtggcgtattcgctgggaagaactgcagtttggcaactcagagcgttatcacaaaggtgcaggcagtcgcctcacactgtcgctgcggggatccagttacggctcgctcatgacagcccatgggaaataccagatctttgccaacaccggtcacttcaagggaaatgttgtcgccatcaaacatgtgaataagaagcgcattgagctgacccggcaggttctgtttgaactcaaacatatgagagatgttcagttcaaccatctcactcgcttcattggcgcctgcatagaccctcccaacatttgcattgtcactgaatactgtcctcgtgggagtttacaggatattctagaaaatgacagcatcaacttggactggatgtttcgttattcactcattaatgaccttgttaagggcatggcctttctccacaacagcattatttcatcgcatgggagtctcaagtcctccaactgtgtggtggatagtcgttttgtgctcaaaatcacagactatggcctggccagcttccgatcaactgctgaacctgatgacagccatgccctctatgccaagaagctgtggactgccccagaactgctcagtgggaaccccttgccaaccacaggcatgcagaaggctgacgtctatagctttgggatcatcctgcaggagatagcacttcgcagtggtcctttctacttggagggcctggacctcagccccaaagagattgtccagaaggtacgaaatggtcagcggccatatttccggccaagcattgaccggacccaactgaatgaagagctagttttgctgatggagcgatgttgggctcaggacccagctgagcggccagactttggacagattaagggcttcattcggcgctttaacaaggagggtggcaccagcatattggacaacctcctgctgcgcatggaacagtatgccaataacttggagaagctggtggaggaacgcacacaggcctatctggaggaaaaacgcaaggctgaagctctgctctaccaaatcctaccccattcagtggcagagcagttaaaacggggagagactgtacaggctgaggcctttgacagtgttaccatctacttcagtgacattgttggcttcacagcattgtcagcagagagcacccccatgcaggtagtgacacttcttaatgacctgtatacctgctttgatgccataattgacaactttgatgtctacaaggtggagacgattggggatggtttacatggtggtatctgggcctcccaggccgaaattggtcaacgccatgcaccagaaattgctcgtatggccctagcattactagatgcagtttcttcctttcgcatccgccaccgaccccatgaccagctgaggctacgcataggggtccatactggtaaggctgactctcactccagccctagtctccacctttcccagactctcccaacctgtttcttctcaaagggccagtctgtgctggggttgttggcctgaagatgccccgttattgtctttttggagacacagtgaacactgcttctcgaatggagtctaatggtcaagcgctgaagatccatgtctcctctaccaccaaggatgccctagatgagctaggatgcttccagctagagcttcggggggatgtggaaatgaagggaaaaggaaagatgcgaacatactggctcttaggagagcggaaaggacctcctggactcctgtaaacccccattctttccaagtcagatagtcttctgctgctggtacctgggtgggcaatggccaccatgtctgcacacaccagaaatggacattttcatatgcaatggaaaacagccacaaaaagacctaccttatatggaagttgtagccctctgcagctcagccctgtacatatacctgtccctctctggcttggtccccttcctccctactttctgtaaatatctgtatctaaaccagaatattttggtcaaatataaaacaataat

SEQ ID NO: 65728 - DNA, 1705 bp, Homo sapiens
ggacagtccttcgggtacattctctatgagaccagcatcacctcgtctggcatcctcaatggccacgtgcatgatcgggggcaggtgtttgtgaacacagtatccataggattcttggactacaagacaacgaagattgctgtccccctgatccagggttacaccgtgctgaggatcttggtggagaatcgtgggcgagtcaactatggggagaatattgatgaccagcgcaaaggcttaattggaaatctctatctgaatgattcacccctgaaaaacttcagaatctatagcctggatatgaagaagagcttctttcagaggttcggcctggacaaatggagttccctcccagaaacacccacattacctgctttcttcttgggtagcttgtccatcagctccaccccttgtgacacctttctgaagctggagggctgggagaagggggttgtattcatcaatggccagaaccttggacgttactggaacattggaccccagaagacgctttacctcccaggtccctgggttgagcagcggaatcaaccaggtcatcgtttttgaggagacgatggcgggccctgcattacagttcacggaaaccccccacctgggcaggaaccagtacattaagtgagcggtggcaccccctcctgctggtgccagtgggagactgccgcctcctcttgacctgaagcctggtggctgctgccccacccctcactgcaaaagcatctccttaagtagcaacctcagggactgggggctacagtctgcccctgtctcagctcaaaaccctaagcctgcagggaaaggtgggatggctctgggcctggctttgttgatgatggctttcctacagccctgctcttgtgccgaggctgtcgggctgtctctagggtgggagcagctaatcagatcgcccagcctttggccctcagaaaaagtgctgaaacgtgcccttgcaccggacgtcacagccctgcgagcatctgctggactcaggcgtgctctttgctggttcctgggaggcttggccacatccctcatggccccattttatccccgaaatcctgggtgtgtcaccagtgtagagggtggggaaggggtgtctcacctgagctgactttgttcttccttcacaaccttctgagccttctttgggattctggaaggaactcggcgtgagaaacatgtgacttcccctttcccttcccactcgctgcttcccacagggtgacaggctgggctggagaaacagaaatcctcaccctgcgtcttcccaagttagcaggtgtctctggtgttcagtgaggaggacatgtgagtcctggcagaagccatggcccatgtctgcacatccagggaggaggacagaaggcccagctcacatgtgagtcctggcagaagccatggcccatgtctgcacatccagggaggaggacagaaggcccagctcacatgtgagtcctggcagaagccatggcccatgtctgcacatccagggaggaggacagaaggcccagctcagtggcccccgccccccaccccccacgcccgaacagcaggggcagagcagccctccttcgaagtgtgtccaagtccgcatttgagccttgttctggggcccagcccaacacctggcttgggctcactgtcctgagttgcagtaaagctataaccttgaatcacaaaaaaaaaa

SEQ ID NO: 65729 - DNA, 1456 bp, Homo sapiens
ttttttttttttagcatttctttgaattttattgaaaattgaacatggacattagaaaggtatcaggcctaaacagtgctggttctgggatgtttctcctggagaatgaaagccccagagggggcaatgaactggtgcacacctttgagcaaaaagaacaaaggagaagaaaggaaaaacacacacagattctggaaaacatgcaaagaggctctctcaagagacactgaacagcagaatggtggtgatggtggtaggggatatatgagaatgagcacactcacatggtattttgatgcaagttaaaccaatgaattcaaggcagatttaccaacatcaaagctctccctccagatcccaggttgagcagaaacctctctcaaaaccctaactggtctcggaaggtggaatggagtaattttgccctcactaagcttaaaccccctcccttctctacctaagtgttagatagtggatacattttccccctttgctggaatctatagaaggtctgcgaatgctgaagaagatacaaatgtcacttgactttctcttgcatattcagaaatgtttaacagtggctgtagacagtcaacccatcgaaccagagaaatgtttaaaagaaaaacataaaactcaaacaaaaccttgtgaacagaacagtactttcatacccacagctgaggtgtcctgccccagtcacttacacttgggtgagtggtcctgtagttgtttctctgaggttacatttcgtccattttccagctctgatggttcttttcctgccttgttagttaggacaagacacttccatttaaaataccatgtgagtcaggaagagagcttcttgcctggacacagggacacatgaacacttgttgagtggtgtggtgtatgtgtgtgtgcttgcagtttgaggggagaggaaattggttgatttctgatttgagacaatatggaaccctaactcttctataatggcagtcttctcctttagacttagtgcagctgctgaagacaagattaaaaaaagtttttcttctctttgtctctcttcagagtctgtgagcctccagcctgggagccctgggactggagcagctcagccgccgtctttctttgcttgaaagcattcacttcatcatccagggatttcttcttatcctccagtttcttcttctcgtcctggtgcagtttcttcagacggtcaaacttctcgtgcagctctttctctgcctctttgagctccgcttctttctctttgactcgctggacgaacatctgtctcatctcctcttcttttttctggagttcccctaggaactcgttccttttggcctcatatgtctcctgaagggtttgctgtcagggtcggtgtccttgaagcccatctcctccagcttacagcggcgatacagctcatagtgccgggtgtgggtctgctcccgcagatcct

SEQ ID NO: 65730 - DNA, 465 bp, Homo sapiens
tttctacctagaacactattttaggcgcaggattccttgatgaaaaataccgcgaagagatccgtcgggtttcttcccctatggtcgccgcacgcatggggcgcgatcgttctaagcctctgcgtaaaaactgggagtcggtcaaagaacaggtgatgcgaaaagcacttcgcgctaaattcgaacagcatgcagaactgcgtgcgctcttgctggcaaccgcgcccgcaaaactggttgagcatacggaaaacgatgcttactggggagacggtggtcatggtaagggcaagaatcgactgggctaccttttaatggagttgcgcgaacaattggctatagagaagtaacgtctcggtggcttatgggcggtaaaacagataaattttttcccgtgttctcaaattgctgacaagtgcttgttgtgaaatgccggatgcggcgtaaacgccttatccggcctac

SEQ ID NO: 65731 - DNA, 974 bp, Homo sapiens
agaccctgccgagcctggacaactacctcttatagtgggcgggtacaggatcactagccaggagatctccgctgcgcattcctacaaccccagcaccaacgagtggctccaggtggcctccatgaaccagaagaggtctaacttcaaacttgtggctgttaattcaaaactctatgccatcggagggcaggccgtttctaacgttgagtgttacaaccccgagcaggatgcgtggaattttgtggcgcccttacccaatcctctggctgagttctctgcctgtgagtgtaagggaaaaatttatgtcattggaggatacactaccagagaccggaacatgaacattttgcagtactgcccctcttccgacatgtggacgctctttgaaacatgtgacgtccacattcgcaagcagcagatggtgtctgtggaagagaccatctacatcgtgggggggtgtctccacgagctggggcccaaccgcaggagcagccagagcgaggacatgctcaccgtgcagtcctacaacaccgtcacccgccagtggctctacctcaaggagaacacgtccaaatcgggtcttaacttgacttgtgcgctccataacgacggcatctacatcatgagcagagacgtcaccctgtcgaccagcttggaacaccgagtgttcctcaagtacaacatcttttcagatagttgggaagcatttcggcgttttccagcttttggacataacttgctggtttcttctctttatctgcccaataaagcagaaacatgactgaattgaattggtagatgaaaaaaacctggttcaagttttttttaaaatgtggtgtcccattccaagggagaccaattcctaaagggtaaagaagggttaaagtaggtcacatatatacagtagcagctgtaaataagcttacttgaactaattacttgaaaactggtggaaaaaagagaccaactttgtt

SEQ ID NO: 65732 - DNA, 2555 bp, Homo sapiens
atgtcgttacgtgtacacactctgcccaccctgcttggagccgtcgtcagaccgggctgcagggagctgctgtgtttgctgatgatcacagtgactgtgggccctggtgcctctggggtgtgccccaccgcttgcatctgtgccactgacatcgtcagctgcaccaacaaaaacctgtccaaggtgcctgggaaccttttcagactgattaagagactggacctgagttataacagaattgggcttctggattctgagtggattccagtatcgtttgcaaagctgaacaccctaattcttcgtcataacaacatcaccagcatttccacgggcagtttttccacaactccaaatttgaagtgtcttgacttatcgtccaataagctgaagaccggtgaaaaatgctgtattccaagagttgaaggttctggaagtgcttctgctttacaacaatcacatatcctatctcgatccttcagcgtttggagggctctcccagttgcagaaactctacttaagtggaaattttctcacacagtttccgatggatttgtatgttggaaggttcaagctggcagaactgatgtttttagatgtttcttataaccgaattccttccatgccaatgcaccacataaatttagtgccaggaaaacagctgagaggcatctaccttcatggaaacccatttgtctgtgactggttccctggtctccttgctggtcttttggtatcgtaggcactttagctcagtgatggattttaagaacgattacacctgtcgcctgtggtctgactccaggcactcgcgtcaggtacttctgctccaggatagctttatgaattgctctgacagcatcatcaatggttcctttcgtgcgcttggctttattcatgaggctcaggtcggggaaagactgatggtccactgtgacagcaagacaggtaatgcaaatacggatttcatctgggtgggtccagataacagactgctagagccggataaagagatggaaaacttttacgtgtttcacaatggaagtctggttatagaaagccctcgttttgaggatgctggagtgtattcttgtatcgcaatgaataagcaacgcctgttaaatgaaactgtggacgtcacaataaatgtgagcaatttcactgtaagcagatcccatgctcatgaggcatttaacacagcttttaccactcttgctgcttgcgtggccagtatcgttttggtacttttgtacctctatctgactccatgcccctgcaagtgtaaaaccaagagacagaaaaatatgctacaccaaagcaatgcccattcatcgattctcagtcctggccccgctagtgatgcctccgctgatgaacggaaggcaggtgcaggtaaaagagtggtgtttttggaacccctgaaggatactgcagcagggcagaacgggaaagtcaggctctttcccagcgaggcagtgatagctgagggcatcctaaagtccacgagggggaaatctgactcagattcagtcaattcagtgttttctgacacaccttttgtggcgtccacttaatttgtgcctatatttgtatgatgtcataatttaatctgttcatatttaactttgtgtgtggtctgcaaaataaacagcaggacagaaattgtgttgttttgttctttgaaatacaaccaaattctcttaaaatgattggtaggaaatgaggtaaagtacttcagttcctcaatgtgccagagaaagatggggttgttttccaaagtttaagttctagatcacaatatcttagcttttagcactattggtaatttcagagtaggcccaaaggtgatatgactcccattgtccctttatttaggatattgaaagaaaaaataaactttatgtattagtgtcctttaaaaatagactttgctaacttactagtaccagagttattttaaagaaaaacactagtgtccaatttcatttttaaaagatgtagaaagaagaatcaagcatcaattaattataaagcctaaagcaaagttagatttgggggttattcagccaaaattaccgttttagaccagaatgaatagactacactgataaaatgtactggataatgccacatcctatatggtgttatagaaatagtgcaaggaaagtacatttgtttgcctgtcttttcattttgtacattcttcccattctgtattcttgtacaaaagatctcattgaaaatttaaagtcatcataatttgttgccataaatatgtaagtgtcaataccaaaatgtctgagtaacttcttaaatccctgttctagcaaactaatattggttcatgtgcttgtgtatatgtaaatcttaaattatgtgaactattaaatagaccctactgtactgtgctttggacatttgaattaatgtaaatatatgtaatctgtgactttgatattttgttttatttggctatttaaaaacataaatctaaaatgtcttatgttatcagattatgctattttgtataaagcaccactgatagcaaatctctctcc

SEQ ID NO: 65733 - DNA, 795 bp, Homo sapiens
  misc_feature (1)...(795): n = a,t,c or g
cattgcgagtgcaggaattccttttccaaggttgtggcactgcctttgacttccacaaagagattgactacatgtttctattgtgcacagaggagggaaaaatctacaagtgctctaaatcctactccagccaattcctcgacacctatgacgcccacaacatgtcagtggacactgtgtcctggaacccataccacaccaaggtcttcatgtcctgcagctccgactggacagtgaagatctgggaccacaccatcaagtgaggggcctgttcctggctctgcctggggccctcccctgggctatggcactgtgagccctctgtgccatgggctttccaccctccacctttgcaggaccccgatgttcatctatgacctgaactcagccgtgggtgatgtggcctgggcgccatactcttctactgtgttcgcagcagtcaccacagatgggaaggggcaagccatccagggtccagccaaaagaggaatcattcatcccatgaggcttcagggaggaaacagagctgttcaccttggaggagaaagcactctgggggatgagatgccatggagcagttatttcctctgctgtatggnggagagctagagggtggcagggcccggctccatctaaggaaaaatgtatgagccagagttgatcagtgactgaatagtgtctgtaatgtagtgaagtctccatccccgggagtgtgcaagctgattctgagggaacttcagtggggtggaatgggagggggctattcaacactgagaattggtgagacctcagaaa

SEQ ID NO: 65734 - DNA, 1797 bp, Homo sapiens
gggggccaatgggctcccaaggtccggtcaggggagaacaggcaccggtcccccgcgggatgggtccgcaccattccagcggctctctccacgaaagtgggccactgccgggctgcactatgtgtcactgaaattcagggagacctctcagtcggggttccagcctacgcatgttcaagggaccccctcattcccaaaacccgccgggcgcacagaattctcaggcctggctgcgttgctgggaagcggaggcccagttcctcctgcagcctggctcacacccacgcctcacagtggggccctctgaccgtggccgcagcccccagcatctaccccaagctagtgcaacatcctgcccagtccacgtgctactgcgctcccggcgcctgcctccaggccaccgggcggaccctttctcagccccaggggccttccaggcccttctgttcaaaggaccggatgcttcacaccgctaagggctttatttcacagatcatggtggtgagtttggatttccagccctcaccacggttaagtcacacatttcccgacacctgctcatttctccagatctgaaacatctcacccaacacatcctagttgttgtaaaccccaaatgaactttccagaagcaaaaacaataacagattcagagaaccctggtcacacctgctgagcaggtcccctctactctggttgcatatagaatgcttgtttgctcaaaagagaggcgctctcaacatcaaggcacaaagaaagacgtctccaggggcaaaatgatgacgaagtgaccagcggcctctgcgaggcccgaggcagagtcacgggggaggcgagttcagcctgacgggcattgggaggaagagccaaggacaggtctcccgctggggctcaggcgtcctcacgcgtacttctccaggaagttgatgtggaagtctttcaccttctgcagcaccgttttcagcttctccactggagggaggatagtcatcctgaagtggtaagtgccttccctctgcccaaagccactgccgggcacgacacagatgccagtctcctccaggagcttcatgcagtagaacatgtctggagccatttgatgggcctgagcagcctccacagctttggcaggaatgaagatccgagggaaggcgtacatggccccctgcaaggggttgcagtgaattcctgggacttggttaaacaggtcttccgtcagctttgcttttttggccagattacccaggaccgactccttctctcggctgaattgctcaaaggactcctctcctgccaccggggggttcacgacaatgtccatggcggcctgcccagacactggggggcacaggcgcaccgacagcagcttcaccagctggcccttgatctcagggtgcaggttgatcacctccatgtagcctcctctgtaaccacactcgcccatgtagcccttggaggtggagtggaaggaggcgagctccacgttgctggagtactcgggccccatctcgtacagcaccttcttgaaggagtggaatctgcaatctggagagtacacgttgtcctggtacacctcatcagccaggagaaagagcttctcttcccaggcaaagtggatcacatcttctatgcactttctgctttgtacctggcctgtggggttcccagggttgattatgcagagcaccttaggatcacagtggtctttggcctcctgcaccgcccgccggagctcattcacattcagcgcccagcagttctcctgtccaggtagtaattcacgtggatggcgcatgc

SEQ ID NO: 65735 - DNA, 1096 bp, Homo sapiens
gtccaaggcggcgcccatgctgatagtttgctttggcccatggctcagctgagctggagaactgcctctatgtggtggggggacacacatccctggcaggggtcttcccggcctcgccttctgtctccctgaaacaagtggagaaatacgaccctggggccaacaagtggatgatggtggcccccttgcgggatggcgtcagcaatgccgcagtggtgagtgccaagctgaagctctttgttttcggaggaaccagcatccaccgggacatggtgtccaaggtccagtgctatgacccctcggagaacaggtggacgatcaaggccgagtgcccccagccttggcgttacacagccgctgccgtcctgggcagccagatcttcatcatgggaggtgacacggaattcacagccgcctcggcctaccgctttgactgtgagaccaaccagtggacgcggattggggacatgactgccaagcgcatgtcctgccatgccctggcttccggcaacaagctctatgtggtcgggggctactttgggacccagaggtgtaagactctggactgctatgaccccacttcagatacatggaactgcatcaccacagtgccctactcacttatccccacggcctttgtcagcacctggaagcacctgcccgcgtgaggagcacctgctgagcccagccagaccgcggccttcagtgtcacagcgtggccttgcttgtctgccacagcgggagctaagccggccctgggccagcactccgagaggtggaaggggccctgccagctctggggagcagcagccttgggctgttctgagctttatgcaagagaagagaagcatctcttgcatccgtgcccctgggggcctcttcagctttgcagtggtttgtgggaagacatacctcccagaggggcatggactgccaccaggactgaccctggcgtcggggagaaggacacttgcagagccttgagatcacctgtttggcaggtcctggactggggccgggcaggcaggggcagggaggcgccccgggtgggctttggggctgcggcactgccacacatcctttccctcctggcctg

SEQ ID NO: 65736 - DNA, 2507 bp, Homo sapiens
caactgacgcgtacgtttgctgggatcctccgagcggccgccgggagacggccaacttggagctgctgctgcagcgctgcagcgaggtcacgcactgggtggccaccgaagtgctgctctgcgaggccccgggcaagcgcgcgcagctgctcaagaagttcatcaagatcgcggccctctgcaagcagaaccaggacctgctgtctttctacgccgtggtcatggggctggacaacgccgctgtcagccgccttcgactcacctgggagaagctgccagggaaattcaagaacttgtttcgcaaatttgagaacctggacggacccttgcaggaaccacaaaagctaccgagaagtgatctccaaaatgaagccccctgtgattcccttcgtgcctctgaacctcaaagacctgactttcctgcacgaagggagtaagacccttgtagatggtttggtgaacatcgagaagctgcattcagtggccgaaaaagtgaggacaatccgcaaataccggagccggcccctttgcctggacatggaggcatcccccaatcacctgcagaccaaggcctatgtgcgccagtttcaggtcatcgacaaccagaacctcctcttcgagctctcctacaagctggaggcaaacagtcagtgagagtggaggctccagtcagacccgccagatccttgggcacctggcactcaagcactttgcacgatgtctcaaccaacatctgacatctttcccgtggagcaacttcctgctccacgggaaagaggtcgatggatttacccctggacccataagtctgttcatcctgctgaagtcccctccccattgctccttcaagccaaaactacactttgctggttcctgtcccctctgagaaaggggatagaaagctccttcctctatgtcctcccatcgagatctgttctggggatggagcttccaacttcctcttgcagcaggaaagaatgctgctcacccttctgtcttgcagagtgggattgtgggagggattggcagccttcttctccaccacctgtccagcttcttcctggtcagggctgggacccccaggaatattatgttgccgtgtgtgtgtgtgtgtgtgtgtgtgtgtgtgtgtgtgtgtgtgtgtgtctctttttttagggagcaggagtgcatctggtaattgagggtggatgttgtgtgtgctggggaggggtccttctgtttggtgctacccttgtctactctgcccctggatggtgcggggtgctttctccacccccacactccctgctcagctcctcgtgctgccctgcatgcccaggcttgtgagccaagctgctttttggggcagggagtagcagcaggtgggaggggttacccatcagcccttgcaagtcccccactcaggcctctggaaggtccagggatgggctctgatgagagggtaaaagatgctcagggaaacacaggcctcagctgcctagaggaccctccccctgccttgcagtgggctcgggtagagcagtatcaggagctagggttgtctgctgcccacactcctgctttttgggatatctaactgctaaggagggagttgacatcccccttctggctcatgtgtctgacaccaacaacatggtctctgtccctctctctttgactctccctttgtcctccccatagagctggggtggggtggatccctatacctggggcaggcagccccaaagtgggggagggggatggcagagactgtaaaggcgccactggactctggcaaggcctttattacctttactcccctccctctcccatcaccagcctcaaggcctgaggggtgcaggggctcctggcagctactgggtgaggtttcctggcacagactcacccttctttctggcaccacctctttcccttttgaagagacagcaacagccgtagcaaaagcagctgctgctcctgctatgagggtgtatatattttttacccaaagctctggaattgtacatttattttttaaaactcaaagagggaaagagccttgtatcatatgtgaacattgtatcataggtaatgttgtacagacccttttatacagtgatctgtcttgttcctgcagcaaaaatcctctatggacataggaggtgctgtgtcccatgccctcttgccctgacagtgtcccatgggcccccttctgctccctgccccctccctgctactgctgatgcactctcctctccctgcagcccctggcttcccagccttcctcctgaccccttccaacagccttggaactccagctgccaccaccctctgggtcggacactgggacccactggcccagtcttggctgctgcttacccctagccttgatgcctgcccagggacccccagccccctcccgttgccctgcagctttaacagagtgaaccatgtgtatttgtacaggcgcggttgtcattgcagaaaccgctgggtggagaagaagccgataaagtctatgaatc

SEQ ID NO: 65737 - DNA, 2392 bp, Homo sapiens
atgtccgcgcagagcctgctccacagcgtcttctcctgttcctcgcccgcttcaagtagcgcggcctcggccaagggcttctccaagaggaagctgcgccagacccgcagcctggacccggccctgatcggcggctgcgggagcgacgaggcgggcgcggagggcagtgcgcggggagccacggcgggccgcctctactccccatcactcccagccgagagtctcggccctcgcttggcgtcctcttcccggggtccgccccccagggccaccaggctaccgcctcctggacctctttgctcgtccttctccacacccagcaccccgcaggagaagtcaccatccggcagctttcactttgactatgaggttcccctgggtcgcggcggcctcaagaagagcatggcctgggacctgccttctgtcctggccgggccagccagtagccgaagcgcttccagcatcctctgttcatccgggggaggccccaatggcatcttcgcttctcctaggaggtggctccagcagaggaagttccagtccccacccgacagtcgcgggcacccctacgtcgtgtggaaatccgagttggagttgtatgatcttcagatcttaggcacaaaaccaccgatgaattccgatacacatcgtaactttgaccccaccgcaacccttagaaatcagggtgatttcacctggaacagcatgtcaggccgcagtgtacggctgaggtcagtccccatccagagtctctcagagctggagagggcccggctgcaggaagtggctttttatcagttgcaacaggactgtgacctgagctgtcagatcaccattcccaaagatggacaaaagagaaagaaatctttaagaaagaaactggattcactaggaaaggagaaaaacaaagacaaagaattcatcccacaggcatttggaatgcccttatcccaagtcattgcgaatgacagggcttataaactcaagcaggacttgcagagggacgagcagaaagatgcatctgactttgtggcttccctcctcccatttggaaataaaagacaaaacaaagaactctcaagcagtaactcatctctcagctcaacctcagaaacaccgaatgagtcaacgtccccaaacaccccggaaccggctcctcgggctaggaggaggggtgccatgtcagtggattctatcaccgatcttgatgacaatcagtctcgactactagaagctttacaactttccttgcctgctgaggctcaaagtaaaaaggaaaaagccagagataagaaactcagtctgaatcctatttacagacaggtccctaggctggtggacagctgctgtcagcacctagaaaaacatggcctccagacagtggggatattccgagttggaagctcaaaaaagagagtgagacaattacgtgaggaatttgaccgtgggattgatgtctctctggaggaggagcacagtgttcatgatgtggcagccttgctgaaagagttcctgagggacatgccagacccccttctcaccagggagctgtacacagctttcatcaacactctcttgttggagccggaggaacagctgggcaccttgcagctcctcatataccttctacctccctgcaactgcgacaccctccaccgcctgctacagttcctctccatcgtggccaggcatgccgatgacaacatcagcaaagatgggcaagaggtcactgggaataaaatgacatctctaaacttagccaccagcatttggacccaacctgctgcacaagcagaagtcatcagacaaagaattctcagttcagagttcagcccgggctgaggagagcacggccatcatcgctgttgtgcaaaagatgattgaaaattatgaagccctgttcatggttcccccagatctccagaacgaagtgctgatcagcctgttagagaccgatcctgatgtcgtggactatttactcagaagaaaggcttcccaatcatcaagccctgacatgctgcagtcggaagtttccttttccgtgggagggaggcattcatctacagactccaacaaggcctccagcggagacatctccccttatgacaacaactccccagtgctgtctgagcgctccctgctggctatgcaagaggacgcggccccggggggctcggagaagctttacagagtgccagggcagtttatgctggtgggccacttgtcgtcgtcaaagtcaagggaaagttctcctggaccaaggcttgggaaaggtaactggagcctggccagcaggcgctggccaaaacaagcgaccctcctcttgttgcatgtggcatggtgtggggctcttcggaccttctcttcgtctctcccttatttgatgtttctg

SEQ ID NO: 65738 - DNA, 3152 bp, Homo sapiens
tgcaagtgacttcattcggagcctggaccactgtggatacctatctctggagggtgtgttctcccacaagtttgatttcgaactgcaggatgtgtccagcgtgaatgaggatgtcctgctgacaactgggctcctctgtaaatatacagctcaaaggttcaagccaaagtataaattctttcacaagtcattccaggagtacacagcaggacgaagactcagcagtttattgacgtctcatgagccagaggaggtgaccaaggggaatggttacttgcagaaaatggtttccatttcggacattacatccacttatagcagcctgctccggtacacctgtgggtcatctgtggaagccaccagggctgttatgaagcacctcgcagcagtgtatcaacacggctgccttctcggactttccatcgccaagaggcctctctggagacaggaatctttgcaaagtgtgaaaaacaccactgagcaagaaattctgaaagccataaacatcaattcctttgtagagtgtggcatccatttatatcaagagagtacatccaaatcagccctgagccaagaatttgaagctttctttcaaggtaaaagcttatatatcaactcagggaacatccccgattacttatttgacttctttgaacatttgcccaattgtgcaagtgctctggacttcattaaactgggcttttatgggggagctatggcttcatgggaaaaggctgcagaagacacaggtggaatccacatggaagaggccccagaaacctacattcccagcagggctgtatctttgttcttcaactggaagcaggaattcaggactctggaggtcacactccgggatttcagcaagttgaataagcaagatatcagatatctggggaaaatattcagctctgccacaagcctcaggctgcaaataaagagatgtgctggtgtggctggaagcctcagtttggtcctcagcacctgtaagaacatttattctctcatggtggaagccagtcccctcaccatagaagatgagaggcacatcacatctgtaacaaacctgaaaaccttgagtattcatgacctacagaatcaacggctgccgggtggtctgactgacagcttgggtaacttgaagaaccttacaaagctcataatggataacataaagatgaatgaagaagatgctataaaactagctgaaggcctgaaaaacctgaagaagatgtgtttatttcatttgacccacttgtctgacattggagagggaatggattacatagtcaagtctctgtcaagtgaaccctgtgaccttgaagaaattcaattagtctcctgctgcttgtctgcaaatgcagtgaaaatcctagctcagaatcttcacaatttggtcaaactgagcattcttgatttatcagaaaattacctggaaaaagatggaaatgaagctcttcatgaactgatcgacaggatgaacgtgctagaacagctcaccgcactgatgctgccctggggctgtgacgtgcaaggcagcctgagcagcctgttgaaacatttggaggaggtcccacaactcgtcaagcttgggttgaaaaactggagactcacagatacagagattagaattttaggtgcattttttggaaagaaccctctgaaaaacttccagcagttgaatttggcgggaaatcgtgtgagcagtgatggatggcttgccttcatgggtgtatttgagaatcttaagcaattagtgttttttgactttagtactaaagaatttctacctgatccagcattagtcagaaaacttagccaagtgttatccaagttaacttttctgcaagaagctaggcttgttgggtggcaatttgatgatgatgatctcagtgttattacaggtgcttttaaactagtaactgcttaaataaagtgtactcgaagccagtaagtgctctgggacctcattattttaagcctggtagttaaaaaaaatcttgcaaaaggatgccaaagaagataaggacgtggaaagaagtttaatttgatgattaaaaacatgcaacagttttgtgtcttagctctcctactaggattatcggcgccttgaaggaattctcattcatctttgtgttacctttggtctgggtcacaccaactggtatactgaatgcatattaacttagtatagtgcctggcatgtaagagattctcaacaatattctcaataaatattcgctgaatatgagataaattattaatagctactgaataaagaaagattatttaaaaccagagaggaaactccatatatgttctttaatccaaacagtttaattcaagcaatctggaatataaaaagcactttctgatattagaaggagatcagactcccaaaaaagatcagcattctttagtcaagcaaaacttggaagtttacaaacagctaaatcagaagcttgaaattcaggtcctctccagtacctgctacattatatgtaattccaaacatgacttcagagattaaagaagaaagggaagatgtttcccattcttttgtaccctatataaactaagggtaccctgccctaatcttttttccaacacttccccaaataacccttccttacaaagaaagaagtctaagagaactctctcatctaaatatatttaagtagaggcaagcctgaaaaaaacacaaaaacctaaatggtgttaggctgtggttcacctattctcatggcacctcaaattaatggcttgggtgttggtgtaggtaacgcttggcctgtatgttgaggtagtcactagataaaattctgggcacaacatccgtttagcaattgggcatacattctacagatttagccataacgttttgaagctgattattttacagatcaactaattaattcctctccctaactttacagatgagaaagctcagatgatttgcccatgggttataaaactacttccttacacagtggcagcatcagaactggaattcagatctcttgcctcctaggcagtgtttttcctattataatatggtgacttcgtaaagcagggttaattacattccacaaagcttacatcctaatcacaaacaatgggacaaatatttaaattgaacttcttctcgtgcc

SEQ ID NO: 65739 - DNA, 1476 bp, Homo sapiens
  misc_feature (1)...(1476): n = a,t,c or g
ttttttttttttcctattaggaaaaaatggggggaaaaaaaaaagactgcaaaggaagcaaacacaaagtcatgtaattgcccattgcccaagacgacagcactatagaaaacagttgcaagttaattctcggagatgaccagagatttttcagtgtttacacaaaagtacatagtacatttttttttttttacaaaataaaataaacatcatttgccaccataaaccttttctttagagaggaaaaatttttgcagcaggacacaagggttctattaagtcatttcaatgcctgagaaaaacaaaattgagtaataggactaatcacttccctatatatggatgttaagatgacaatttagattatttttcaaactaatcctgaggaaaaaatctgtttacaatttaaacagtaatgttatgtaaaaagtattattaacaaatcccctattacaaatatcaatttcctatatggtcttctatatatacacacaataaaatggtaaatatatgcaaaaatatttaaaaaaaaaacatgcacagatcactttcccctttggaatctggacttcctatcagatacctttgttttccttccccacctcatcctttgatactgttttttgtttctatcaccctaccaacactgaatactattccctataactttgcataaagccaatgagaaatatatttattttacattcaagctttaaattttaaaatgaccctgttgtagcatatgacttatcaaataagcagccttttttttccctcttttttgcttgcttttttttttgttttgttttgttttttttgcagttgtcagtcttcatgatccattctgtggcgagctgggaaaaaacgcagttgctaagtcaacgtctgaacagtgtgaggctcctgaatatctcccaggagtccctgcgcaactgtcctgagcatgagatcattgcacagagaagacagtccaccgcgcagcgctgactatctacagaggtctgagaggggcgcgtccctcttgtgtttcctctttttgccatggtaatactgattattggatttgccttgatgttgtttgtttgtcatcaaggaaccatggcttgtttgagttgtaccttggaagcctttgctggaagaacgaaagagccttgctgatccatgctgagatttgttggtgctgttggatgtgttagtggtttgggtgctttgcattttcccaactgcctgagaggactccaaggatacatcttgcgaccctactcgggttnccagtggacggacggcaaagcagctgtttcggggttttgcatggtgttgcatcggaatctacatcactagagctggactgtgtggcagaagaggacgacactggaccattgcatgaaggctcaggtctattcttcaagccccactgctttgatatccaatctctatatgtggcaacttcatctgttactctaattattcttccag

SEQ ID NO: 65740 - DNA, 1045 bp, Homo sapiens
gtttttttttcacatataacatttaaaaatcagtatttaattacaaattatatgttctacagtccagcaatacaaagtgttgcattagtaccaccaaaaccaaaggaattggtgaggccaataaatcttttctcagttttccattcctgtgcctttagtggaacatagttgagatcaaattctggttccgaacaatccaggtttaaagtaggtggtatgtttttgataataacaagctaatgggggtaaaagctgcctcgactgcccctgcagctcccagcagatgtcctgttgctcccttagttgaggaaactgcaagggcatatgcatggtctttgaagagatgtttgatagctttgttttcagcagcatctcccaatggtgtggaagtagcatgtgcattgatataggatatctcctcaggctgcacacctgcatcttttaaagcagcagccatacaccttaaggcaccttctccttcaggatcaggggcagttatgtgaccagcatcacctgagagtccatagcccaaaacttctgcatagatccgggctcttctttgaacagcatgttcatattcttccagcaccagcacagctgcaccttctcccattacaaaaccatctctctttggatgaaatggtcgacatgccaacttgggatctgagtttgtgctcagagcccgggctctggaaaacccagcaagagataaagggctaatacaagaatctgtacctccagccaccatcacatcagcatcaccatgggctataaatctaaatgagtctcccacagcatgagctcctgtggtacaggctgtggatactgcatgatttgggcccttgagtttatatcgaatgctgacctggcctgctgccatattgaccagaatcttagggacaaaaaatgggctaactttattgtaaccttttgtctgaaaattcaaagcagtttcagaaacaacttcaagaggaatcattcccatgccaattgcaacaccagtagccacttgatcagcttctgactgaggatgccagccagaatc

SEQ ID NO: 65741 - DNA, 612 bp, Homo sapiens
tttttttttgatgttctgaactttattttcaactatttaaagcactctacaaaatgctctacaacattaagaaaacctcagcaaaatttggggtgggaattagactctgtttatctgtcatcaaaatatcacgcaaacacttattttaagtgtttaacttaagatatttaactctgtggaattctttgtagatgatggtatatttaaattccacatatgacaatgaaaatttaccccaagcatacaactctttaaaacaaaataacacacattttttaaaactgtttcagattaagttgttttgctttttttcctagacatgaaaactaagctcaatctttttccccagtcacagccttgagcttatggcagatttgcacaaagtataccaatttcttcttggattgtccatctagtgatgccagtagttcatgccatcacaggtagaagagatggttggctaattccagactgggttctttatgaatgctttgtgccaccagaaaggtcagcttgtgagcatactgacatggtgctgggacactgactatgcccggccagttgtagtacaggtgggcacaatttgaatgtaagtctctgcatatggtcggg

SEQ ID NO: 65742 - DNA, 2018 bp, Homo sapiens
tgtgccattgcattctgaattattggtgtgatgaaccaaggagtggctccctattgtaaggactccaacaccgggtggaagtccatatggacaacaggtggtagttttggggcctccatggcagcaggcaccacctccatattccggtccacatccagctggaccccctgtcatacagcagccaacaacacccatgtttgtagctcccccaccaaagacccagcggcttcttcactcagaggcctacctgaaatacattgaaggactcagtgcggagtccaacagcattagcaagtgggatcagacactggcagctcgaagacgcgacgtccatttgtcgaaagaacaggagagccgcctaccctctcactggctgaaaagcaaaggggcccacaccaccatggcagatgccctctggcgccttcgagatttgatgctccgggacaccctcaacattcgccaagcatacaacctagaaaatgtttaatcacatcattacgtttcttttatatagaagcataaagagttgtggatcagtagccattttagttactgggggtggggggaaggaacaaaggaggataatttttattgcattttactgtacatcacaaggccatttttatatacggacacttttaataagctatttcaatttgtttgttatattaagttgactttatcaaatacacaaagatttttttgcatatgtttccttcgtttaaaaccagtttcataattggttgtatatgtagacttggagttttatctttttacttggtgccatggaactgaaaccattagaggtttttgtcttggcttggggtttttgttttcttggttttgggtttttttatatatatatataaaagaacaaaatgaaaaaacacacacacacacaagagtttacagattagtttaaattgataatgaaatgtgaagtttgtcctagtttacatcttagagaggggagtatacttgtgtttgtttcatgtgcctgaatatcttaagccactttctgcaaaagctgtttcttacagatgaagtgctttctttgaaaggtggttatttatgttttagatgtctaatagacacagcacatttgctctattaactcagaggctcactacagaaatatgtaatcagtgctgtgcatctgtctgcagctaatgtacctcctggacaccaggaggtgaaaaagcactttttcaattgtgctgagttagacatctgtgagttagactatggtgtcagtgatttttgcagaacacgtgcacaaccctgaggtatgtttaatctaggcaggtacgtttaaggatattttgatctatttataatgaattcacaatttatgcctataaatttcagatgatttaaaattttaaacctgttacattgaaaaacattgaagttcgtcttgaagaaagcattaaggtatgcatggaggtgatttatttttaaacataacacctaacctaacatgggtaagagagtatggaactagatatgagctgtataagaagcataattgtgaacaagtagattgattgccttcatatacaagtatgttttagtattccttatttccttattatcagatgtattttttcttttaagtttcaatgttgttataattctcaaccagaaatttaatactttctaaaatattttttaaatttagcttgtgcttttgaattacaggagaagggaatcataatttaataaaacgcttactagaaagaccattacagatcccaaacacttgggtttggtgaccctgtctttcttatatgaccctacaataaacatttgaaggcagcataggatggcagacagtaggaacattgtttcacttggcggcatgtttttgaaacctgctttatagtaactgggtgattgccattgtggtagagcttccactgctgtttataatctgagagagttaatctcagaggatgcttttttccttttaatctgctatgaatcagtacccagatgtttaattactgtacttatta

SEQ ID NO: 65743 - DNA, 2476 bp, Homo sapiens
cggacgcgtgggaaacttactcttgatggagacactgttgattccattactcctgacaaagtacgaggtttaagggatatgctgaacagcagtgcaatggacataatgtattatactagtccactttatagagatgaactagttaaaggccttcagcaagagctgaatcgattgtattcccttttctgttctcggaatccagactttgaagaaaaagggggtaaagtctcaatagtatcacattccttgggatgtgtaattacttatgacataatgactggctggaatccagttcggctgtatgaacagttgctgcaaaaggaagaagagttgcctgatgaacgatggatgagctatgaagaacgacatcttcttgatgaactctatataacaaaacgacggctgaaggaaatagaagaacggcttcacggattgaaagcatcatctatgacacaaacacctgccttaaaatttaaggttgagaatttcttctgtatggggtccccattagcagttttctttgcgttgcgtggcatccgcccagggaaatactggaagtcaagaccatattttgcctagagagatttgtaaccggttactaaatatttttcatcctacagatccagtgggcttatagattaggaaccattaatactggaaacactacagcaacattttcacctgtccagatccactgggtacaatacttcaaatcctttaccttatgaacatatgaagccaagctttctcaacccagctaaagaacctacctcagtttcagagaatgaaggcatttcaaccataccaagccctgtgacctcaccagttttgtcccgccgacactatggagaatctataacaaatataggcaaagcaaggcatattagggggctgctaggcattggaaagggacttggaggaatgttgttctcaaggtttggacgttcatctacaacacagtcatctgaaacattcaaaagactcaatggaagatgagaagaagcccagttgcctcaccttctgcctaccacccgtagggacacagacccttccacatagcagttctggcttcctcgattctgcattggagttggatcacaggattgattttgaactcagagaaggccttgtggagagccgctattggtcagctgtcacgtcgcatactgcctattggtcatccttggatgttgccctttttcttttaaccttcatgtataaacatgagcacgatgatgatgcaaaacccaatttagatccaatctgaactcttgaaggacatgaatggcctaaaactgattttttttttttccgttaaaaggggggggtcaagatacggagatttcagggttaaagtatatttcagttttctttagggcaacatatatttgaatttaaaagcactttatttaaaaaaaaaaaaaagttttcagttctgaaaaagtcatttacagtttgcatcattttaattatgagtctgacaaaaccttctccaaaaaatcaagcaagacctggatgtgaaaaaggtttgggtaaactgcatgtaaaggctacaaatcacaatctgattcctcccaaatataaaggcatatggaacataatgtattaaccaaagtatgttataaatcaaaaatggtcaaggttcagcatattctatatgaaaatcacaagggggtatcgttttaaatttctatgaaggctttcatttgtacatccctttgaaaaaatataacagatttaaaatgttttgaatttaacttgtttagaaaaactaatgcttaaaacaatatttgaactactgtatttataatttattacctctaattgctttatttcagtgtatgagacattactgttttaatgtttgctttgaacataatttaagaaccagatttattttctatagtgataaacccttttttctcagaactccatctttgtactcttcagatgaatatatagacactgtggcatacattttttttcattaaaaacttatggcttcatacaacactagttcaattttttaaataaactttttattatgttacatgtacttcagagaaagctaaagtttctctaaacttgacacggagtactccataatgggtacatttcattagctttattagaaaactagtaaatgcttttgaataggtagtatgacagctattttaaatgtataaacatttgtgtgccaaacaacatatatgaagggatgtgatgccactaactagtgcacattgtttctcaatgtgccattgagacacaaggcacagtaagtcaggattctgaggcattggaagggttttcttcagctgtaattgtttccacagtgcttttcatctgaggggctcaaagtttaagagtgcattcaataacccatgtactagcttcttgaggtaagtaaataaatcttgttctcatgttacatgttaatacaccaaggcaccaaaacatttaaagtgccatgaat

SEQ ID NO: 65744 - DNA, 672 bp, Homo sapiens
caggctcgccgatatgaggcgcatcgacaaattagtggccggcacgcattatctgcttacattcagctcttcagaaaaccttgctaaggctattgctacggacacggtagccaacctgagcagaggtccagaacctccctttttcaaacaattaatagttccattaattcctagtattgtggatagagcaccaaaaggcagaactttcggggatgtcctgcagccagcaaaacctgaatacagagtgggggaagttgctgaagttatatttgtaggtgctaacccgaagaattcagtacaaaaccagacccatcagaccttcctcactgtggagaaatatgaggctacttcaacatcgtggcagatagtgtgtaatgatgcctcctgggagactcgtttttattggcacaagggactcctgggtctgagtaatgcaacagtggaatggcatattccagacactgcccagcctggaatctacagaataagatattttggacacaatcggaagcaggacattctgaagcctgctgtcatactttcatttgaaggcacttccccggcttttgaagttgtaactatttagtgaaaagttgatagatcatttaaagaacagctttactctctacacattatataagtgatttcaaattaatgtgaaaaaaaaaaaaa

SEQ ID NO: 65745 - DNA, 919 bp, Homo sapiens
ggaggtgtgtaacgtgcgctatggagccgaaagtcgcagagctgaagcagaagatcgaggacacgctatgtccttttggcttcgaggtttaccccttccaggtggcatggtacaatgaactcttgcctccagccttccacctaccgctgccaggacctaccctggccttcctggtactcagcacgcctgccatgtttgaccgggccctcaagcccttcttgcagagctgccacctccgaatgctgactgacccagtggaccagtgtgtggcctaccatctgggccgtgttagagagagcctcccagagctgcagatagaaatcattgctgactacgaggtgcaccccaaccgacgccccaagatcctggcccagacagcagcccatgtagctggggctgcttactactaccaacgacaagatgtggaggctgacccatgggggaaccagcgcatatcaggtgtgtgcatacacccccgatttgggggctggtttgccatccgaggggtagtgctgctgccagggatagaggtgccagatctgccacccagaaaacctcatgactgtgtacctacaagagctgaccgtatcgccctactcgaaggcttcaatttccactggcgtgattggacttaccgggatgctgtgacaccccaggagcgctactcagaagagcagaaggcctacttctccactccacctgcccaacgattggccctattgggcttggctcagccctcagagaagcctagttctccctccccgggaccttccctttaccacacccgcccccaagaagcctgggaatcccagcagagcccggagctggctcagccccagggtctcaccacctgcatcccctggcccttgattttctcccatgtggaccctgatttatggtggtacttgctaggacttaa

SEQ ID NO: 65746 - DNA, 461 bp, Homo sapiens
  misc_feature (1)...(461): n = a,t,c or g
cagttcttccatttcgtaccaggcttcgcagccttcagcctgcattcgtggcccggcaacaccaacaaagcgggcgttgggcacatgttctttcagagcgcggattaaaccggcccccaggatatcgccggaggtttctccggcgaccagggcaatcgttaatggacgctgttcagtcattaacgaatcaaaccgcgcgttgagcgtgcaaagaaatcggtaaaggctttcacttccggatatgtttccgccagttcagcaatttccggtttcacttcatcgagcgttttaccgctacgataaatcagcttatacgcattgcggatagcggtaatcgcctcacggttgaatccgcggcgcttcagcccttcgatattgacacccgaacggcgttgcgtggttaccctgcgcaatgacataaggagggacgtcttgcgccacaccggagcacccgcccncct

SEQ ID NO: 65747 - DNA, 2573 bp, Homo sapiens
gctgcggctcctcccggggccgtttcccgttgtctcagccgcggcgcaaagggcacatcggcctgaccgactagccggctgccagtgccgggagccgccgcgtccatccccgcccgcctggccggggacccaggactgagtcgtccagctgcgcccctcgcccatagccccagcgggcgccgggcgggcgagcagctcttcggcccttcccggacagcgacgcagtcgcagcgcgcgccctaacacagatgtgggaagataaatgaaggggtctagatgtaaatgtcagtggaaaggagagctaccatcactaagggctgaaaacacagttaaatcactttcaaagttaaaagactattaagaacacaagatggggactcctgcttctggaaggaaaagaacacctgtgaaagaccgattttctgcagaagatgaagctttgagtaacattgccagagaggcagaggcaaggctggcagcaaaacgggctgcccgggcagaagcaagagatatacgcatgagagaactggaacgacaacaaaaagagttggatgaaaaatctgacaaacagtatgctgaaaattatacaagaccttcatctcgaaattctgcctcagcaacaacccctctaagtggaaactcatccagacgaggaagtggggacaccagcagcttaatagatccagacacttcattaagtgaattgcgggatatctatgaccttaaggaccagatacaggatgtagaagggagatacatgcaggggcttaaagaactaaaggaatctttgtctgaagtggaagaaaaatacaagaaagccatggtttccaatgcacagttagacaatgagaagaacaatttgatctaccaagtagacacacttcaaggatgttattgaagagcaggaggaacagatggcagaattttatagagaaaatgaagaaaaatcaaaggagttagaaaggcagaaacatatgtgtagtgtgctgcagcataagatggaagaacttaaagaaggcctgcggcaaagagatgagcttattgaggagaagcagcgcatgcagcagaaaatagacaccatgacaaaagaggtgtttgacctccaggagacacttctttggaaagataaaaaaattggggccctagagaaacagaaagaatacattgcctgccttaggaatgagcgagatatgctcagagaggagctggctgacctgcaggagacagtgaagacgggagagaaacatggcttagttataatccccgatggcactcccaatggtgatgtcagtcatgaaccagtggctggagccatcactgttgtgtctcaggaagctgctcaggtcttggagtcagcaggagaagggccattagatgtaaggctacgaaaacttgctggagagaaggaagaactactgtcacagattagaaaactgaagcttcagttagaggaggaacgacagaaatgctccaggaatgatggcacagtgggtgacctggcaggactgcagaatggctcagacttgcagttcatcgaaatgcagagagatgcccaattagacaaattagcgaatacaaatttaagctttcaaaagccagaacaggatataactaccttggagcaaagtattagccggcttgagggacaggttctgagatataaaactgctgctgagaatgctgagaaagttgaaagatgaattgaaagcagaaaaacggaagctacaacgagagttaccgaacagcactggacaagattgaggagatggagatgaccaacagccacctggccaagcggctggagaagcatgaaggccaataggacagcacttctggcccagcagtaggaaaaccacccttcaacctgggtgatgctccttggggccctacctagagggactgacttttgtccattgacacaaaccccttttaagtacctgttttgagttttgtcattaaaacaagccacctttgtattttataatttatgacagaattgaagtcattttgaatctacatgaatgaacactttggatttttgttggagtttgattctagggtagaaccagtccatgctgtttttattttttatctccgtaattgtagaatcatgtttactcaacgtttttccccagctgcctcagtaactgggcactcggaggccttggcacgggttctggaggacagacagcaattctatgagtgctcactgagatacttgctggagacctcagaaaacacaagtgccttctccacggtgcaattcagacttcagtgatctccagtggtcaaaagacatttacccttaatatcagacaacatttatattttagtgaagaaacaagttctcgggtggggaatctatgtttcactcagatttatatgtttggaggaaaaaagcctttttttgtaaaatatttaaatttatataagaaaatgttagaaaaaaatatggggagtgtatataaaacttgctttattgcatggggcaggggaagtccaggcctaatactcctaaagtaagagttgggtcctttttttcttcaatacaactgtgctgtaccttgtaaaaa

SEQ ID NO: 65748 - DNA, 1482 bp, Homo sapiens
aaaccatctcctcccataaagtaattcaaaaataaagtgagattgtttacatgaatagaaagttgatgaactgtgagaattggggcttcccttgcttactccagcctgggtgacagagtgaggctttgtctcaaaaaataaaataacaaaataaatgaaataagataaaataaaaatacagtactttgataaggaaaggtaactgtcagaaaggtgcgattcccccagtcctcacttaggagagagaccaacagcctgagttaaccaagtcctttgtagcccacagcaacagggagctagggactgagtcaggctctctgtaactgtccctatttgccctgggtccccaggagggtaatgttattaagcttcaggtatctgtcgctgttcttcttgaggccacaaggaggcagcacagtgtctctgtcaggaaaatacacttggatgtggtgacagacgttttcccgaggcttacgtttgattctgcaccaggcgctgcgtacacctgcttggaggctgcaacggggcgggctctgctgcgtcaacacatggacatcactggagaggaaaacccactcaacaagctccgcgtgaagattgaaccaggtccaggaggctcctctgtctgacacccactcccctcaattgagcttggagccccaagttaatgcgaacttcatgttgatcagtgcacgcttagaatactttatttggagggaggggcactccagagctctttgtagccaattctctggcccctgggctgactgaacccaagccattgcagccagataggagttctgtccagtctgtgcggttcgtgatgacttcaccattgctttgcatttgcacaagtccatatcgttttaccaggctctttcgcattccttcatgatcatcagggcagatctgtggattctgtagaataaaagcattagccttattttacagaggatgggactgagtgccagacaagttaagtgtcttgtccaggtcatgtacctaatcagtgcatgactgcaactgagatccgggtcctctctccaaattcagatctttttacttcctaacattttccttcattccatgtgtgactaatctgaaacctttttatgcaattgaagctcatgttccttgatgccgttaagtttgcagatgaatttcttagagacgggtaattagttttagcctggaacagctgtaaaaacaacacattggctgggcatggtggttcacgcctgtaatcccaggtcaaagcgggtggatcatgaggtcaagagttcgagaccagcctagccaatatggagaaccctgtctctactaaaaatacaaaaattagctgggtgtggtgatgcacacctgtaatcccagctactggggaggctgaggcaggagaatcgctcgaccccaggaggcagaggttgcagtgagctgagatctgccactgcactccagcctgggtgatagagcaagctccgtctt

SEQ ID NO: 65749 - DNA, 919 bp, Homo sapiens
ggaacatggagcgggggccggtggtgggggcaggactgggggccggggcccgtatccaggcactgctgggctgcctgctcaaggtgctgctctgggtggcctctgccttgctgtactttggaagcgaacaggccgcccgccttctgggcagcccctgcttacggcgcctctaccatgcctggctggcagcagtggtcatctttgggccgcttctgcagttccatgtcaaccctcggactatcttcgccagccacggcaacttcttcaacataaaatttgtgaattcagcctggggctggacatgcactttcttagggggctttgtgttgctggtggtgttcctggctacacggcgcgtggcagtaactgccagacacctgagccgactggtagtaggggcagccgtgtggcggggagccggccgggccttcctgctcatcgaggacctgactggctcctgcttcgagccactgccccagggtctgctgctccacgagctgcctgaccgccgcagctgcctggcagccggccaccagtggcgaggctacaccgtctcctcccacaccttcctgctcaccttttgctgcctgctcatggcagaggaagcagctgtgttcgccaagtacctggcccatgggcttcctgccggcgccccactgcgccttgtcttcctgctgaacgtgctgctgctgggcctctggaacttcttgctgctctgtaccgtcatctatttccaccagtacactcacaaggtggtgggcgccgcagtgggcacctttgcctggtacctcacctatggcagctggtatcatcagccctggtctccagggagcccaggccatgggctcttcccccgtccccactccagccgcaagcataactgaaagaaataaaaaccatcgggcctgaaaaaaaaaaa

SEQ ID NO: 65750 - DNA, 1458 bp, Homo sapiens
  misc_feature (1)...(1458): n = a,t,c or g
ttcactgtaacaaataatcgagggtcaagctgtttttttactgcttgtctttttcggtcaggtgagcagggctgggtataagccccattgccagattctgtagccaggtggagaaaagtggactggaggctcataatgttcagaatactcacattctgttaatcattttgtcttccatatagcacatcactaccattaccatcctccccctgtcctcagttntaagtctgtttggtttaatttctccagacaataaggcttcagtcatctgctagagagatagctgcctgcctacaaaagaagagcaaaaataaatgttcaaataatccccttgtttcaactttctttattactcccacttcctgcagtcacagcaattagctaacaataaaaacactcccacttcctgcagtcacagctgaaagacttttcaaggcagactacatttgggctggagatacaagtgatgtagtttgacttgggcaatacaaaacaaaagtcataggaattaaatggattttcaatcactgtataattcattctcctggcttaagtacgttttaattttttcacagaaaaaaatatatttcaggcaaataaaaacaaattccagattagcatagttcagcgtttcatttatcttacctttatcaaggcaaacaaagtacagatgctgtacattaaaaacatagaaatatatcactcacaccacatcaactcctacggacaaaagggctttttctaagccctgctcctttctgaagcacacaccacagctaaatgtacaaagagccatctgctggtccaacatagccaactccaatgagcaggacgtctatcagcgtccatattcccaggccaccgaagctgaagagcttgccsgaggccgtccccgctactggccccaggtagraaacggtctgctcccaaaccccaccgagggtgatgccttaagagccagagcccgtagacccacttatagcctccagtccaattgcaatatagcattttgggaaaagtacggttacccaagcagtggacgtggtccccgcaccgtgcagttggcagggtagcgctgccgaggacaggacaccgtcatgcagctggtggagttggtacactcgtaatctgtttcaggaagctgccagcaaaatctgcaagtcatgttaatgatgaagttcttttgggatttgaagtcttgatcaacacaggtaacagatggtttcactgcacagtcaaaagtgacaggcttcccataggtacaggagaaatttgttgtgcagtctatacagtctgcaggaagcctgctacacaaaccattgctcggacacttcatcacataaggtgggatttcagtactttcaccgcccgacagaatgcagaactgcgaaaggaagagcagcacgcgacacaaggcgcggaggcccctcagcgggcgcacccctcccgccatcttgc

SEQ ID NO: 65751 - DNA, 4114 bp, Homo sapiens
  misc_feature (1)...(4114): n = a,t,c or g
ttttttttttttggtcttttatggtcgattttgtcttttttcttcttttttccccattttttcaaggatggaaaggtcagagaaaaataaaataaaacatctttcaatagtctttcctggtaaaagcagcgtctctctgggctggggagtaaagggtgtggggcaaggggagtggggagaggctgaaaccttcccccaaaccccagttttagatcctttggtttccttctcccagaagatggcagaagggcatggtgggaacagcagggagaaaatatggtgatgacaaaccccagatgatcaaggggctgatgctcctggggcccagaggtaccaccagagccttctatgagacagtgctgggcaatgggggggcccgcagggccttcttgtgggctgcatagttggcttgagggggagcaggaggttaggggtggggaccagggttgcagcctactagcctcgggcagggctgcagagtgattttggtaatccagatgaactatcaataatttaaaacttgatatatatatatgtatatatatataaaaatctcccccctttccctccccccttagaagaagctaggatgtcaagagtcatggagagaggagggggaaggggatgtagaggctcctgcccaggggtacctctgatagcccaaatggtgtatacattgctactcagcacaaaggcctgtcctagtaactccaggcctgtcccttcattgtcccctctcctgggactgggcacccccatggactcttacccaccctacccctttcccccctcaagccccagggctaaggagcttttcactttcccaaagtctgtgtgttcgagtgctggcttgtccatttggcatcttcccggacaggctggccggtgggtggtgtagggggttggctgatcatggcagcaggcctgctggaagactgggaggggcaccgcttcctgccctcaccgccgccacctcctgctaccactgagtgtcgcttgtggttgccctcctcacccatggggggatctactcggaagtcttcaagacgtcggaatttgccgaggtattcttgcagtttggggtcaatgtccaaatttttggctttggaatatttcaagaaggcccagaacttctccagcccatacagttggccagcttcatagtccttcaccgtttcctcctgaaaatccttgaatatgtccagccggaacttcttttccaggccataactgtagtatcgaaaaaggcactccaaaccatatctgtagccttctttggcgtcctccagagccagctgcttgaactcctcatacatctttttgttgaagtgatctcggaggaagaaggaccagaagcggaagagtgtgttcatctcctgagactggccaatgcccaagcgtttccgctcattaaggcagcgcctacgatacttatggtagacgtgttgtgtgaagccattttccttgagcagttcatgggaaggatgctggaacttgggcaatgactgaggggtacagccatagctgccaactgtaggcgtcccttctgaggggctggagctgatggaagcagtacggggcctgtgctcacgggaatccatcacccagcccacatggctctccaagggtgggtttgaactgtgtcttgtctttctttttcgaggcatcttggcatccagtgtccgtccttctttcaccactgggtaaaaccgtgatgtctggcttgagtctttgagctgtggtgtccggggagtgcgaggggtcctggtgttgcggtagtttggtgactctgggacagtggttggtagagagcgggcgatggtggagggctcaggagcaccaaacaacttgttggccagggcatccgtaggaacttgctggaaccgaggtggcccaggaggaacttcctggttgggatccacagggggctcaggggtcagtgtgtcaaactgctcccggctgatcatattgacctttttgaagttctcgacttcttgcttgatctgggaatactcaggttcaaacttttcagcccacaggtcctgctcatagtagaagaggccatcattaatgaccttggccagttcggcgctcatcttggcacgcgaggtgtggttgcctgtgcggtccccccctgggtgccggcgcatgtaatgtggtgtctgggtgacaatgaggatcttgttgacatccctgtcatcaatctcatagtcagattcctcatcagaccaggcagtgaaggtgttcttccgcccatccatctgctccatctcctcgtcaaacagaaaatccagttcctcttgctcatcctgatccttggacatcagctgctgggaaggcagctgctgaggcagagaggtcaggtgggaaaatctggactcctctgacttcttgggccgtgctggggatggccgaggcctcttcttcgcttcaatccagttctcagaatccaggtcaggcaggctggcagacaggcccttgggtagtgtctttaggttgctgacctcctctgttttggttggcactggggtgactgcacgaggagagccaggtgccgactctgtctccttttggtagtgctgacggggaacaaattcagggcagttgagaagctgggagaaatcagtctgtgaataatccactattgggggaagaggccacttttctggttcctccctcctacgaactttctcatcaacgatctccaccaccttgctgtcctttagggccgcaaagatgagtgaaatgtcagtggtaagggcctgcactcggtggaaggaagcaataagggtgatgggtaggaaaccatcagcatccattttccttcgcaggaagaagtctcgctctaaattgtccacgctgaagtagtattcaatctggcgcttgatgtagtctttgagcagttcctgatccacactgtaaagctcggtgctgctgacattgtcaaagtagtaggtgatgttgttcatgtacttgggcgtacgaggcccctccacaccatcaaactttcggtagccaaactggtagtcaaaatgggttcgagtgccaccccggccgcgtccccggccgcgaccacgcccccgtccacggccacggaaggaagcccgcgccccaccagccccatcactcttcacactagatgtctcatcctggtcgtgccaggcaggctccggtttgatctctggttgccaggctggggtggggggggccacgggcacgtaggtggcagactcagaccctttgatctctccgcgattggcaggtatgtgtctaggctccggtgggcgagtggggcgtgaagccagtttctctctgggcacttcaggcttcatgtctatttgtaatggaacccacttgtgtttgtttcctttcttcttctgcccgcctcgctggcaatcctcatctccattcttttcctcccctgattcatctgatttggtttttggactctccttactatcactcccttctcctttctcctgttccttcatgtccttcttgggtggcagtttacgggtaggctgaggcttgtgggactgtggctgaacactcttgtgggctatctctccaggtgtgggccaattgattgcatctccaaagtcaccaaccttgctgcctttgcgctgtttaggaacagctgccctcaccaccttggctggagcagagtgttctgggggggactgtccgttcaacggtnangactggtcaggaccggcggcaatgcgttcttagtccacgggttcaccttggctagcagagcgcccgcgacgccttcctccggggcgctgggccccagtccctgcagagaagggtcggggttcacgcgaggtgcggccccctcccagttagatgcagccgccgtaaatccgaggcccactagcggggcggggggggaggaaggccccccactctgcagtccaggcctcctaggcgtgcgtccccccccgcccgttcctcgcaagacgcccccaccccgagcccggcaggcttctagtcccgtccctccctcccccccgcccccggggcggcccgggcttcccggctcgggggctgcagcaatatggacggacgggggagaggcgcggcgagccaagcagaccacgcgatccgcggc

SEQ ID NO: 65752 - DNA, 716 bp, Homo sapiens
gggactgctgtttttggccgtttgatcagaaaagatgggtggtgtgtatccaacaccggaaacggctccagcggaatcgacttaccaaagagcaactgaaacagattcctacacatgactatcagaagggagaccagtatgatgtctgtgccatttgcctggatgaatatgaggatggggacaagctgcgggtactcccctgtgctcatgcctaccacagccgctgcgtggacccctggctcactcagacccggaagacctgccccatttgcaagcagcctgttcatcggggtcctggggacgaagaccaagaggaagaaactcaagggcaagaggagggtgatgaaggggagccaagggaccaccctgcctcagaaaggaccccacttttgggttctagccccactcttcccacctcctttggttccttagccccagctccccttgtttttcctgggccttcaacagatcccccactgtcccctccctcttcccctgttatcctggtctaataaccccccacacatacacctctggtgacctatttgcacagaccgtcgtcttccctccagtcttctgagggataggggacattccatcccaagcttctcccttacccacacctatccttttgaggggctttggggtggggctggggcaagcagagggactgggtcttcacttcttgggctaataaaattgtttctttgtggact

SEQ ID NO: 65753 - DNA, 2934 bp, Homo sapiens
gtcgacccacgcgtccgaaggggtactagcttatgacctggtagtccacttgtgttcctatgtgcaagagaaatgagcacatatgagtataaaaaggcatgcacaagaatattcacagcagttttattcataatattcaaaatctgaagaaaaagcaagcctagtattcgagcaagaaagattcaagaagagaaaatgaggaagcaaatgcagaaggaggagtactggcgaagacgagaagaagaggagcgttggagaatggaaatgagacgttatgaagaggacatgtactggaggagaatggaggaagaacaacatcattgggatgatcgccgccgaatgccagatggaggttatcctcatggtcctccaggcccattaggccttctgggagtccgaccaggcatgcctcctcagcctcaggggcctgcacccttacgtcgtcctgactcatctgatgaccgttatgtaatgacaaaacatgccaccatttatccaactgaagaggagttacaggcagttcagaaaattgtttctattactgaacgtgctttaaaactcgtttcagacagtttgtctgaacatgagaagaacaagaacaaagagggagatgataagaaagagggaggtaaagacagagctttgaaaggagttttgcgagtgggagtattggcaaaaggattacttctccgaggagatagaaatgtcaaccttgttttgctgtgctcagagaaaccttcaaagacattattaagccgtattgcagaaaacctacccaaacagcttgctgttataagccctgagaagtatgacataaaatgtgctgtatctgaagcggcaataattttgaattcatgtgtggaacccaaaatgcaagtcactatcacactgacatctccaattattcgagaagagaacatgagggaaggagatgtaacctcgggtatggtgaaagacccaccggacgtcttggacaggcaaaaatgccttgacgctctggctgctctacgccacgctaagtggttccaggctagagctaatggtctgcagtcctgtgtgattatcatacgcattcttcgagacctctgtcagcgagttccaacttggtctgattttccaagctgggctatggagttactagtagagaaagcaatcagcagtgcttctagccctcagagccctggggatgcactgagaagagtttttgaatgcatttcttcagggattattcttaaaggtagtcctggacttctggatccttgtgaaaaggatccctttgataccttggcaacaatgactgaccagcagcgtgaagacatcacatccagtgcacagtttgcattgagactccttgcattccgccagatacacaaagttctaggcatggatccattaccgcaaatgagccaacgttttaacatccacaacaacaggaaacgaagaagagatagtgatggagttgatggatttgaagctgaggggaaaaaagacaaaaaagattatgataacttttaaaaagtgtctgtaaatcttcagtgttaaaaaaacagatgcccatttgttggctgtttttcattcataataatgtctacattgaaaaatttatcaagaatttaaaggatttcatggaagaaccaagtttttctatgatattaaaaaatgtacagtgttaggtattatttgaatggaaagacacccaaaaaaaaaaatgtgctccgactagggggaaaacagtagttccgattttttcccattatttttattttattttctggttgccctagcttccccccctatttttgggtcttttattaactagtgcattgtcttattaaatcttcactgtatttaatgcaggatgtgtgcttcagttgctctgtgtattttgatattttaatttagaggttttgtttgctttttgacactagttgtaagttactttgttatagatggtatcctttaccccttcttaatattttacagcagtacgtttttttgtaacgtgagactgcagagtttgtttttctatatgtgaaggattacaacacaaaaagttatcctgccattcgagtgctcagaactgaatgtttctgcagatcttgtggcatttgtctctagtgtgatatataaaggtgtaattaagacagagttctgttaatctaatcaagtttgctgttagttgtgcattagcagtataaaagctaatatatactatatggtcttgcaacagttttaaagcctctgcataattgataataaaaatgcatgacattcttgtttttaatagacttttaaaatcataattttaggtttaacacgtagatctttgtacagttgactttttgacatagcaaggccaaaaataactttctgaatatttttttcttgtgtataagtggaaagggcatttttcacatataagtgggctaaccaatattttcaaaagaacttcatcattgtacaactaacaacagtaactagcccttaattatggtgacagttccttattggtgtgtgtgagattactctagcaactattacagtataacacagatgatcttctccacacaccccatcacccagataatttacagttctgttaacagtgaggttgataaagtattactgataaaaaattatctaaggaaaaaaacagaaaattatttggtgtggccatcttacctgcttatgtctcctacacaaagctaaatattctagcagtgatgtaatgaaaaattacatcttactgttgatatatgtatgctctggtacacagatgtcattttgttgtcacagcactacagtgaaatacacaaaaaatgaaattcatataatgacttaaatgtattatatgttagaattgacaacataaactacttttgctttgaaatgatgtatgcttcagtaaaatcatattcaaatttaaaaaaaaaa

SEQ ID NO: 65754 - DNA, 337 bp, Homo sapiens
cgcagggtttaacaaggccctgcatccttaggttattaatgatggcttctagttgtttcctagcttctggttttaggggatattgtctttaattagggaaggagatgagatccctgagatggatttggactggtgagactgttgtagctcagccagtattttcctgaattgcccaaacatctggattaatatcagtctccaccagagggaggcaaagagtctgtcctggagccataaggatggtggttcccatgtgagctaaaatatccctacctcagaggagtcgggctttcaggtatgattaaaaaggcataggtaaacgaaaggtctccctagg

SEQ ID NO: 65755 - DNA, 1169 bp, Homo sapiens
aactggaagagcaggtgaagaggctccttgggtgggcacccctggcgtcctcccatgagggcagcctcacaggggtgtctgcctgtgagttttgttacagggcctcaccaagagagggcctatggaggccgaggaccagggggagcttttcctgcacctccggtcagtggcacgtgccccccagaccttatctatgcaccgactccagagaaagctgaaggaggcagccagaaaaatcatcagcctccgcctggagaaagagcagctcatcgagatggggaacaggctccgtgcagagctgggccgacccgaaaggtggctgttgcaccacgccctccctcctgcccctgaggcccggaagccaggcgaggagcccaggaggcctttggatcgcagcccacctttgggacaggtgcagccccattttacatctcaggacgccaagagtgccgaggatgaggctccttccagacacttgggaaagcaccagccccgctcagcacaggtgggcagcagacttgacgccctgcaaggcccgaagacacaacacagcatccacacggtgacctgtaaatcacctcggcagaaagaagacaggtccccaaagccaccccaggctcccaagcaccctgaggagcatggtcgccaatcccacagctcctcctcctttgccagtggcaccctccaggacatgtggaggttgctagacctgggatccagcccttctggtgtcacctcccagggtgactcaactccagagctcccagctcctccagcagccgacaggaggcccgtcaagatgcaggcaggcattgccaccccagggatgaagacagcagcccaggcaaaggccaagaccacaggagcctcccggtctcatcctgcaaaagctaaaggctgccagaggccccccaagatccgtaactacaacattatggactgacttcctccccccaccccgccccactaaggggtgctcggggcctccgcatggtgcctgtgctttcacctacgtgttgtgggggggtgtgggcacagcgtgcagggtggaggcagggagctgcagggcaggctcccaaatgctgctgaggcgaccctgctgactgaaggcctccctgagcacagggcccattaaaaccaggttcctccctggggaaaaaaaaaaaaaa

SEQ ID NO: 65756 - DNA, 2290 bp, Homo sapiens
ttttttttttttaagattccagctttttttattttttccccttttacacaaaacaaagtagaagaaataatacaggattaaaactgcaaaagtagttaatcagtagaatatgtatgcacacaaaaaatccagataggaagacaggcttatttacaatgaaagtaaggtaaaattaacgtagttttcttatgaaataataaaaaaaaatcaaacatatgctacaatgggcaccactgttcacagcaatattaaagaggagaaaacaacacttatttaatagggacagatataccacaaggtacaacatcagtgcaataaattcacaaaactatattacagctagttaatcagtttaagaattgttcccgtcagtcacattttttggccctcagaagttcattcctaaagatttcaactactctaaatttctagctaccaagaagttaagaatgattataagaagctttccaaggagttatgaaatctttgtagaccagaggccaactatcatcacctcaagtctgctctcaccaacagcccttgtatttttcagggagaaatctctaggaaaaaagtcagacaccagtgtagtcactatctcccatgtcaaacctaggggactaaaatggtcagtattaccataaaatgataattttgaggtttaccttaaaaggcttattctggtctcaaaaattagataagattatcttctactgaaatgaatattgactaaacatagaagactgctgtccttttgccagtcttagagtgaaagtcatagacatgagtcttaacctactgtatactatagctaatgtcagctgaaaatctgaaattaaaagcatgctagaaatcctaaatgcaatcttttggaagtctgctattaaaaagcctttaaggatttactaacttcgagtctaagtgcaaggggacgaaagcttaagcctgtcagacattccttttcttggacaaaaagatcaaagtttcctacaaattgctaagctttgcacaagggagaagcctacatgtactagtgcatggaatcagtttcatcttatttcatggggactcttctcccactggaaagaaacagaatgaggaatgaatcttaattggtctcttcatcagaagtggtaaacttggtctctatattcacgaagtcagacagttttttaagcagactgtggaagcagacagaaccagcttcctgtagccacagaccactacatggtatctaagctaaagcaaagatgaacaattatccagattcacttgaactgtactaaagggcaaggttcaccactacaaaaaggaagttgtctaaaagcaagaattcaattaacgctgggtaagaaaagtcaaaacactaatgagttgtccatgaagccaactgctaagaacgcgctcaactatacgcgacatgaagacactatgcacgaagccttacttggcgagtctgaatttctattaactaagggcagagtgagggagaacaaagagctacttccgtaacattttagtatccagatagtacagcagaaacggttcccggggcaatgggtgctgcattaatcacactgattaaagcagatgaatcattcggtttttcttttctttttgtttgagaagtttgtttatctccctcttggccattcccaatgtacttcaaaatgattcccatgttgggtttaggtccagggaagcaataagtaaggaagtcactatcaggtaggtgaagaagcaggttgtggacttgttgtcccacccaagcaaaccgcagcaagggaaacgatcatggtcatgaagtacatcttaggtttttcttcctttagtgtgaaagagccgtttccacccaacccacagctctgcgtccgagtttttactagattgctgcaaatttcatggaatctttgctgttgttccagtggtccatttattggagcccaaaaattctaggcgctagaatggggaacaaggtagtcagccaagccacaaaaacataacaaaacaggaaacgccggacagaacagatggatctagatagtagataatcagaaacaccaaagaaaccacacccatgatggcaggtggaaaccaggctctttcccatcggaggactttatcagccatcagcatcacttctccccatccttgcagctgttcttccagacttgcagtctctgcagccagcaggttggtgctgcgattatctccctccgccatcgtctcggggatgcagtctctacaagcgcaggccacctccgcaacgagtcctccactcgtgccgaat

SEQ ID NO: 65757 - DNA, 3740 bp, Homo sapiens
aatgagttaaaagaaatttgtgaattgaccggcattgatcaatcagttctagaacgagcattcagtttccgaacagttgaggccaaacaggagaaagtttcaactacactgaatgtggctcaggcttattatgcccgtgatgctctggctaaaaacctctacagcaggttgttttcatggttggtaaatcgaatcaatgaaagcattaaggcacaaacaaaagtgagaaagaaggtcatgggtgttctggacatttatggctttgagattttcgaggacaacagctttgagcagttcattattaattattgtaacgaaaagctgcaacaaatcttcattgaacttactcttaaagaagagcaggaggagtatatacgggaggatatagaatggactcacattgactacttcaataatgctatcatttgtgacctaatagaaaataacacaaatggaatcctggccatgctggatgaagagtgcctcaaacctggcacagtcactgatgagaccttcttagaaaagctgaaccaagtatgtgccacccaccagcattttgaaagcaggatgagcaagtgctctcggttcctcaatgacacgtctctgcctcacagctgcttcaggatccagcattatgctggaaaggtgctgtaccaggtggaaggattcgttgacaaaaacaatgaccttctctatcgagacctgtcccaagccatgtggaaggccagccatgccctcatcaagtctttgttccccgaagggaatcccgccaagatcaacctgaaaaggcctcctacagcaggctcacagttcaaggcatccgtggccactctgatgaaaaacctacagaccaagaacccaaactatattaggtgtatcaaaccgaatgataaaaaagcagcacacatcttcaacgaggctctagtgtggcatcagatcaggtacctggggcttttggagaacgtccgagtgcggagggcaggctacgccttcaggcaggcctatgaaccttgcctagaaagatacaaaatgctttgtaaacaaacatggcctcattggaaaggaccagccaggtctggtgtggaggtcctatttaatgaattagaaattcccgtggaagaatactcctttggtagatcaaagatattcatccgaaacccaagaacattattcaaattagaagacctgaggaagcaacgcctggaggacttggccactctcattcagaagatatatcgggggtggaaatgccgcacacacttcctgctaatgaaaaaaagccaaattgtgattgccgcctggtacaggagatatgcgcaacaaaagaggtaccagcagacaaagagttccgccttagtaattcagtcttatatccggggttggaaggctcgaaaaattctgcgggaactgaagcatcaaaagcgctgtaaggaagcagtcacgaccattgctgcatattggcatgggacccaggtacgtagagaatacaggaaattcttcagagccaatgctggaaagaaaatctatgagtttacgcttcagagaattgtgcaaaaatacttcttggaaatgaaaaataagatgccttccttatctccaatagacaagaattggccctcaagaccttacttattcttggattctactcacaaggagctaaaaaggattttccacttgtggaggtgtaaaaaatacagggaccaattcacagaccagcagaaacttatttatgaagagaaactagaagccagtgaactcttcaaagacaagaaggctttatacccatctagtgttgggcaaccattccaaggggcttacctggaaatcaacaagaaccccaagtataagaaactcaaagatgccattgaagaaaagatcatcattgctgaagtcgtgaacaaaattaaccgtgctaatgggaagagtacatctcggattttcctcttaacaaacaataatctccttcttgctgaccaaaagtctggacaaatcaagtcagaggttccactggtggatgtgaccaaggtatcaatgagctcacaaaatgatggcttcttcgccgtccacctcaaagagggctcagaagcagctagtaaaggagactttctcttcagcagtgatcacctgattgaaatggccaccaagctctatcgcacaactctcagccaaaccaaacagaagctcaatattgagatttccgatgagttcctggtacagttcagacaggacaaagtatgtgtgaagtttattcagggaaaccagaaaaatgggagtgtcccaacatgtaaacgaaaaaacaaccgtctccttgaagttgctgtcccttaactggcgcctcctctctactttcatggacttgttcctttgtaatagtgcaatttggttttgttttatttggggttcattgtatgtttgggaatcaccaaaggcttttagagttctttggcaaaataaaaatatttgactaatcaatttttattattggaatagttttaacctttcaaatacatgttctgtcctggagcaggattgtagaaactaacagtgtctattttcatgtctgatgtgttcttcctttagtcatcatgttaggtctgtgtaccctaaatcagcatattactcataaatcattaattaatataagcataggaaatggtcttaaaagatactgcattcattcatcagatatttattccatgcctactctatgctaggcactgtgctagatggtatgaaaacttattaggaacctttttgtttttgagaccattgcattctggctggtttgtgctggtttaacgacatctaagaaggtttagaaatggtgagaccaaaacaataactgttaatgatggacagcattattaggaaccctgtagtatgatatttaacaatataggcttcaagaagggctggtcctaagagggggcagaaatgaatgaccaggttaaatccctctacatgtggtttctgtttgaaaaaaagaaaactgacatttgaacaggacttttaatttgtttaaaactctggtaattacttgtaacagtagaaaatagaagtcattcttattttagaaaaagtgacagaagcagtccagtaagattatatgtttctgtttctggtaaataccatatatgatcctcgaaatgataatatctccagaatattgttttcacccaaatttgagtagatattttaaacacctaacaaagtaaagggctaaaagccattcagatagcagtaaaacattctgtatgatgtgcaataaaacatccaagatcttttttgaaagttttatttataatatacatttttgtatgagaaaggtgattggtacagggtgcctattttagtcatggatcaaaatttgtgtaacttgcagggctttctttctttttcttcaaatttacaagggttcattttggaaactacattttaaactttggaatcaaattgtttcttatttgggaggataatgtatatacattggtattatgttaaataataaaattgttctaatttggtgccattttcctgaatcacaactgtatttttgtatctcaagctattttcatatgttatgtgtcaatgtatcatctctcagaaaggttttacaatccaaacattatatgttctctgtgtaactgaatttcacttatcttttataaaccagaaacattaattgaaaatattttctggggattttctcttgacttgtatttttaaaaattgctcacata

SEQ ID NO: 65758 - DNA, 2331 bp, Homo sapiens
ttttttttttttctaggtccaatggtagtttttattccccaggaacaaagataatgtggagaagaaactccaaaaggaaacagagcacggatgacagaaatgacaccacggcagcctggctcaggagtcaggtagatagatggctgctccacagtggacctggtcatggccctggtttcttggatccacatttgccccgtctcttaagtgtccatctcagaggtggaggatggagacagtgaggtggaaaacgtgcttgctctacacaaagacaaatggatcttctattcccagaggaccagggacaccaaaacctccctcttcagaatggaggtagacagataaaaatgagaggggcttgagtgtcacagacaatctgaaagtaataataggggctcactgtggctggcagaactggtactgaaatggggactacaggggaagcagcttccagttttatggtggagagtcagtcctgaatcaggccctggggcaattataaccagagtgctgtttctagccacttacttcaaaggactatggctatgttgaatcagaagccattatctttttcccagaggatgcacttccatccctatttctggcatgatcctgctccctacgagcctgatcctttaaaaaacagattggcaagcgacgagaaaaacggtgcctcacatgcttgagatgtgacagcttctcctgcaggcaagaacctctcagaacaaggtcctttggtatgagctagatcatccaggcctgtccctgcagaacacaccaagactcatccctgtactacagggtggcctctggctatggcctggcacagtgaggacagaggcggggtcctgagtcaacatcacagggaggtctcctggaggatgcaggtggagctgctcccctgataggctgtgccatccagggccatggcctccttgtctctgctgtcccccagcacaccattcctcggcttctcaggaaacaggccagtgtcgaggtggtcctggccgtagctcctgcagtggagccgcttctgacaggacaacggaaggagggacaggagctttggcaacactgggtaaatggttgcagggttcagggaccggcctcgcattctccctgaatggaaatgtgcttctgagtctctgggtggaaccatccacagcagcgggccccatgtcctcccttggcccccagagaccccagcccccacccacctcctacatcccagcagaaaagcctgacagctacggacacccaaggagctcagagggcaggagcctttctccctaggagtccccttagggccctcttgttaaacccctccggtgcttcatctgcaccgcaatccccacacccttaccaagtgaagtagactgacaaatcaggccccaccacaaatcactgtggtggagttgtgagcactgtaccataagtaagacaaggaatagaaccgctgcagccctgtgggcctgggaagagcagaggtgagaacaattagcaattcgttggcagggcgattccttgggcaccaatctctacttgcccgcatggtcccagggtcttgggacccaatacccaacatttccctggggcctctggtggcccatcccttagcaagacccctgtgaaagccctcaaaggaggactttgagaaaacaagaagatagcaagccctgccttacttggagaaggtagtcaagggcatcagtgtggtcacagtggcaacggttagattggtgggcagggagaagctggacccattagagggagagggtggcatgctgaagcccatgctggtcacgatgctcccgatgccaatccagaaggccatgacgagcccagccaacaggcccacaacagcaccctgccgagacacagtgcaggcctgtcacaaggccagtcctgccagccctcacggcagtcctcagctctcctggtgacagccctgccaacccccaggtccatcctgctacacatgactgtggatccagatgcatcactcacaggagggttagcacatggaaagaacattccaaggcagaagagtcccagcagcggtcccccaaccatgccaaagatgctgattgctgcctgcagcacaggtcccatctgggaggaaatataggccattcctagacaaagcagcccatagccaaaggctgggggaaaaggacaggagaggaaacaagaaggtgtgagttaacacaagcaatggggtaaagcaaggctccctgcccagccaaactaccacctctgtctctctggaaacaaaaggcatattacatcacgccccagcttcctcccaccaagtcctcactcctatgtgac

SEQ ID NO: 65759 - DNA, 559 bp, Homo sapiens
aactggaagagcctacaatgttccccagcatgctgttggcattgttgtaaacaaacaagttaagggcaagattcctgccaagagaattaacgtgggtattaagcactttaagcactctacaagctaagagaatttcctgaaacgcatgaaggaaaatgatcagaaaaagaaggaagccaaagagaaagttacctggattcaactgaagcaccagtcagctccacccagagaagacaatgtgagagaaccaatgggaaggagcctgagttgctggaaccacttccctatgaattcatgcataatacatatatacacatatatgtgtgtgtacatatacatatatacatatgtgtgtatatatatgtatatatatgacctctggactgtaaaaaaaaagtaataaaatgtaagaaacctggtaatatgacctcaggtaggcatcaaggaaacatcaaccggggaaggtatgctggaagtagacccttgaaatggtgatgaaatggacttccacgggtgaatttatgaagggacggatacttctctttcctttgaggttctg

SEQ ID NO: 65760 - DNA, 850 bp, Homo sapiens
  misc_feature (1)...(850): n = a,t,c or g
agcagtccaaggttgctgtactttctggagtcagtactcccgaataaatagcgtgaatgttcccagtcctgcttgcaagcataagctaccagtgagcttgtttcaggctgtgagaatggataaggacagatggaagcaatggtgttcttctcagctggaacccgatgtggtccgtgtgcagcctgacactcgaaactcattcatcttcctttctaagtcctttcacatggagtccaacccttgggcagaaccccagattttcttcagtacttcacatgttctctcgttggcctgttccagatccctcttcatgttgcagcacaccaaggctttggattcctccagcactattcgattacatgagacaagcttcttgatctgagccaccaatttcctgagtgaaggtccaggacccaaacagctgggagagaaggccgttgccaaatgccttctgtgtgatcagtttcaacccactgagcatcgtctcgcttgcagctggtcgtcccatgatttcggaaacgtaatggtaaatcagctgtctggaatctgctcagaggtagaagaggttgttggaaaccaagtcttttgattagcctaaaccatatcataaaggggcaatacggatgctcctagtcgaatggctgggatagtgactgcttcaataatattcagtttgagtgaaatgatagccttcacgaagttcctcccatccaagtactgaagaggccgtaccctgggcgcaatctcgtgtactctgtacttcagtgaccagatgagattggagcgttcactgtgctatggccgtagattatgtacgacgtttctggtagcttctcttctgccattntaa

SEQ ID NO: 65761 - DNA, 559 bp, Homo sapiens
ggaagcataagaatgaagatgataaccgagccagtgagagcaagaaacccaaaacggaggacaagaattcagcaggccataagccatccagcaacagagagtcatctaagcagagtgctgcaaaagaaaaggatttgttgccttctcccgctgggcctgttccttcaaaagatccaaaaacagagcatggctctcggaagaggactattagtcagtcttcttccttaaagtcaagcagtaacagcaacaaggagacgagtggcagcagcaaaaacagttcctccacatcaaagcagaagaagaccgaagggaagacttccagtagctccaaggaggttaaggtaaaggctccaagtagctcctctaactgtcctccatctgcaccaactcttgattcttctaagcctcggagaacaaagcttgtctttgatgacagaaattattcagcagaccattatttacaagaagcaaaaaagctaaagcacaatgcagatgcattgtctgataggtttgagaaagctgtatactatcttgatgctgtggtatctttcattgaatg

SEQ ID NO: 65762 - DNA, 2285 bp, Homo sapiens
cgccttgtaaagaaacgagttgagtgtaggcagtgtgggaaggccggcaggaaccagtcaacgctgaagacgcacatgcgaagccacacgggggagaaaccgtacgaatgcgatcactgtggtaaggccttcagcataggctccaacctgaatgtgcacaggcggatccacaccggggagaagccctacgaatgccttgtctgcggggaagccttcagcgaccactcatccctcaggagccacgtgaaaactcaccggggagagaagctctttgtgtcatccgtgtggaaaaggctccagtgagcgcgcctgctttagagacacaggatgattcagaccggaaacagacctcgtgggtgtaagaggaagcctctgtgagctcgcaccttactgggtgcaaaagaatccacggaacttgggagaagtccagttcctgtaaaaactgggaagacgaggcgttctcatcccataggaggtttgtgagaactcacgccgggggtgaaaatgtacgtctgtagcatggagaagccttcagggtacattcagctcttaacaaacacaggaggacttaatggcagcttggcatttaatgtcaaaatccaagccgtggcatttaatgtcaaaatgacttcagaccacttctagccttctgggcccatgagtaataatgagcacactagggagcatctctgtaaacacagtggctggggaaacccttcctagtctcacttgattcctcatgacggaaatcacactaaagagagaaatcagtgaagtaaggaacgtggaaggtcatgaatgggccgcaaaccacggccagctgcttgtctttgtatggcttgccagctaacaatagtggttccatctttaaggaagaagaatgtttgatggagaaaatttgtggccaatgaagtctgaaatacttcctgtcatctgcccctttccagaaaaacttggccgacccttggtctacagcacgggttctcagtcgggcgacgatttggctgtgtaggcgtcatttggcaatgtctagagacatttttggtagttagaatggggggaagatactcctgacttgtaataagaagacatcagagatgctgctaagtcggctccagcacacaggagccccccacaacgaagagttagtgcccccaaacgtcactgttgctgaggttgaaaataatcatgcagtcattcctcaattactgcctccagcaattcctccatttttatgaatcttgtgagcacttacgctaggagaaatttcttttacaaaacttttaaaatacagttagtgctgataattcctatgtggaaatgattccagccatggtcccctcacttgagcatgtgaatattctcacggagagaagccccagcgagattttccggtgaatacgggattgcacttactctttcatcacggaaacagacccccgagagaagccccaacgagattttccggtgaatacgggactgcacgtactctatcatcatgaaaacagagccccgttcataaatttttcatctttatttttaaggttatactcctctaaataacccttaagcctcatcaagaaaggtttgtttatagtatttttactatagcttcatccttgataacgtcctaatttccttctggacaacctccttgaccaatggcatattgagatctatgtgacatgaggatatttctcagtaccactttgttactggtacctgatgcacacggattgcgaccagagcatgatgcctccatcaagtggtaatatgtttgcagcctgctgtccagccaagagtgacagatacttctagtgacttccccggtatccactctcatcttcttccaatatcaagagaatccaggttctgtcagattagtaaggtgtgctaatctaaattttaaaaaatctcttacaggttttcttgcagctggtaccatccatgtctcacagccctggccactgacagatcagcagatgtcaccacatgggcttctgagaaagctcttgaatggggatcgttcttaaacatgaattcctccctgtatgttttgttctttgctttacttttcaccttgcaaagagatccagtacctagtattggaagatccaccttaacgaccgtgcatatgaaaaccacagtctaaggaagtgactgcagaaagctcacagcgaccctggcctcccctgtggcctctttgagtgtctgcagcagccctggacttccagacttctatcacatgagaaaaaataaaactgattattggtttaaaaaaaaaa

SEQ ID NO: 65763 - DNA, 3868 bp, Homo sapiens
ttttttttttttctcattaacaaagcagtcaattccctttatttttaaaattttatgtacacatatgaatgatctgtataatgtacattcaatatagagaagctttatatatgtgatagttgtagagaacatttcagaatgatactcatcttttacatgacatcttgacatccatttttaaatttgttttgcacaagctccttgtcattcaatttggtaaaagccagttatacatactaatgtgtactgtgagcctttcagaagggttaatgattgagggatgccagtgaaggggtgcaggggacaaaacctaataggtcttgggatgggtggggggggagggatgggccacggcaggactttggatgcagggagagggggaaaatattctttcccggggggaaaagtgacttagcccaatttttgttgactgtagctcaaccctacagtcatgcctagttcaaaaaaaaaattccaaaactaggaagaaagttttgtctttttgattcacagttttgtaaacagatataaaggaacaaatgtgcttacatacaccaagaaaaaaaaaattcttgtgtacccacttatgttgatccacagagtgctttcttataatgtgatacaattaggatcactgactttttttcctaaaaatatatttatagaaaaaggaataacactgtcatgaaaccaggagaaaggcagtaagagtttgcttcaacgtatcagctggaggaatgtggacttggcactggcctttcagcgtttattgtctctcgtgaatatttcaagtctgatagccaaggtcgcctgcctcatggtctacaggaggtggcaggttagacatgactgatgtagatgtacctgcggtaaggtagccagcaactccaggtcctgtgaggtatcctgctgtttgtgactcagaaatgaacaaatcatgtttctgatctttgaaggcactccagactgaagaacggcacaggatttcattcacctgttctccatactgcaaacttcgagtcattgccttgagagctttaacaatctgagccttagtggctgctgggctgtccaggttttcaaggccaatgccttcgagtaattttaagaggtatggaaccaaatctgctttcagggcttgtgctactaattcactctgctccttctgaaacattcgattaattgcttcacaggctagaccaacagtatctgctcgctttttcattccattcatcagtgggccaatggtctctaaagatgccatggctcgaacacacagctcattttcagacaaggcatggataacccgaatggcactcttaggaatggcattgttcctatgattcattgcctggataactttgggaagatggcccaatggcgggacctgatctgccagctgaggttgtgcgctgaagagacacactgttgccattgtcaaggtttccagagtttctccatgaggattgttcttctctaggagctcagttaatttttctaacagggcaataagaaattctctaggctttcttagaacccaggctggttgtgcaataaagatcctcaagaagactcctccaacagcaagttccccctctgcttctccaaacaccacagcaaaatcttcaggcaacttccagtttgcctcagggttgtcctgctgatttttaaagtgctctagcatcatttccctaactgttgtggacactttatctctggaattatcattccaaattaactcaggattttcatgagttccttcaaaaaatatgtacagcagcttcaggattgtctctcatagcatcccatgaaaacgcttggtagaaatttcattaacggtaattcgaacctttggacctatcagtttatctgctgtcattttggcaaaaagttctgctgtttgggctcgaacctgtggatgtgttgaattgcagaacatatccagtaaatggaatcaaagcaccctttgccattgcttctttgattaatttttgtactcggatgtccaaagcataaagagtttcccagaaccaagctgaccgacttgatggcaatgaatgtagaagagccaataaactggacaaaacccattgattcagcaatattgttgacacagtcttggttagatgtcactatattcacaacctcttaaagccaacctgctgtacttgaccagctccatgaaacgcggagaagagaaaatatcaacttaaagtgcccaatgcattcactctcagaacctggattgtattttatgacatttctcagagcctccaaagccatttctactctcggtaagcgatctccatgttgctctgactccacttttgccgcgtgtgtgatggccatgaatgtgtgcaagtattgggcctgcgagcctatataatccaagagacttgcagcaaatgcttttggatcctccagttggaaagtaggaacttcattatacaccctaacaaaaatctcccctacaataagttatttggcatgatcactgtagacaaattctgatccataagttttgtcacaatcaccttttttaatcatgttttcttgttgggattcaagaaattcaagtaattctgctcttgtagaattgttccatatcaaatatggactttctgtgttgctgttaagcatcttcaaaatctcagtcacactagccacagcaagttttctagcaacatagggtgtcagcatgccagctaagcttttccttatggttggattttctggagttgcttgttcttcagccaaataccctccaaggcgactcagagcatggacactcagtttggcaaggctgtttgctacctcctgctggtttgtttcttcacttttctgaatgccactctcttctagtgtgtagtcataattaaacagaaaaccaaggagataccacaaaattccagcctgaaataggtgtgtctgtagccagaaatccacagcaaaagaactgacacattctaccccaagagcagctacgcggggaatactcttgccaaaatatagtacccgacagagatccttgatgatgctaggcatttccgtgatcttctctcggcattcctcaaactgagcagccacactgtagcatttacttatgtatccacacacctgtactgacatgtcacttggtttactagaacgagtcaagacagccacacagcgactaaatgcctcttgtaacacctctagtccattctctcttctgagctcttcagcattgagggctgaacagttgacagtatggaaagctagctctgtagccgcaggcaacaatggtgattcttttgagaaaaggaggtcatctgaagtttccattgttatagtccgaataagcatggggtatcctgcatatttataaggctgtaaatcttctttatgacggttgaagaggatgctctgtgtttttagaattaaaattatattctctggatctggcccatccactatttttgctgatttggtacataaaaattcatatgctttatttactttttcaaacatgtccctcccttctggattcttatcagggtggtacttttgtgcaagtctgaagtaagctttcctaatcttgctctcatcatgcggtccctgtccttgaggcagattaagcacttcataagcatcatctattgacatcataggtggcttcttttctacttctttcttccaggcatcaagggtatcttttagaagcttaaccgggtctttaattggccaatctggaaaccggagtgtatcacacagttgtttgaggtaataaatattacaaaatagttcattttcgagttgtggatagttgattataggaatggggcaatactgataaagtgctcttgtgttactctgaagacgaggtgtg

SEQ ID NO: 65764 - DNA, 3050 bp, Homo sapiens
gcggcggcggcggtggcagcaactgcaaccccaacctggcggccgcgagcaacggcagcagcagcagcagtagcagcagcagcagcagcagcagtagtagcagcagcagcagtagcagcagcagctgcggccccctccccgggaaacccgtgtactcaaccccgtccccagtggaaaacacccctcagaataatgagtgcaaaatggtggatctgaggggggccaaagtggcttccttcacggtggagggctgcgagctgatctgcctgccccaggctttcgacctgttcctgaagcacttggtggggggcttgcatacggtctacaccaagctgaagcggctggagatcacgccggtggtgtgcaatgtggaacaagttcgcatcctgaggggactgggcgccatccagccaggagtgaaccgctgcaaactcatctccaggaaggacttcgagaccctctacaatgactgcaccaacgcaagttctagacctggaaggcctcctaagaggactcaaagtgtcacctccccagagaactctcacatcatgccgcattctgtccctggtctcatgtctcctgggataattccaccaacaggtctgacagcagccgctgcagcagctgctgctgctaccaatgcagctattgctgaagcaatgaaggtgaaaaaaatcaaattagaagccatgagcaactatcatgccagtaataaccaacatggagcagactctgaaaacggggacatgaattcaagtgtcggactggaacttccttttatgatgatgccccaccctctaattcctgtcagcctacctccagcatctgtcaccatggcaatgagccagatgaaccacctcagcaccattgcaaatatggcagcagcagcacaagttcagagtcccccatccagagttgagacatcagttattaaggagcgtgttcctgatagcccctcacctgccccctctctggaggaggggagaaggcctggcagtcacccatcatcacatcgcagcagcagcgtgtccagctcccctgctcggactgagagctcttctgacagaatcccggtccatcagaatgggttgtccatgaaccagatgctgatgggcttatcaccaaatgtacttcctgggcccaaagagggagatttggccggtcatgacatgggacatgagtcaaaaaggatgcatattgaaaaagatgagaccccgctttctacaccaaccgcaagagacagccttgacaaactctctctaactgggcatggacaaccactgcctccaggttttccatctccttttctgtttcctgatggactgtcttccatcgagactcttctgactaacatacaggggctgttgaaagttgccatagataatgccagagctcaagagaaacaggtccaactggaaaaaactgagctgaagatggattttttaagggaaagagaattaagggaaacacttgagaagcagttggctatggaacaaaagaattggagccatagttcaaaagaggctaaagaaaggagaagaaggcaaagagaaaattgccaggaagcacttgagtttgagacggaaacggccgtgaacaagcagraacagacgctaagacaggcagcttcaacagatagtctcagggtcttaaatgactctctgacccacagagatacgaggctgaacgcagtggcggctagaacagatgctgaaaggacaatacaagatggaagactgtatttgaaaactactgtcatgtactgaatctttcctgttgaagaaatccatgttatagaaaagaactttgcagtcagacattcgtcatgggaaagttcagaaaaaaataaagtccttttaagggaacttcctgaattttgtgtattaatgttctttaaaagtttaagtattctacaaaaaaaaaaaaaagttttctccattgattttcacctgtggttcataccagagacctgaggaatgtttgtaaatgtacaagtatcaaagttcttacagttaattactggcaacttgctgctggacaattgtatacagagttaaaggcaggtctgaataagacctagctttgtttttttctaatggaatgaaccattttcctcttctgaaaattctgtatctgagcacatcaagagactcttgtagcagtggttacccagacttaccagaattatgccccccccagaaacccagcaagaacacttggaatgaacgaatgaacttgtaggggggcatagaggattccttgaaaaaaaaaaatgcaagagtgattttctgttacattcaatttcaaactctctaattgtgggttttctcctgaagaattttttttcacatactttccaaaagaccaacaaatggatgttgacaacaacccaatgaaataacattttgcatatctgaaaagaagcattgaatataagccaaaagctttcactgaaggtttttttttcttaaaaataaaaaaaaatatataaatgtaacatgttttcattccaaactggtagtggtatatagaattaaagataataatgttgcttcttattcaaactgttggtcatatgtacagtatataaacataaaacacacaaggaaggtattatgtatgcagtagtatactagagtttaggaaaatgaaaattttagaaaatatgttttgtcaccctgttggtcagaaagatgtctttctggttttaacgcatgcaggcatgtaaatatttgtctggagtcacagtattaatgaatgagatcttaagcatctggtgacatcagaactctgtgtcagccacttttatttgtatattgaaccctagctagtgccccaagctgcactattgggaatggattgtggctgaacagcaaatcaaaacaccagaaatatttttatatgttaacgtcatattatgttaatgttgctgaaaacaaaacctaacaaaccttgatgtaccagtccaataccatgtagcgctgagtgataaagttaaaatgtgctgtgcttcccacccttgtcagagggagggtggcttgtgttatttt

SEQ ID NO: 65765 - DNA, 1316 bp, Homo sapiens
ggctgtctatcagtggataaggtgggggctgtctatcaggggagaaggtgggggctgtctatcagtggagaaggtgggggctgtctgtcagtggagatggtgggggctgtctgtcagtggagatggtgggggctgtctgtcggtggagatggtgggggctgtctgtcggtgtagatggtgggggctgtctgtcggtggagatggtgggggctgtctgtcggtggagatggtgggggctgtctgtcggtggagaaggtggaagcttgtactcagagcaggggatatttagacttgaaggggccagggaggaaggtactggttctactaagccccatgttcactgggcagccactaagttagggaccgtgtgtgtaccgagtggattccgacaaagaagctgtctcaggagccccagccagctgcagaggggggcccaagctccaaggctgggtgtcaggtttgccaggtgctggctccgctaggggccgcaggctgcgctgggcgggactgggctgggctggtacctgtgcccggtgtcaggccagctgtagttgcagcggtcagctgccgctctctggccccatgcgaactgctgtgccaggtgcaccctgggggaccaggctgcctgggcttcctggaactggtgaagctgccgccacttcctctatgctgtctccagcaggcaattctgggtaaacgatcttcatttgcctataaagctgcacagctcacaggccttggaccgtttctgccccagccccagcattggccctttggacagactctgaaaccgtgcgcagaacgcaccctgtcattacaaatgactcctggaggcagtccccgggggcctggcaggagcacctgtgtttctgtggggtctgaaaatgacagaccaatcgcttgaacccgggaggcggaagttgcagtgagccgagatcgagacattgccctccagcctgggcaacaagagcaaaactccatctcaaaaaaaagaaaaaagtgccgagtggagtcgtcacgcccgtaatcctagcactttgggaggcagaggtgggcggatcacctgaggtcgggagttcgagaccagcctgaccaacatggagaaaccccatctctactaaaaacacaaaaattagccgggcgtgtgcatgcctgtaatcccacctactcaggaggctgagggaggagaatcgcttgaaaccgggagccggaggttgcagtgagccgagatcgtgccattgcactccagcctgggcaacaagagcaaaaactccatctcaaaaaaaaaaaggagagagagaaaccgggaccgcaag

SEQ ID NO: 65766 - DNA, 1296 bp, Homo sapiens
aattcccagacaacgacagctgatcaactacttgaattttttaaacaagttggagaagtgaagtttgtgcggatggcaggtgatgagactcagccaactcggtttgcttttgtggaatttgcagaccaaaattctgtaccaagggcccttgcttttaatggagttatgtttggagacaggccactgaaaataaatcactccaacaatgcaatagtaaaaccccctgagatgacacctcaggctgcagctaaggagttagaagaagtaatgaagcgagtacgagaagctcagtcatttatctcagcagctattgaaccagggtggctgcactcaacgagtttatgcaatgactttcttggatgtttctgaaggaggaggatgtacagagagtaggccccttgcactatatgtggtacattccacttgtgcctgattattaactgggatctttaattgttctgagcttacactgcaaagtgattttttcctcccagagtctggaaagagcaatgaaagaaaaggcggtcgatctcgttcccatactcgctcaaaatccaggtctagctcaaaatcccattctagaaggaaaagatcacaatcaaaacacaggagtagatcccataatagatcacgttcaagacagaaagacagacgtagatctaagagcccacataaaaaacgctctaaatcaagggagagacggaagtcaaggagtcgttcgcattcacgggacaagagaaaagacactcgagaaaagatcaaggaaaaggaaagagtgaaagagaaagacagggaaaaggagagagagagggaaaaggaacgtgaaaaagaaaaggaacggggtaaaaacaaagaccgggacaaggaacgggaaaaggaccgggaaaaagacaaggaaaaggacagagagagagaacgggaaaaagagcatgagaaggatcgagacaaagagaaggaaaaggaacaggacaaagaaaaggaacgagaaaaagacagatccaaagagatagatgaaaaaagaaagaaggataaaaaatccagaacaccacccaggagttacaatgcatcgcgaagatctcgtagttccagcagggaaaggcgtaggaggaggagcaggagttcttccagatcgccaagaacatcaaaaaccataaaaaggaaatcttctagatctccgtcccccaggagcagaaataagaaggataaaaagagagaaaaagaaagggaccacatcagtgaaagaagagagagagaacgttcaacgtctatgagaaagagttctaatgatagagatgg

SEQ ID NO: 65767 - DNA, 1205 bp, Homo sapiens
agctactgcagagtaagaacatgtcctcatctcgagcaggctaaacatggccacatcagcgtggtctacccgggaaatgttatataagacatcatgatcgggtgcctgtgatgaagggtacagactacaaggcagtagataagcttacttgtcaaggaaacagccagcggtatgggccagaaccccggtgtgtggagcgccactgttccacctttcagatgcccaaagatgtcatcatatccccccacaactgtggcaagcagcctgccaaatttgggacgatctgctatgtaagttgccgccaagggttcattttatctggagtcaaagaaatgctgagatgtaccacttctggaaaatggaatgtcggagttcaggcagctgtgtgtaaagacgtggaggctcctcaaatcaactgtcctaaggacatagaggctaagactctggaacagcaagattctgccaatgttacctgggcagattccaacagctaaagacaactctggtgaaaaggtgtcagtccacgttcatccagctttcaccccaccttaccttttcccaattggagatgttgctatcgtatacacggcaactgacctatccggcaaccaggccagctgcattttccatatcaaggttattgatgcagaaccacctgtcatagactggtgcagatctccacctcccgtccaggtctcggagaaggtacatgccgcaagctgggatgagcctcagttctcagacaactcaggggctgaattggtcattaccagaagtcatacacaaggagaccttttccctcaaggggagactatagtacagtatacagccactgacccctcaggcaataacaggacatgtgatatccatattgtcataaaaggttctccctgtgaaattccattcacacctgtaaatggggattttatatgcactccagataatactggagtcaactgtacattaacttgcttggagggctatgatttcacagaagggtctactgacaagtattattgtgcttatgaagatggcgtctggaaaccaacatataccactgaatggccagactgtgccaaaaaacgttttgcaaaccacgggttcaagtcctttgagatgttctacaaagcagctcgttgtgatgacacagatctgatgaagaagttttctgaagcatttgagacgaccctggggaaaaatggtcc

SEQ ID NO: 65768 - DNA, 4650 bp, Homo sapiens
ttttttttttttacagataaatttgtttttaataaaggagttaattttctttcaatcctatataaaacaatagcaattaaaaacttcatttctgaaagtaaaatatttacatatgaacaagtaaactgtgcaaaatttacatgaaaaaatgggaaaggaccaggggtttccctaaaaggccaaaataaaaaggtgtaaccagttcctcaggtgttgataaaaaatactgatccagcgttccagttcacacgcggctcggatttaaggtctaatgtgagaattcacacggagaaagccagagtatttacagtcataaaagtactatcaatagacaatttcatacaataacctctgaaaatagaaagaaccaattagtatatttgtaataaaaaaataggtacaaagaaggggctttgctctggacgtctgtaaagtcggcccaaggcttgcatacagtctcttagcaaaataattatagtttacatagccatttctatgtcatgtgccaaaagttatgtacaattactgacaaaatacaccaaccatttttcaacacttgattcacaccgagaaacagtcttttgatgattcttctcaactttgattttatttaatctaggttttcacttttagctaaaaaacacagtgcaagtaaaatatatttatgctgaaaaggttttcatctcttttaactttacagctttacaaactatagcaaataaaatgcatttgtacagatgctgaccacacattcagaaggagccacctttgctgggctcggcctctaccaagcagaaatgcgattacactctgaggtgggggtgcaacgatgaattgtgtattcctccaggattctcagcggagtggaggggaagggaggggaggggagggcagggggcagagaggagagcggggtgggaggggaagggaaggaagataaatagtcctaaaaaatcagtttgctttgcccaactgactattacaaaaataaaataaacgaaatgaggtcatcggctgtagacatacacctacatagtaagttaggtagaactaaaccaaaatgcacaaataatgcagaaactgctatgagttgacaagagggcagctaattatttgctaacgattccatcagtctttatatatggcttgtttggcaggaaggccactcaatcaagatgagttaagatttaattgtcctttaagagtatccacaggcctttgtgttctctctgttacagaaacgtgttttctttcacactgaagagctgatttagaaacaggaatataaaactgttccattgtaaagaggtggctgttttttaaacaatatcccatttgctcgttacaaaaaggcgtaatctgcaaatatataaaaagtccccaggcgtcctcctgtgtcacttaaggaatgctttgtagagcagcagtgaatggcttgtctcacgttcattttctaaacaaaatatgaggtccctgaggttgacccgcgtgattctttgtcgcgtgaactgtctgggggttccgacacccgagctgcctgggaccactgagccggggcccgacccctctgctcctgagcccggccccggacagtccactttcctctttttcctgggcccgatcgctgctagtgctgtgaggttggcgtcccgctgtctcatttgtgccagttcctgttgctgcatctcctttgccttctgtttcagccttaactgttctggatcttcttgtcttgaccgagactttgctgccctcatcaggatctcccgctcctgctcatccttcctctgcttttcgatttgatcaagctgttcaaaaaacttgagctgtgcccggacgtcactcgcctgctcatatctgtcgtcatccttgtaagaaaagttcttctgctgagctgtttctgatattttctctacaagattctgtagcctttgttgcgtggcatgtgatacataacttactacatctggatgtaattccgttataccatgtttttttacctatttttaatattcttctctgcaaaggcgcttggaggaggaaggtttcatctttacaggaccgcgttagcgtgcccaccaattcagagttcgtggctaatattcttgcactttcttctgacaagtttactccagccatcgatgcaacatcattaatgtcatcatcgtcccgaaacgaacctcccccaggctccttgagtttatttttctgtgcagcagctgcttgtgccgagacagcagaaagggctttggttccaggtaacacggcgggtttcaccacagggactggctgcagtgggttcagctggatctgctgaggcgtggtgagcatgatccggttgtgaggctgccgcagggcgaccatgggtgtctgcgtcaacgtcacctgcgggggccggatcagggctcctggcttcggaggctgctggatgaccagcggtgtgggttgcccctgcttgccgacgccgacctgcgtgggctgcgtgaggctgagcacagggggctggagggcactggtcacggtggccgccgtcttcccggccgtgcgctggaccgagctactcagcaccacggccgtgagcgcagtggtggcctgcgaggtgggcggtggcggctgctgctggctctgctggatgaaggccgcggagtcgggggtcagctgtctcaaggcgggtaagctcctcttcaggaaaggcacaaggtaaggttgaggtgaagaattaagttctcggtataacctgcttgtgaaatcttctgcttctatttttccatccagtaaattctgcacgagctctttcacattagctgctgtctctgtagactgcttgccagatgaagccagttttattaacgtagatcggaaatttttacatttcttcacgttttccatagtttccctggcaactgaggaagtggtggtcgcccctggtaccgtgcgctgaggagtccccgtctgaacagccggcgccgttccaagttaagccgtcttggcagcgcaacccagaacgagctgaggctgagaaccgggcgagcgcttcagtgttgcgctgggctgcaccgttgtctgggcctgagacactcgcgatattatgttagttggggtgcaccgccgtgtaatgataggtgatccacgtgtctgtatcgtggagatctggacgggaggggcacttgtgggggtggcagggcgaggcgccatggtggtctgaggctgggcatgggcctgcgcctgcgtctgggccaaggcctgctgaggaatcattaacaactgcccattctcacttcggacgaggaccattcctgggggcagctggaagttctggatgttggtcgggttctgaggcggctgcggcaagcggggggccagcacggtgggcgtcagggtggcccgaatcccgctggtggtggccgtgggcgtccgggacaggctctgggtcactgcgccggccgcgcctttgggcagcccggtgggggtcccgggggcgggcggcgggacggcggccgggctgggcagcgccccttgcatagttggcccgatgaccatgctggccgccgtgctggccgggccgctggccgccagggtctgcgccgccgggggcgccgcctgcaccaccctcttgggcgactcggccttgacccccggcgccggcgccgcagccgccgcgccgggcccgggttggccgctgacccccgcggggcccccggcggccggggcgggggcgggggctgccccggcgctgcccccgttctgggcggcggcggggggcggcacggcgagcgcggcggtcgggggtccggcggggtggccgggcggccgggccagagtggcgggcgcggggggtggcgggggcggggcggcggcgggggcggcgggcgcgggggcggcggggggcgagggcgcggcgggcgcggggggcgcggcggcgcccacgaaggggggcgtctggatgacagtgccgggggcggcgggcttgggcagcggcagcagcgcggcgggcccgttgttgaccaggctgacagcaggtgcggcggcgtggtgcgagttcagcagcgcggcgctcccattcaaagtttgcgcggcgccggggccggcgggcttgccagggccggggccggggccggggccgggcccggggccggggccggcgcgggcggccagcgcggcggggccggcgggcttggcggggccggcgggggcgggctcgggccccgcggcgacggcggcggcggcgggcaccggggcgcaggcccccgcgctgccctcgggcggcggcctcagcttcgcggcgggcggcgcgggccctgcggggacaagggggcggcgcggtgagggggggcccgggcgctgcggccccccgccccccggccgcgctctacctgcggggggcggctccggcgccgctccgggcgcgccctcggcgggggcggccggccctgcgcccgcggctccggccgggctgccgctcacaacatggttcccgagcgcgccggcggccgcggcccgcacctcgggcgtgcgcggcgcgaggtggtggtggtgggccgcgctggccgccagctgcgactccagcgagcccaccaggtcgctcaccactttctcgtccacctcgctgttgaagaagacctcgtccagcagatccgagcccgccgccat

SEQ ID NO: 65769 - DNA, 1700 bp, Homo sapiens
ttttttgaaattttaaagctgggtgtccagggcagacatcacatgttggcaggttctgtgatgccccctgagccataaaaccagcaaattttttattagtgattttcaaaaggggagggagtgtacaaatagggtatgggtcacagagatcccatgcttcacaaggtaataagatatcacaaggtaaatggaggcagggcgagatcacaggaccacaggactggggtgaaattaaaattgctaatgaagtttcgggcatgcattgtcattgataacatcttatcaggagacagggtttgagagcagacaactggtctgaccaaaatttattaggcaggaatttcctcgtcctaataagcctgggagcactctgggaaactggggcttatttcatccccacagctgcgaccataaaagacagctgccctgaagcagccatttcagaggcctaccctcagggatgcattctctttctcagggatgttccttgctgagaaaaagaattcagtgatatttctcccatttgcttttgaaagaagagaaatatggctctgttccgtccagctcaccggcagtcagagtttaaggttatctctcttgttccgtgaacatcactgttatcctgttcttttttcaaggtgcccagatttcatattgttcaaacacaaatgctctacaatttgtgcagttaacacaatcatcacagggtcctgaggcgacatacatcctcctcagtttacgaagatgacgggattaagagattaaagtaaagacaggcataggaaatcacaagggtattgattggggaactaataaatgtccatgaaatcttcacaatttatgttcttctgccatggcttcagctggtccctccggggtccctgacttcccgcaacatctctccctttctttttataataaatgtgccatggcaatgaaggcttgttcgttctcttgattttgacgcaggattctttgactagtctggcaaactaaaaacaagccgattaaacagagaaacataattccaaaatttactacagtggagcccccaatagacttaatccaagtcctggggtttaatccagaaagattttctgccacctgatctaacgcctcagctccaggcacaatggataagtgagcttgagaggcttcaaaaatttgtctctttaatttagttatgtccagtgataaattatcttccctacccagaagatgtcttttgaccatttcccatgaatgatcagtctcgttataggaatacggggtgatgcagaaatctcaagtgttccaatcgtactgcatttgcatgtgatgctcgagactcactacctgatctccaagccaaataacagactgtcttaaatcattaatttgattagcttgtgtccatcccttaagggcactgagtttccctgggctgcgggtaggtccagagattctgtccaggagccagggcctggagttggaaaccttaggaataatcctggtgctctgttttactgtggctgagctggcacccaagctacaagacagcatccttcccattcttccctcccctttttccagggcagatgattctttccgtgttccaccactaccacaggcccacaaggagttctgtcagggtaccacaaatatttacttaaggcccaagggctcttcagtcagcttgtgttgaatactgccaggcctgg

SEQ ID NO: 65770 - DNA, 2265 bp, Homo sapiens
  misc_feature (1)...(2265): n = a,t,c or g
ttttttttcatgatatacaaatattattttattagatgccaaaacttttattaacatcactttatttctatttgcagcttttaattatttaacatttataacattttactgtgtctcctctgggtgactaaatatcttcacatgcccactagctaaaaagaatttctaagtagaactcaactgaaactgcaagctactgctctaagaaatgcatacttatgtttatttgctctcctatataatcctgtttacaaatagcataactgcaaagatttatatgtaatttctaaatccttcaggttgctctaccattcatcttcttatgtctggcaagataaacactcttagtgaacactttgctgcatctcttaaatgagatttgtctccagtttatttcctatagaataagggatgcacttggaactgaaaaattccttcaatttctaaagtttccacattcatacaacttttctcctgtaggagtttgcaggagattcctattgcctatagtctttcccacatttgctacatgtacacagatttttcctagtgtgagtatacttaggtcaattaagggattaatactgacaaaggctttcccacatttattgacttcatatgatttctctacagtataaactctaataaaaaaatctgcatcattgctaaaagtctcccatgttcaccaccttcatacaacttttccccagtatacatttttctgatgttaaataagggaggatctatgaatgaagtttaccgtgataaacactgcttctcttctgtaagatttctcacatgtatagggattcatatgatctaaaggcttttccacacttaccacactattgggtttctctccattatgtactctttgatgggcagtaagattcgagcctttgctaaaagctttcccacactcactacatttatatggcttttctccagtatgaattctctgatgtacagtaaggtttgaactacagctgaaggtcttcccacatttaatacattcgtaaggtttctctccagtatgaatactgtgatgttgaagcagggacgacctatgactaaaggctttcccacatatactgcattcgtagggtttcaatctaatgtgatttctcaaatgcatattcagtgattcaagctggttgaaggatttcctgcatttctaaacttcaaacggtttttcttcagtatgaatactctgatgttgaacaagaaatgagaagctactaaagcccttgagacatttgttgcattcatattttttcttcatactgtgaattctttgatgttgagtaaggtgtgagctacagcagaaagctttcccacattctctacattcataaggcttctctccagtatggcttttctgatggtgaatgagagacgaactatgaatgaaggcctttccacatatacgacactcatagcgtttttcttgcgtatgaattcttagatgctgaatgagaagggacacacgactaaaagactttccacagttcatacattcatacggtttctctcccgtgtgagtgctctgatggttagtaagtgatgagccatggctaaaggccttcccacattcaatgcatttgtaaggtttctctccactatggcttatctgatgtcgtgtaagggatgaaccatggctaaaagtcttcccacattcacgacattcatagggcttctctcctgtatgaattctccagtggcgactgaggattgactgtttgccaaaggctttcccacattcactgcatgtatagattttctctctattacaagtctggggaagggtaagagatttgctctggttgaaggctgccccacttttattagaatttaaaagtttctttccaccatttattctctcactttttataactgacttttttgataaattcttctttaatatatcatatttgtgtgaattcccttcagcagaattgttttgtggttcagaaagagtagactttgaatgaaaggtgcttctaaatgtgtcgcattctgtatattccaaattcttattagaatttgaaaattcataactttgttttacaactttttccattgttactgggttggggtgaatcttcatcataaatatccttctttgttgataattccttgttttcccatcttgattcccaatcttttgacagttttttctccatcatccagggctcttttccatcctcnaataacatgatcacatatggcttagttacgggaaagacctacaggagaccaggttct

SEQ ID NO: 65771 - DNA, 2486 bp, Homo sapiens
ttttttttttttaaacaaaactttattggtaatagttttcaaatatgtttacaacagcacactgttcaagaggaagtctcgtccttcgcagcacacaggttgaatcgcccccgcacccacccggggccccaccccaggcctgagaactcctcctgggatggggagaagttatgagagggggaaatacggggatgaatggggtggctccccagcggctccccacttttctattacgagagaaaaaagcacaaatgagaaagtgggggagaggtgatggacagctgacagctaagctggaggaggggcgcccaggatgggggaggcggaagctggtgggtgagtaaaacaggcagcccctccccagcagctctagccttgaaccccgggccgtggcttggggggacttggcctcttctgttcccttttgcagggatgccctccccactcagctgagggaaggctggacgttaaaatctagcggagaataaaattaaggagttggggggaaacgctgctgggaggaaagacttgggcttggggctccccctctgtctttttgggggatgactcctctttggcagggagaggggcagctgctttgtctggctttcaaagcccaagggtgaagacaggtctgttggggaaaaagagagcggaggcttcctaaaggggcctagaccctcgcaggattggcagagaggattccccggggaggggcccaggggagattagcagcggggaggttcaaaccccagcgcctccctttccaaagtcagtctgcttctctttaaaatggatttgaggaatggggggacatgggaggggtgggagtagaggaaggagggagggaggcactggtggaacttaaataagattttaaattgttgtttttttaaaaaaattctagcaagcaacccactgaacatgtcactaaaaatctctccttcccaggcaggattactccgaaaggaaggttggcgcttcgttcatttgcccttagcaagtggggcctgtggttgggtgggatgggggtgtgggtgggggctggagttaagcgtgagcccctctttccataccctgtccctggatacaccagcaagacctggtctgactggagttgagaaactcgtttaaaacaggcagaagtgggctgggagggctgaggggctggggggctgtggggaaagagaaagggaaaagtgggagagggggcaggagggtgaaggggatgagggggagcagctggtgtttctgtccctctgattatctgggcttcctgctccccctacccctggagggtggggtgggggtgaaattagatgcaaggaactctggggccctctggctgttcaatccaaccctcccacccccccgaccaaaaaaaagaaaaaagaaaaaagaaaacccatgggggcacaggcatgcccctaaaactcagaaaactccttgcccaaacttctcattgatggaaaacccggatttcttcttcctcatagtcgtcaaagttaactcgtatccccagggcctttaaactttggtatgaagggagcttccaccttcctctggtagatggcaatccagtcagttgtggcaaaccacttgtggttcttgatatcgttgaccccattcttgaggttcccaaagcgcttggtgagatctacctgcaggaggttccgcagcaggtccttcaagtcagagctgaagtgggaagggaagcgcaccttcccagagacgatcttctcatagatctggatgggctggtctgcgaagaagggcgggtagccagcggccatttcatagataagaacccccagggcccaccagtccacggccttgttgtagcctttgctcaggataatctcaggggccaggtactcaggggtgccgcacaaggtccaagtgcggcccttcacgcgcttggcgaaaccgaagtctgtcacctgaatgtagccctgctggtcaatgagcagattctccggcttcaggtccctgtagatgagatccagcgagtgcagatactcaaaggtcaggacgatctgggccgcgtagaaacgggcatggggctcactgaaccttccgatccgccgtaggtgtgagaacatctccccgccgggcacgtactccatgaccatgtataagtttgagttgtccttgaaggagaactcgagtttgacgaggaacggaaagttgacagcttgcaggatgcgcttttcattcagggtgtgttcgatctgtttcagtttccccaccttctgttagtcgaggatcttcatggcatagtggttcccggtctccttgtgtttcaccagcatcacccgcccgaaggagcccgtgccgagggtcttgattcgttcaaactgatccaagtgggctgtgttctgagcgggactttcccattttttaagaaaatcttctttggctttggctaagaattctttcacgctctcctgctcgctgcccttcttggcggcggcggcgttgcccat

SEQ ID NO: 65772 - DNA, 714 bp, Homo sapiens
tttttaagatttctcagcagtatgatttattttatgtttagaaaagtttgaaggtgttgtcaaaatcattgtcacatctttcaggtttgtaaagtttccagtattaattttcttatgtttagtaaagtttgagatttagttacaagcattgccacattcttcacatttgcagggtttctctcaaatatgaattgtcttatgtggagtaagggttgatgataggttagctttgccacattcttcacatttgtagggtttctctccagtacgatttttcttatgtgcagtaaggtttgaggatgagttaaaagctttgccacattcttcacatttgtagagtttctctccagtatgaattatattatgtatagcaaggtgtgagaactgtttaaaagctttaccacattctttacatttgtacagtttctctccagtatgaattaccttatgtttagtaagcgttgaggacaggttaaaggccttgtcacattcttcacatttgtaggatttctctcctgtatgaatttttttatggtctgtaaggtttgaagatcggttaaaaactttgccacattcttcacatttgtagcatttctctccagtgtgaattatcttatatgtagaaagggttgaagactggctaaaagctttagcacatttttcacatttggtagggttctctcctgtatgaattttcttatgtgtagtaagttt

SEQ ID NO: 65773 - DNA, 354 bp, Homo sapiens
  misc_feature (1)...(354): n = a,t,c or g
agtaaatatagctcttcataattttgttctgaagtttaaaaatatatatatttttgaatggataactttctttttctaaatgcttacagtagagcccacgatggttgttaaaagcccccaggttcagccttctttaattgtgtggtcagcctgccatcaacccaggggctccctctgctcggcactgtnctgctctagtgaataccttttttattctggtgtgacctaatatggccggtaaggcggtcacttctcatagagcgttgtgaacattctggacaaacaaatttcttctcaccctgtatgcgctcttctgtgcctctgtaattcatcacttcgagtaaatcttttacc

SEQ ID NO: 65774 - DNA, 378 bp, Homo sapiens; identical to SEQ ID NO: 25831

SEQ ID NO: 65775 - DNA, 308 bp, Homo sapiens; identical to SEQ ID NO: 36642

SEQ ID NO: 65776 - DNA, 1717 bp, Homo sapiens
ttttttttttttcaccttttatcaatggttttatttttaaaaacaggtgaatccacttttttatacatcattggcacttcaataattacacaaaacacacaagtacatgcatctacaattacgcaccgcatgagaaccgttagttgatgaaaatctatcatcaaccagtaaatcaatgtgaaaaaatacagtgtcaaaccaaaaagtataactatagttgcataggaatattaccatgctataacatttcaagggtcattgggaaacaaaagaaaaattataaaagtttgccttggattggaatggaatgtacaagaataaagggtcaaccacatccagtggcaaaagggatttatgaaatttaccatggacttaacagaagaaaaggataatcactttaaaaagcaatccatacgtatatactgcaattcattataccccattcagtgggactggttccagcttattaaagtcacagggttaagccccttaaaattatagatttccagtttatattactcatctttatgtaccagaactgcacaatttcctcatctgacaacatacaataaggaatgaatatcagcagcttaaaaatgaaaccaagcatttactttattttgggatttctcccaccccccaaaaatataaatatatatatatatatatttatatactgtatatatctgtaggttttgccggtacctttaacaaaagtgtatccacctagaatgggccagccagtgccatttttagagctttgcccaatttaacagctgccattaagtaaaaaatggcgcatgcatgatctgatcctcagaggaccttttcacttctatttaaatattttaacaaaggaaaaaaaaaaaagcaacattcacagcacatcaagcccaaaatagtttacaccttctacactgaagcattgtttaaaatgtacctggctagatcacccttaccaggagaggctaaataaggcatgctttaagacagtcattgtggtgttgctcacttgaaaggggagagaaccaaagaggtccaagcagaaaattttagcaggtcatgttgccaccagtttcaggaacctaaagatattgtaagcagtacttaatttgtgtttctctggcgcaagtttttatctttgtgattgttggtagagttggttttcattggtccagctggttcatcatcgtcaggaacctcatctggcctcttcctcttctcatacacaacaatgatcaccacaaggatgataatttcagccagaattcccaagaaaggcccagagtggggccaggtggcaataacattcaatactcgccccagggccttcccgtgaacctgcaaggttcaacaatgttcaaactcaagtgtaattttcccttgttgatgatgaagaagcggccagaggtattgacaatgtccatgggcatcccgttctccttcttgcgccatatccagtctgggtgggggtagccaactgacttgcaatacatagtggcatcctgcccttcattcttgttctcactccgtttatggccagtgatgtcaggagcggctttcacttcaatggtggcgtttgctttaggagcgctgacaaagtgatatacgcagtggtattcgcctgaatcctcagctctcggcttattgatcctgtactccatgttgctggcattcttacgagtggcactcagttccaccccattctttgtccagt

SEQ ID NO: 65777 - DNA, 1277 bp, Homo sapiens
ttttttcaaaccatcacttgtttataaacgcgtttccgatctgccatcgtaattccattttagtcatgcatcccgagatcattcaaaccacacccaagagagactggacgacagcactcactagggtgctatttataaccatacaatgcaggaggctagctgcgtgtcgatctgggggacagtttaataaactgccacacaacacagctgagctccacacagccacatgaggatggggacagccattccttgggtttctgaataacgtatcaagtgagcagtgaatttcaatcaagcttgtacatcaggaccgtcttgccaaaacaacagttgcttttggctgctggaagctgtagcttttcaaaacgttcacacatttcaatgtatcgtcgatgtttttaaatagacttacagggagggtggcacacagcaaaggcccgcaggccctcgtagcaccgcagtccaggtaggatgctgggcggcggggggtggtggagggggttctatttacagtgtctgggctttgactccactaactgttggttttgttttctttcttaaaccttttccttcaagtctggaagcctgtggagggcctgtcaccttaaaggcaaggattccttgtttgcaccaggcagacaaatgtcaaaccacgaccccaggggctgcactaggcgtcgggcccagaagcccccggccatccagccccgactctttcatgcctctgcccctgatgaggggacccagggtaccctcaaggggacacagaagggaggctgcatcctagtccagtgtcaaagtgaggggggcgctgcaggagcctggacaggaccacctagcccagccagggacaggagggtgagaccacctggaacaaaggcacagaggctggagagaaggcggcatgttcccagactgcatgggctcggggtagggggatgcgaggtcagaactggcatagtggccaggatctcgggctctactccatgggcaggggggaagcccctggggctgcatggggccatgggggaggcgggcgcaggagacaccggctgctgtgccaaaggccccagtccagctgctcctctgccagcagaaggcagaggacaaggggctggcccaggtggcctcgtgggacggggggaaaggagggaccagcaaacccttcttgggatggctgaggacacaggggactccagcagaaagggaggcccctgggtgtgcaagacgggacgctgaccagcctgggccctcaccggccactacccccaccacca

SEQ ID NO: 65778 - DNA, 1322 bp, Homo sapiens
tttttttttttgggtggggcacaaatggaaaccatattaacccctttatcattgtatagtgactttatttgtctcatagtttttgtatcaaaatcaatactccttctctttttcctggtttccattggcatggaataactctttccaactctttactttcagcctatgtgtgtctttatagtttaagtgtgtttcttgtaggcaacagatcaatgggtcttgttttctccattcattcagccagtctatgtcttttgattggagagtttagtccatatttccattcaatgtattatcgataagtaaagacttactcctgccttgttatttatttgttttctggttgttttgtggtcttcttctttcttttcttcctgtcttcctttagggaaggtagtttgctctggtgatatgatttaggtttttgctttttattttttatgtatccagtgtatgtttttaggtttgaggttaccataaggattacaaatactattttgtaacccattattttaacctggtaacactgtttgcattaacaaacaaaaaactaataaaaactctacatcttaacttcatccccccactttttaactttttgttgtttctaattttatcttatttttctgactggtcttgaaaagttgtagttactatttttgattggtttatcatttattctttctacttacacaccacagttacaatgttatcacactttgggtttttctgtgtacttactcttaacagtgagttttttacctttagatgattctttgttgctcattaatgtctgtttctttctgaccaaagtactcccttaagcgtttcttatgggaccagtctagtgttgatgaaatccctcagcttttgtttgtctgggaagtctttgtttattcttcatgtttgaaggatatttttgctggatatactattctagggtaaaaggttttttcccttcagcactttaacatatgtcatgtcactctctcctggcttgtaaggtttccactgaaaaatatactgccagatgtattggagctccattgtatgttatctgtttcttttctcttgctgcttttaggatcctttctttacccttgtcctgtgggagtttgattattaaatgccttgaggtaatctttgggttaaattggcctggtgttctataaccttcttgtacttggatataaatatctttctgtaggtttaggaagttctatgttattatccctttcaacaaactttctattcctatctctttctctatctcttctttaaggccaataactcctagatttgcccttaagaagttattttct

SEQ ID NO: 65779 - DNA, 3506 bp, Homo sapiens
tcgcacacagcacatgcacacaggtgcacagaccacacagcacacacaagtgcacagagcacactggacacatgcacacacacacgcgtgcatgcacactcctcgcacttccagccttggagcccttctgtctctggactttctctttgaccctgctgagtgtaagctgcctggggaggggctacaaggagtaattgtggctttaggggtcgtggtgatgctggaatgtcaagcgccgtcgtggggtatccgactgtccgggctcctggtccgcagtggcagagcgccaggcagagcccaatcagggtctcgtgctgcccttcccccccacagcctggcagccatccagaggaggggctctaccagatgccaaggtgccccggtgtctgtatgggtgtccggttgggtcctgtgtttggtctgccctggaggtggctgggccctcctgggatgggtggctcagcctcgaatcccaggccccagcccaggcaggtgctgctgcctgttgtggtttcctggcccagcttctccttctccctctgcataaaatcacagtccgtgagtcttccagctgccaccacggctgggacacgctgggggagggctcctcccatgcctcctgcacacagccgtctgagcagggcaggtgcccaacaccccccaccggaggacacgctgcccctcagcgatgcccctaccttttggggggcctcgtctcaagcccccccttggaggctgaaatcaccccaggcactgtgagggcttctccagggggcaccctttgagctgtgggtctgatcaccccaagtcccgcccggaggagaggcacagccagggcgtgtggtttaatgtttgcccccttcggggctggaggtctcagtgtttctagattccagaccctgctgccagagagacctgctgccggagagaaggggaggaggactccagctgggctcggtcccccacagtcagggacccccataaaggacacccccttctctctagaaagagctgggctctcagctatttctagttgcttcccagaagccgaggagcagaaggagctgtgagagctttgcagaaacgcccttgtccccgccctcctgagctatgaatgccgtacagagcagaggctggggcattggcaagatcacaggttgatgctgcacagccccattgacacaaaccctcaaagcagacgtgagagggacggttcacaaagcttggacctgccgtggagggtgcccggcagacgtggcgtgagagggacggctcacgaggcttggacctgctgtggagggtgcccagcagacgtggtgtgagaggaacggctcacgagacttggacctggtggagggtgcccagcagacgtggtgtgagagggacggctcacagggcttggaccggagagagatggctcatgagacttggacctgccgtggagggtgcccagcagacgtggtatgagagggatggctcacgaggcttggacctggtggagggtgcccggcagacgtgtgagagggacggttcacaaggcttggacctgccatggagggtgcccagcagacgtggtgtgagagggacagctcacgaggcttggacctgctgtggagggtgcccagcagggggctgagctctgaggggtgggtgctcagtgcacgggtgcccccagtgtcctctgatcctgtccggtgcctcccccaacccccacacccatgcagaactcccaggtcacatgcacgtatgtccagggcatgggggtggcgtgaagaggcctggtcagggcctttaggggctgcaggacggaatggccgcctggggagcctgtgtggctgtgccgggcagccatcctgcattcccacccagcgcgcagtctccacctcggccccagcaaagcgctaagcagccggagagacagccagggcggcttcctgaaggatgtgggatggtggactccggggtcgagggaatacgcaggttcctgtccctccgggagacctagagaagctgcacacccaggagctttccatgacccgggagcatgagtgaatgggggttccagtttgctgaactttgccgtcttgtaagggtgggggctgacggccgaccctgggaggaggtgacatcgccgggggaggttgtgggcaacggtggaggaggagagacgggaggggaccatttgggatggaggggcctcttcagagttttaaaaggcgtttgtggggtggagttgagtgtgctctgggcttggacacttgccgtggtgcccctggctggccgaggagactggctctggccaggggccccgtcctgagaggtcctcagcgtctgactctcggccaggcgccagcaaggaggggccggtccccggggctaccaggcaggcacgtgcacatcgccatcgccacacgccaactccgcctgggttttacaaagtcgttgccttaatgcatgtggacaggaactccctgaggtcgccccatgccccctggctgtgccaggtacggacgccctggaccctgcgaacaggtggggcgggcgaggggcccaagggacgggctccagagacacgcgcagggcaggaggggtctcacggaggggtctcgcactgaggcgccccaaagctggtggtcccgctggacgccatccctctgcccgggatccacacggcccacgtgtgcccgccatgcccgcgccccacgccattgcagtcttccatcctctggccgtgacggtggctgcagcttccccatttgcgccgttgcctctggctgtctgcacttttgttcatgctccaaagaacatttcataatgccttcagtaccgacgtacacttctgaccattttgtatgtgtccttgtgccgtagtgacccaggcctttttttggtggatgtgttaccccgcacacttcaatctcaactttgtgcaccgtccattttctagggatagacgcccagggaatgaactctagttttctaacagattagctgagatattaacttactcacacggacaggttgatgccagagccgtaagaatgcgccagtgcgggtttgcgggggacttcgggtgtggggtcctkcggccgcgatggccgtggaaggttctggggatccctgctgccacggggacgagttcggacgccaggtggacctgtgcactcagtaaaacgcagtgattcaacctggacggtgtgtggcctcctcactcccactgtctctgggcggccggtctgagggccggggacttctggtcgatgctggggctgagtcgggtgcggtgctgtggaccgggtgtggggacggatggtccctctcctcagggcacgaacgagctggggtgttgtgaaacagtggggctgggggccacagtgagtgaggagcaggggcggctgggtcctagggctctggctggccaggtgacgagcgccctgtagggtgatttatacccccacacagggtgcaggtgtccatccacgttgcccccttcctgccgtgatccc

SEQ ID NO: 65780 - DNA, 1476 bp, Homo sapiens
tcacgtgtgcacagcttttttacaggttacaaagtgtttcacatacatcatctcatcaattcctcacaacagccctgtgaggtaggcagggcagggggtaatgttcccatttgtacagatgtggagactgaggcccagagaggccagtgacctgcttgaggccacacagcaagtgagcagcaaagctgggaccaaaggctggggtgggccccacctccagcccctggctctctccactgactgtgctgtcccccagggaggaccccagcctctgtccagagttttcagccacaaccaagccaggctcccaccccttgcagtagtgccgcctggcagcccagcagacaggctcccacccccatcggcagacctgtcccctccacctgcgccctgcaaaaagccagcccggagctgggcccaggcctgccccctagcctgctcctgatggtgcctggggcggggtgggcaggtgggtggggctggaacctcctttcctgttttcctgagtgatccctccccactggggaagagaagagaaaggaggaagaagaggaggaggaggaagagaaaaacaagaaactgagttggaagagggccctggagcaatcaggacgtcaaaagtttgcattccgactagctataggaaatagtttttttctctttttattatttcaagttttcataaaaatccataattattgaaacccaagttacagagaaagttcgtaacttttttattgaattattgactctgccgcgtgtcggttcgtcggctttcaactccagtctgtcaatgcccctgtgtaggtggggtccccaggtctgggcttctgaggtcctggtagaaggagggcaggtggtgaggggtggcggggggcagcaggggacggaggcgggagggagaaagagaacgtgtgtagaagggtagggaggaggtgggaaggactggagagtgagcaggtggcggccaggccccttcccctgcccggccgcccgggggtccctgccccccgccccggcctcatatcatcttcatgttgaacttgcggggcgcgtcggcggagctgatgcctgcgtccgactttcggggcacatactcgatctcgatgttgtgctttgtgttgcccttgccccggctccagagaaacagcagcaccaggcagaagaggacgacgcccaggaaagagatgaagcccatggtggtggcgatgatgagggtcttgatgtcgaaggggaaaggcacagtggcgcgggtgctgttggcctctccctcgcccggctggttggagatgaaagcgaaggtcttgttgggctgatggggccagtcgggcgagtagctgcgcacatgcaggtgggcgggcatggagtcgttgccgcccgcgttggccgcgatgcacaggtacgtgccgttgtcctgtacctgggcgtagcgcacctccagcgtgccatcagggaagactgtgagccgccggacgc

SEQ ID NO: 65781 - DNA, 2862 bp, Homo sapiens
ggaataagaagacccttgaagccccagaaggcatcagagataaagtatctgactgggatgagtttctgcggcagaccctgataggagcatgtagtcctcctgttccgctgctagagggcctccgtaatgggaggaatcctttagatctcattgctccaggatccagactagaatgtcaagctttccaggactctttaagcacttggattgttactgtagtagaaaacattggaggaaggctgaagctacgttatgaaggacttgaaagttctgacaattatgaacattggttgtattacttggatccatttcttcatcacgttggttgggctgctcaacagggatatgagcttcagcccccttcagccattagacatctaaaaaatgaagctgagtggcaagagattttggccaaagtgaaagaggaagaggaagagccattaccatcttacttatttaaggacaaacaagttattggcattcatacattctctgtaaacatgaaattggaagctgtagacccctggtctccttttgggatctctcctgctacagttgttaaggtttttgatgagaagtactttctggtggaaatggatgacttgcgtcctgagaaccacgcacggcgatcctttgtgtgccacgccgacagtcctggcatcttccctgtgcagtggagtctgaagaatggcctacacatcagcccccctccaggctacccaagccaggactttgactgggctgactacctcaaacagtgtggtgctgaagctgctccccagaggtgcttccctccgttaatttctgaacatgaatttaaggagaacatgaagctcgaggcggtgaaccccattctccctgaagaagtgtgtgttgctaccatcactgcagtgagaggctcctacctgtggctccagctggagggttctaagaagcctatacctgaatgtattgtgagtgtggaatccatggatatatttcctttgggctggtgtgaaaccaacggccaccccctcagcactcctcgccgagcacgagtatataaacagaggaaaattgcagtggttcagccagaaaaacaagtaccatcctcgaggactgtccacgagggcctgaggaatcaggagctgaactccacagagtcagttatgattaatggaaaatattgctgtccaaagatatacttcaaccaccgttgcttctcagggccatatcttaacaaaggaagaattgctgagctgcctcaatgtgtaggacctgggaactgtgttctggtccttagagaggtcctcactttacttatcaatgcagcctacaaacccagccgtgtccttcgggagctccagctggacaaagactctgtgtggcacggatgtggggaagtcctaaaagccaaatataaaggaaagagttatcgggctactgttgagatagtgaaaacagcagatcgggtgactgaattctgccggcaaacctgtatcaaacctggaatgcctgtcctaacctcttcggtccacggatggttctggataagtgttctgagaactgttctgtacttacaaagaccaaatacacacactattacggaaagaagaaaaataaaagaattgggaggccacctgggtgggcatagtaacttagcttgtgccctgaaaaaagccagtaagaggagaaagaggcggaaaaatgtttttgttcataaggaagaaacgctcctctgcatctgttgataataccccagcgggcttcttccccaggggaagtgggggttgaaggatgagggatgaccccagatgaaggggatgattgattccctaagtgaaggcagtacatccgagcagcaggatgagctacaggaagaatcagaaatgtcagaaaaaaagtcatgctcctcttctcccacccaaagtgagatatccacatcgctgcctccagatagacaaaggagaaaaagggagcttcgcaccttttcattttctgacgatgaaaataaacctccttcaccaaaggaaattgatgggcaggccctgttgctccttacccttcccactgttcaagaatgcatggacttaaaattgggccctgccatcaaactttgccatcacatagagaggatcaagtttgctttttatgagcagtttgccaactgagaaggacaaccaaagtgagctggatctttgaagcacaaatgcagcaaatccttcaccctgctttataagtggagctggaatagtcctggggctctggggcctgcaggtatcagcttgctctctttgcactttcggggaaggaggactcacagtgaggaagcaaaaactgtgcacagaagtggatcacctgctggtggaaatgtggacatctcttgttcagcagatggcagtttttaaaaaataaaggttgtgaggaaaagacttatataagaagaaaagcatttccagtggtgtggccctgaaaacaaagaataacctaggctgctggaaagcacccttttggttgttttcattctgttccctcccattgtagattgaactttggttctctgctttctttttcttggaaagagaggacttagctttaagtcagcactgatttgggactgttcctaaggcatatcagtgcttcattgtcattgtgtttttaaactttttaaaattaaaacagttcattttggggatgattatgtggctctagggttttgaatgtatagtcacactttgatcattttaaaatcgattcttaggagttcctttgtttactacctctgttgataattgagcttacagccatgtatgaggttttttgtatgatgccatttttaagctacataaacactaaaattatgacagaaaaaaacaaaaaaaa

SEQ ID NO: 65782 - DNA, 919 bp, Homo sapiens
tttttttttttttacaaatcctcattacatttatttactagtgtgttaaacatatactagatcgcgatttttaatctctgagcctgtgttttgatcatcttcatccgactgctgctctgagccttgtgaattaatgtattcatattcaataggcttcggataattatatgggtagccattgtcatcaaaaaaccttcggaaggtaaattcatagaatgcatgttcaggatgctttccatttttataccatccattgagagtgtcatttacattttcttcctcgttatcatcactccataatttatcaggatcaacaaggatcaaaatttgatgtatctgttggggtggtgtgattttaggggaattgtttgaaagccgacctgctgtcttcaggtcactgggagaagtcaaattggttttaaaaaatgggatgagcttttatttcatcagcaccattcttgcctaagcgatcttcgggtcctcggcaaagtttaataataagatcagaagcttcaggactgagtttagcttgtggtggaatgtgaagagatgtttgccagttgataaccttcatttgtgtttctaatggtgtttgtgccaagaaaggaggttgtcccaccaacatttcaaaaagaataacaccaacactccaccaatcacacaactgtgtgtatcctgttcgtagcaacacttcaggtgcaatataattgggagtcccaaccaaagaatgtgctagacatcgctggtgctggcgtgcagctctccgctctaatggcttcagtctgtctccacatcgacagcttgagggatccccccattcattactgaaatccatgctatcttgccgtggatggtcaccactctgatagtacttagaatcgtgtgtccatctgaagccagtgcagaggccaaagtcagt

SEQ ID NO: 65783 - DNA, 1204 bp, Homo sapiens
ttttttttttttgacttcaaacatcctgcaacctttaatatatatcatgttgtgtgagttttaacacatttgggcttgcatttgttctacaatgtgtaatatgaaaagtttatcagcacaactagactgaattattcctcacataaatccttgggatgtgttacagttttgatccttggttaataggcttcaacatggcacaaaatatacaaggatgtttacacattttgatgtctagtgagttgtgagacctaaatgaagcctctgccacacagttagggggtatatggatttctctttagcatggactctgatgtcaatgaatgcttgaacttgtgatgaagggtttgctgtactccgtaagggattctctcaaggaatgaaattctctgatgctgtgtaggagtgaattgtgactggaaaaccttggccacatttattatactggaatggtttctctctgatataaattctttgatgactcacaggatttaaactttgactgaagaccttgccatattaatttcttttataaggtttctccttagtatggataattggatgtctgaagaggtttgggcgcacactaaaggacttcccacaatcactacatttgtaaggtttctttccagtatggattatctgatgtctagtgaggtttgggcgcacactaaaggatttgccacactcattacatttgtaaggtttttctccagtatggatgacctgatgggtagttaggcttgaatgcacactgaagcctttgccacattgattacatttgtaaggcttctctccagtatggatgacctgatgggtagttaagttcgaatgcacactaaaggctttcccacactcattacacttgtaaggtttctctccagtatgaactctccgatgactcgcaaggtgtgaattgtaactgaaaaccttaccacattcattgcatttgtaaggtttctctccagtatgaattctccaatgccttgcaaggcttgaagtctgactgaagactttaccacattcattacacttgtatggtttctccccagtgtgaattctctgatgagttgcaaggcttgaagtctgactgaacaccttgccacattcattgcatttgtaaggtttcttgccactatgaattacctgatggttggtaagtgttgacctcacactaaaggctttgccacactctttacatgtg

SEQ ID NO: 65784 - DNA, 1873 bp, Homo sapiens
acggcacaacttgctatttttattagaggtattgatgatgaatataatgtcactgaagaaatcgaaatgtcaccatgctattaaaagacacaactaaatcaagagatttatatgaagcagtgaaaaatatgttaaagcaattttctttgtcctttgtaaacatatgtgatatagctacagatgctgccctggcgatggtaggtaaaagagagggacttgtacaattaatagatgatgcagttgccacacaaaactcacatttgatgaagtattattgcataatacatcaagaaaatccatgtgcacaagctttaaaagtagataacgtcatgcaaattgtcatcaaggctgtaaatttcacaagggcccaggaattgaatcatcgctagtttcaggaattccttaaaagtatggatgctgactctagcaagtcattcactttttagaagtaagatggttaagtcaaggcaaaatgtaaagattttatgctttgtgatgtgaaatcaagctgtttatggtatcaaacaaaattggtgccagaacttgacaatgaaaactggcttacagatttagcatttttagtgggtttgacggcccatttaagtgagttaaacctgtgtcttcaagttgaaaaccaacttaacaatacaatgtttcaaaccataacagcattccatatgaaactgaaattatggcaagctcaaattaaggcaaacaattttatgcatttcgacatgttggctaaacatggtcctgtgaacagccaaaaatacgcagccttgcttttcaatttgatacaggaatttgaaaacaggtatttcaagatttctgaaaaaatcatcaatattttggtatatttgcaactccattttcagtcgacatatatatgttacctggcaattttgaaatggaatgcctagagctgcaatctgatgttcaacttatagaaaaatttgattttgcctctttactggacttttgtaagacctgtcttcccaatgacaaatatcccttgcttcacaatcacaccttgttcatgtcattgctttttggcagcacttacatttgtgagctactattttcaaggatgaagaacacgaagagtaaaattagaaccaaaatatctgatgagcaccttgagaactcactgagaattgcaactacttccatcaagccagatactgatggattagtttctcaaaaacaatgtcaagtaccccactagttttatgttggtctcttttcttttataataaaaaatatcaaaaaagtagtgaagtttagctagatatgtacattttctgtatcagtgattgcaaacttggaacctgttcaatgattttgaaagaccctctgaaatgggccagtgcataattaggattattatgcaaggacatttttgcttatctgtggtggtagatatataatgaaaactatacacagaccatttgtgtgtgtgtgtgtgtgtgtgtgtgtgtgtgtgtgtgtgtgtgtgtgtattttatgtgtggcccacgacacttcttcttccactgtggcccagggaagccaaaagattggacacctctgctttaattcttatcaaaattatggcaggtttgtttgtagacacttacaagcttattctgaatttttatggaaaggcaagggacaagaaaagctaaagccattctgaaaatataaatcaataaagtggaaagaattgccctatatgatgttaagagttactgtacagctactagagtcaccacagtgtggtattagtggaggagtaaacaataagaaatagattcacaaaatatactcagctgagttttgacaatatgcctacctttccaaaatggtgttggaacatttggacagctcatagggg

SEQ ID NO: 65785 - DNA, 803 bp, Homo sapiens
agcttggcgacttgggggccaggggccctggggctgaagggtccagggctgtgggcttctgggggagccttcagagcttgatcaaggaaagggattaggggtaggggatgacaggggtctgtggctggagggagctgggatgcaggaaatggtctttgggtcgggtattcagggcctcgcttcccctgagtcattctttccaccccctggccgcacgtggacccaaggtgaggaagtctgccctgagccaggctctcgaggtcccggccctcgcccccgcgcggggccttagtgctcttgcccaccgacagctctgggtggatcgcccagtggcgcctgtccgtgttttggcgccccctagcagcggcgcagttgcgcctgtttcgataggcgagcggattggcgcccctggttgccggagcaatcccttaggcctggttccctgccgcctggagcctcggctcctcgcagtcaggtgggttctgggggtgccagcaggctctgagagtgccggccgcggggccctcgcagcttgcctgctgcagtcggagctggtaaactacgagcgcgtgcgcgagtactgtctcaaggtactggataaacatcagggcaacttcaaggccacctaccgtgccggcattgccttctaccacctgggcgactacgcacgcgcgctgcgctacctgcaggaggcccgcagccgggaacccacaggtgagtggcggagcgcgccacacgagagggctgggcccacggcggcgaaaggggctgcagcggaaggaacacgccctatgattagggcc

SEQ ID NO: 65786 - DNA, 357 bp, Homo sapiens
ttttgcttggctcttctcattctgaagtctaaatcctactcgctcttctcttcaaggccacgctctccattaaacccctggtgatcccctaccacaccacaatagataaccttacttgcactcatgaatcctactcccagaactgccccctaaccgaaccgcacctatagtaccagtaccctgtgcaagctgactctggcatctcaactgactacagctcaagggactcccagggagccccaaggggcttattcgatgggccctaattccacccctattgaaacaagcctaatccaacccgctaaccctttgcccccacacaatgtgccttgctctaagaacaccagcctgcaaata

SEQ ID NO: 65787 - DNA, 7592 bp, Homo sapiens
cccacgcgtccgcggagcagtgcttatggcgatgctacagctgaggggcatccggctggaccaggaagtgtcagctcaagcactggagccatcagcaccaccactgggcaccaggagggagatggctccgagggagaaggagaaggagaaactgaaggagatgtccacactagcaacaggctgcacatggtccgtctaatgctgttggagagattactgcagaccctgcctcaattacgaaacgttggcggtgtccgggccatcccatacatgcaggtcattctaatgctcactacagatctggatggagaagatgagaaagacaagggggccctagacaacctgctctcccagcttattgctgagttgggtatggataaaaaggatgtctccaagaagaatgagcgcagcgccctgaatgaagtccatctggtagtaatgagactcctgagtgtcttcatgtcccgcaccaaatctggatccaagtcttccatatgtgagtcatcttccctcatctccagtgccacagcagcagctctactgagctctggggctgtggactactgcctgcacgtgctcaaatcactgctggaatattggaagagccaacagaatgacgaggagcctgtggctaccagccagctgctgaaaccacatactacctcctccccacctgacatgagcccattctttctccgccagtatgtgaaggccaaagagttctggaggacccagccacctgcttgactctagctttgtcacctataacaccctacacgcagccctgccagcctgcacatttcccaagggtcatgctgctgatgtgtttgaggcctatactcagcttctaacagaaatggtactgaggcttccttaccaaatcaaaaagattactgacaccaattctcgaatcccacctcctgtctttgaccactcgtggttttactttctctccgagtacctcatgatccagcagactccatttgtgcgccgtcaagtccgcaaacttctgctcttcatctgtggatccaaagagaagtacagccagctccgggatttgcacaccctggactcttcacgtgcgtgggatcaagaagctgctagaagagcaggggatattcctccgggcaagtgtggttacagccagccctcagtccgccttgcaatatgacacactcatcagcctgatggagcacctgaaagcctgtgcagagattgccgcccagcgaaccatcaactggcagaaattctgcatcaaagatgactccgtcctgtacttcctcctccaagtcagtttccttgtggatgagggcgtgtccccagtgctgctgcaactgctctcctgtgctctctgcggcagcaaggtgctccgtgcactggcagcctcttcgggatcctccagtgcttcttcctccccagcccctgtggctgccagttctggacaagccacaacacagtccaagtcttccactaaaaagagcaagaaagaagaaaaagaaaaggagaaagatggtgagacctctggcagccaggaggaccagctgtgcacagctctggtgaaccagctgaacaaatttgccgataaggaaaccctgatccagttcctgcgttgtttcctgttagagtccaattcttcctcggtgcgctggcaggcccactgtctgacactgcacatctacagaaattccagcaaatctcaacaggagctcctgctagatctgatgtggtccatctggccagaactcccagcctatggtcgtaaggctgcccagtttgtggacctactaggatatttctccctgaaaactccacaaacagagaagaagttgaaggagtattcacagaaggctgtggagattctgcggactcaaaaccatattcttaccaaccaccccaactcgaacatttataacactttgtctggcttagtggagtttgatggctattacctggagagcgatccctgcctggtgtgtaataacccggaagtaccgttctgttatatcaagctgtcttccattaaagtggacacgcggtacaccaccacccagcaggttgtgaagctcattggcagtcacaccatcagcaaagtgacagtgaaaatcggggatctgaaacggaccaagatggtgcggaccatcaacctgtattataacaaccgaaccgtgcaggccatcgtggagttgaaaaacaagccagctcgctggcacaaagccaagaaggttcagctgacccctggacagacagaggtgaagattgacctgccgttgcccattgtggcctccaatctgatgattgagtttgcagacttctatgaaaactaccaggcctccacagagaccctgcagtgccctcgctgtagtgcctcggtccctgccaacccaggagtctgtggcaactgtggagagaatgtgtaccagtgtcacaaatgcagatccatcaactacgatgaaaaggatcccttcctctgcaatgcctgtggcttctgtaaatatgcccgcttcgacttcatgctctatgccaagccttgctgtgcagtggatcccattgagaatgaagaagaccggaagaaggctgtatccaacatcaatacacttttggacaaagctgatcgagtgtatcatcagctgatgggacaccggccacagctggagaacctgctctgcaaagtgaatgaggcagctccagaaaagccacaggatgactcaggaacagcagggggcatcagctccacttctgccagtgtgaatcgttacatcctgcagttggctcaggagtattgtggagactgcaagaactcttttgatgaactctccaaaatcatccagaaagtctttgcttcgcgcaaagagttgttggaatatgacctacagcagagggaagcagccactaaatcatcccggacctccgtgcagcccacattcactgccagccagtaccgtgccttatccgtcctgggctgtggccacacatcctccaccaagtgctatggctgcgcctcggctgtcacagaacattgtatcacactacttcgggccctggccaccaacccagccttgaggcacatccttgtctcccagggccttatccgggagctctttgattataatcttcgccgaggggctgcggccatgcgggaggaggtccgccagctcatgtgcctcctaactcgagacaacccagaagccacccaacagatgaatgacctgattattggcaaggtctccacagccctgaagggccactgggccaaccccgatctggcaagtagcctgcagtatgaaatgctgctgctgacggattctatctccaaggaggacagctgctgggagctccggttacgctgtgctctcagccttttcctcatggctgtgaacattaagactcctgtggtggttgaaaacattaccctcatgtgcctgaggatcttgcagaagctgataaaaccacctgctcccactagcaagaagaacaaggatgtccccgttgaggccctcaccacggtgaagccatactgcaatgagatccatgcccaggctcaactgtggctcaagagagaccccaaggcatcctatgatgcctggaagaagtgtcttcctatcagagggatagatggcaatgggaaagcccccagcaaatcagagctccgccatctctatttgactgagaagtatgtgtggaggtggaaacagttcctgagtcgtcgggggaagaggacctcccccttggatctcaaactggggcataacaactggctgcgacaagtgcttttcactccagcaacgcaggccgcacggcaggcagcctgtaccattgtggaagctctagccaccattcccagccgcaagcagcaggtcctggacctgcttaccagttacctggatgagctgagcatagctggggagtgtgcagctgagtacctggctctctaccagaagctcatcacttctgcgcactggaaagtctacttggcagctcggggagtcctaccctatgtgggcaacctcatcaccaaggaaatagctcgtctgctggccctggaggaggctaccctgagtaccgatctgcagcagggttatgcccttaaaagtctcacaggccttctctcctcctttgttgaggtggaatccatcaaaagacattttaaaagtcgcttggtgggtactgtgctgaatggatacctgtgcttgcggaagctggtggtgcagaggaccaagctgatcgatgagacgcaggacatgctgctggagatgctggaggacatgaccacaggtacagaatcagaaaccaaggccttcatggctgtgtgcattgagacagccaagcgctacaatctggatgactaccggaccccggtgttcatcttcgagaggctctgcagcatcatttatcctgaggagaatgaagtcactgagttctttgtgaccctggagaaggatccccaacaagaagacttcttacagggcaggatgcctgggaacccgtatagcagcaatgagccaggcatcgggccgctgatgagggatataaagaacaagatttgccaggactgtgacttagtggccctcctggaagatgacagtggcatggagcttctagtgaacaataaaatcattagtttggaccttcctgtggctgaagtttacaagaaagtctggtgtaccacgaatgagggagagcccatgaggattgtttatcgtatgcgggggctgctgggcgatgccacagaggagttcattgagtccctggactctactacagatgaagaagaagatgaagaagaagtgtataaaatggctggtgtgatggcccagtgtgggggcctggaatgcatgcttaacagactcgcagggatcagagatttcaagcagggacgccaccttctaacagtgctactgaaattgttcagttactgcgtgaaggtgaaagtcaaccggcagcaactggtcaaactggaaatgaacaccttgaacgtcatgctggggaccctaaacctggcccttgtagctgaacaagaaagcaaggacagtgggggtgcagctgtggctgagcaggtgcttagcatcatggagatttatacaagctgagcccaatgttgagcccctgagtgaggacaagggcaacctcctcctgacaggtgacaaggatcaactggtgatgctcttggaccagatcaacagcacctttgttcgctccaaccccagtgtgctccagggcctgcttcgcatcatcccgtacctttcctttggagaggtggagaaaatgcagatcttggtggagcgattcaaaccatactgcaactttgataaatatgatgaagatcacagtggtgatgataaagtcttcctgggactgcttctgtaaaatagctgctggcatcaaggaacaacagcaatgggcaccagctggaaggatcttgattctccagaaggggatcacccagaatgcacttgactacatggaaaaagcacatccctaggcggccaggatttgggatgccgacatcttggaaaagtttttgtcttcgcccagccttgccatttatcctaaggctgcttcggggcctggccatccagcaccctggcacccaggttctgattggaactgattccatcccgaacctgcataagctggagcaggtgtcccagtgatgagggcattgggaccttggcaagagaacctggctggaagccctgcgtgaacaccctgacgtaaacaagaagattgacgccagcccgcagggagacccgggcagagaagaaacgcatggccatggcaatgaggcagaaggccctgggcaccctgggcattgacgacaaatgaaaagggccaggtcgttgaccaaggacagcactccttgaagcagattgggaagagctgatcgaggagccttggcctcacgtgctgcatctgcagggagggatacaagttccagcccacaaaggtcctgggcatttataccttcacgaagcgggtagtccttggaggagtttgggagaataagccccgggaaaccagcagggctaccagcaccgtgtcccacttcaacattgtgcactacgactgcccatctggcttgccgtcagtttggctcgaggccgggaagagtgggagagtgccgccctgcagaatgccaacaccaagtgcaacgggctccttccggtctggggacctcatgtccctgaatcagcttttgccacttgcttggcaagacacaacacttacctccaggaatgtacaggccagcgggagcccacgtatcagctcaacatccacgacatcaaactgctcttcctgcgcttcgccatggagcagtcgttcagcgcagacactggcgggggcggccgggagagcaacatccacctgatcccgtacatcattcacactgggctttacgtcctgaacacaacccgagcaacttcccgagaagagaagaacctccaaggctttctggaacagcccaaggagaagtgggtggagagtgcctttgaagtggacgggccctactatttcacagtcttggcccttcacatcctgccccctgagcagtggagagccacacgtgtggaaatcttgcggaggctgttggtgacctcgcaggctcgggcagtggctccaggtggagccaccaggctgacagataaggcagtgaaggactattccgcttaccgttcttcccttctcttttgggccctcgtcgatctcatttacaacatgtttaagaaggtgcctaccagtaacacagagggaggctggtcctgctctctcgctgagtacatccgccacaacgacatgcccatctacgaagctgccgacaaagccctgaaaaccttccaggaggagttcatgccagtggagaccttctcagagttcctcgatgtggccggtcttttatcagaaatcaccgatccagagagcttcctgaaggacctgttgaactcagtcccctgaccaccacacagcagctgcggcggcgaagacgaagctggcttgccttccaccctctgttctccctccttgtgcattaagttccctccgcgggatgctgcattgttaccccgccctcccctctctcatttttcttggtgtggcttggggtttttaggcttcctgttttatctcgtgtgtgtggtgcaccagctatgaggttgtctgtaacccaagccatcaaagggcctgtacatacctaggagccatgagttgtcccggccagcttcatacttgagtgtgcacatcttgagaaataaacaagtgacttaacacacattgaaaaggaaggtgttgcctgctgcttcaactcgtcctcagtggcgcaggccaaatggtttcccttgaatgcacagccatttccggcgtcagcccgggaagactcatgtcagacccgctgtctccaggcctgttgtcagcgctaagtgcaacctgtctattcttggccagcaagttggggcaccacattggatggctctgatttttcccaaaacaaagcccatgccttgctcttaattttttggccttaagagctggaacccaaagacacgtggagcccagagctttcctagccctcggctgaaggaaggctcgcggagtagggc

SEQ ID NO: 65788 - DNA, 1651 bp, Homo sapiens
cgttgctgtcgcccccatgatccggaagcactatcaggtcaccggctatggcataaatggaacaggggactcaaatgatttctggcggattgaggtcgtaaacagaaaatttggaaaccggatcaaagtgctgagaagtcgaattcgcttcatccatttggtcacaggttgtgtcctggactcctcgggaaaggttctgcccaagtggggctgggagcagttggaagttacttgcaccccatacctgaaagaaaccctcaactccatctggaatgtggaggaccatatcaatcccaagttgccaaacatcagcctggatgtgctacagcccagttttcctgagatcttgctggaatcccacatggtcatgatccgggggaacagtggcctcaaacccaaggacaatgagttcacgtccaaaccctggcactggcctatcaactatcagggcctacgcttctcaggggtcaatgacacagatttccgagtctatctgcttggcaacccggtggtttggtggctgaatctgttgagcatcgccctctacctcctctcagggagcatcattgctgtagccatgcagagaggggcacggctgccagcggaggttgcaggtcaggtcctctgggctctccctcccctgacctggcggcagcagggcacctgcacccctggggagggccggctgcctgctgatgggccatcctttgcgtttaccaccccacaccttcccttatcctttgcttttgaaaggtaacaacccccaagtacccagtgctgtgttaaacactttacttcctcccaacaacactagagcgttggctattatgacccccattttatggattaggaaaccaaggaaccatgagattaagaaacttgccccaggacatacagctaggttgtcccaggtcctgctgcgaggaggcggccaggtcctgctcggctggacactccattacttcccgtttttcctgatgggccgggtcctctacttccaccactacttcccagccatgctcttctcaagcatgttgacaggcattctgtgggacaccctcctgcggctctgtgcctggggcttggcctcatggcccctggcgaggggcatacatgtggcgggaatcctgagcctgctcctgggaactgcctacagcttctacctcttccaccctctggcttacgggatggttggtcccctggcccaggacccccaaagtccaatggcaggactaaggtggctggactcatgggacttttgaggccactgcaaagattccagcctgggtccaggaacttcccaggagagccagctgggaagcagtactggaccatccggccatgaggaagctgcctaaggagcccgaagaattctgctgctcaccaggacccagctctgggagtgcagctggaatggaacccagcattggagagagccgggagagagccgcagctccgtccacagcaccacggagaggacagcgcctcttgggctgctccctcgtgcacagcgcaggggaggatgggtgccagagggtgggagtgggtgcgcgtgtgtgtatgtgagggcatgttgtccatatccctgtggaatacagaccgtgtaactggacagctgagtgtcataaactctaaaatagtaaaaaaaaaa

SEQ ID NO: 65789 - DNA, 867 bp, Homo sapiens
ttttttttaagtttatataactttattataagtattaatttgtttgaattaagtttatataactttaatataagcattaatttgtttgaaatataaagtattataaaatattgtaattaagcttacagataatttttaaaatatatacattatgactaatataccaaaattatttatatgtacacatttatatttaatacccaaagaaaatttactaccacattgctacagtagatattaacctgacatgtttattaattgatcctataggtataattataggtcagcataattttacagtctattcttttattttactaaattaggaatgccactattcccggacaaataaatgcaggtgatgtggccacccaagaatcatagtagctcttcagttagctatcttgcaatctctgatataattctactatgtgaatagagtgaattccaattcttcatcaaaaagtgctggtggaggttgtcaggtgtgttccagtatagattcccaatccaacggccggcagatgggagagcagcagagatggaaattgtgctcagaataagccctctttctcataatacttgtatttctcatgctgagagtagctgtgcacttttggtgtttagagaagaacttctttggaagaatattttctggtcaatttgaccaatgttacatgtaatctgaattagtctgtaagattctttcaacctcttttcttctctcaatacggttttactcagactgagagctgtctttctcttcaatgctttgggaattcagtgctttgtgtctaagcccctattagtatcacatggtgtctgtgagtgaggggggctgtcaccgtgagaactcctggagctgct

SEQ ID NO: 65790 - DNA, 2367 bp, Homo sapiens
gacaaaaactgaagcagaaccaaccaaagagagcacatgtagaagatggaggttcaagatctaaacaaggaaatgagcaaagtaagaagacaccaattgagaaatctgattttgctgctgctacacatcctcgtgctttttacctcagtaaaccagatgaaactccaaatgcttggatgtctgattcaggaacaggattgacttactggaaactagaggaaaaggatatgcaccactctttgcctgaaactttagagaagacgttcatatcattgtcttccacagatgtgtcaccaaaccaggtcctgactctagatcctacgttacacatgaagccaaagcagcagatttcagggattcaacctcacggccttccgaatgcccttgatgacagaatatccttttccccggactctgttctagagcctagtatgtctagtccctctgacatagactcattttcacaagcaagtaatgtcacttctcagttacctggatttccaaaatatccctcacacacaaaagcttctccggtggactcttggaaaaatcagacattccaaaacgaaagtaggaccagttccacgtttccgtcagtatataccattactagtaatgatatctcggtcaacactgtagatgaagaaaacactgtcatggttgcttcggcctcagtcagtcagtcccagcttccaggtacagccaacagtgtcccagaatgcatttcattgacttccttggaagatcctgtgatattgtctaagattaggcagaatctgaaggaaaagcatgctcgacacatagcagatcttcgagcttattatgaatcagaaataaatagtttgaaacagaagctggaggcaaaagaaatctctggagttgaagattggaagataaccaatcaaattcttgtagacagatgtggccaattagatagtgctttgcatgaagctactagtcgcgtgagaacacttgaaaataagaataacttactggaaattgaagtgaatgatttgagagaacgcttcagtgcagccagcagtgcttccaaaattttgcaggaacgaattgaagaaatgagaacaagcagtaaagaaaaagacaataccatcattcgactaaaatctagactgcaagatttagaagaagcatttgagaatgcttacaaactctcagatgataaagaagctcaactaaaacaagagaacaaaatgtttcaagatcttttaggagagtatgagtcccttggaaaagaacacaggagagtaaaggatgcattaaatacaactgagaataaattgcttgatgcatatactcagatttctgatttgaaaagaatgatttcaaaacttgaagctcaggtcaagcaagtagaacatgaaaatatgttaagccttcgtcataattctagaattcacgtgagaccctcgcgtgccaacacactagcaacttcagacgtcagcaggcggaaatggctgattccaggtgcagagtattccatctttactggccagcctctggacacccaggacagtaacgtggataaccagctggaggaaacctgtagcctagggcaccgttcacctctggaaaaggattcttcacctgaagttcatcaacaagcttgttgataaaaaagcaaagagagacttcagacacgccgatcatgagagctttaaaagaacttgatgagggaaaaatatttaaaaattgggggacacagacagagaaagaggacacctcaaatagtctgctgtagtaaatcctcggcaaactgaaacttcagttaatgcaagtcgttctccagaaaagtgtgcccaacagagacaaaagagacttaattcggcctcacagagatcatcatctttaccaccttcaaatcgtaaatcaagtactccaacaaaaagagagattatgctaacaccagtgactgtggcttatagtccaaagcgatcccctaaagaaaacttgtccccaggatttagtcatctgcttagcaaaaatgagagcagtccaattcgagaaaaaacttattctgagaaagccaccgataaccatgttaatcatagctcttgccctgaaccggtgccaaatggagtgaagaaagtatctgtgagaacagcctgggagaagaataaatcagttagctatgaacagtgtaagccggtttcagtcactccacaggggaatgattttgaatatacagcaaaaattcggaccctagctgaaacagaacgattttttgatgaacttacaaaagaaaaggaccagattgaggcagcactaagcaggatgccttctcctggaggacgaatcactttacagacaagattaaatcaggtgaaatgtcttagcttgaatctgctt

SEQ ID NO: 65791 - DNA, 900 bp, Homo sapiens
cccgagagctctatcctatcccaccgagcttccggaatatctccccatactgtccctagcgactccggtaagaaagcaccatttggatacaaagtaatggtctgagctatgatatcaattgcttcctagggtcgatcgtgtgagcacaccatatattcacagtaggaatagatgtagacacacgagcatatttcacctccgctaccataatcatcgctatccccaccggcgtcaaagtatttagctgactcgccacactccacggaagcaatatgaaatgatctgctgcagtgctctgagccctaggattcatctttcttttcaccgtaggtggcctgactggcattgtattagcaaactcatcactagacatcgtactacacgacacgtactacgttgtagctcacttccactatgtcctatcaataggagctgtatttgccatcataggaggcttcattcactgatttcccctattctcaggctacaccctagaccaaacctacgccaaaatccatttcactatcatattcatcggcgtaaatctaactttcttcccacaacactttctcggcctatccggaatgccccgacgttactcggactaccccgatgcatacaccacatgaaacatcctatcatctgtaggctcattcatttctctaacagcagtaatattaataattttcatgatttgagaagccttcgcttcgaagcgaaaagtcctaatagtagaagaaccctccataaacctggagtgactatatggatgcccccccccctcccccccatttgaagaacccggatacataaaatttagacaaaaaaggaaggaatcgaaccccccaaagctggtttcaagccaaccccatggcccccatgactttttcaaaaaaaaaa

SEQ ID NO: 65792 - DNA, 2078 bp, Homo sapiens
gcggccgctgcaggacgcggccgaagacctcaaggcgaagctgcgagaagtcactggagcatctccggaagcagatgcaggatgcgtttgctgttccaagcccaggcgcagtgagacctgcgtcttgtggcagaagatggtggagagccagcggcagagacgtgctgggtgagttcgagcgtcttcgccgtttgctggcagaggaggagcagcagctgctgcaggaggctggaggaggaggagctggaggtgctgccccggctgcgggaagggcgcacaccctagggccaagcagagcgccccacctagctgagctcatcgccgagctcgaagggccgctgccagctgcctgcgctggggctgctgcaggacatcaaggacgccctgcgcagggtccaggatgtgaagctgcagcccccagaagttgtgcctatggagctgaggaccgtgtgcagggtcccgggactggtagagacactgcggaggtttcgaggggacgtgaccttggacccggacaccgccaaccctgagctgatcctgtctgaagacaggcggagcgtgcagcggggggacctacggcaggccctgccggacagcccagagcgctttgaccccggcccctgcgtgctgggccaggagcgcttcacctcaggccgccactactgggaggtggaggttggggaccgcaccagctgggccctgggggtgtgcagggagaacgtgaacaggaaggagaagggcgagctgtccgcgggcaacggcttctggatcctggtcttcctggggagctattacaattcctcggaacgggccttggctccactccgggacccacccaggcgcgtggggatctttctggactacgaggctggacatctctctttctacagtgccaccgatgggtcactgctattcatctttcccgagatccccttctcggggacgctgcggcccctcttctcacccctgtccagcagcccgaccccgatgactatctgccggccgaaaggtgggtccggggacaccctggctccccagtgactcgggccctcctggaggagtcctgttgcctctcctgcccctccaggccactgagtgttttggccacttggaggacctgggaggagggagtgtgtcctttgagcaagaggaggaactcctggtgcctttctgagcctgcgtgggagaaccccaattctagcactccaggaaactgtgggagagtgtggggcaggctccgtcctccctgggagacccctccagccaccgggtgccacttaatgccaacagcccttaccaaagctgggagccccattgccccggcagctctggcctgtggttccagaagctgagaaaactccactggggcttgcagaatccagggttcacctaagctgcacagttcctgcagctttgccagccccctgaaagtcttgtgtaccccacctctgaagatgctgggggaggcagctgggatgggagccagccccatgcctgtctgtgaccccacagtgggtgagagcccgtcacagtcctgggtgtggctgctctggaagaattaggaggcagccataataagagtcttcagagagatgatgggaggggccagtgaggacaggaacagagagtagatgtcctataataaaggggcttctgggaggtgcctgggcacagatgtctgttcagcaggtgtgtgggcctagaggagagagcagagcccagaaatgtcttttgcaggcccacgttctgacttgaagctttcgtgggcatgttgccattgggttttgcccttgcaaaggcttcctaggtctccagtggcccctcaggacccagggtcccagctgctgcttggggatgtgcactgctggccgccggccttgcagtctctctaccctggggaggaacagtggcttctcagagcctggggcatacagaagaaggcaggagttgatttttgtgttgggtttggggtttctttgtcctcaaggtactgttctgtttctctttacccctctgctttatttattgtaagcattcccacgttaaataaactttggctgttgtctacaaaaaaaaaa

SEQ ID NO: 65793 - DNA, 409 bp, Homo sapiens
ggcacgagctaccacaacagtccactaccgacgacgtttatcgtatctatagagggccatacgcacctcgcctatggccgctctactaacccctactgacgacccatgcagaaatcctacagtctcctactcacgacgcctaccgttacctattcatgaccactagcgcaaccatacagtcccctacccatgagccctggcataaccctacaatcccctactcaccacacctagcataaacctacagtcccctacccatgacccctggagtaaccctacagtcccctagtcactacacctagtgtaactaaccatacagttccctatccatgacctctggcggaaccctacactcccctactcacaacccctagtgtaaccctacagtctcctacccatgacccctggg

SEQ ID NO: 65794 - DNA, 969 bp, Homo sapiens
ggcacgagccataagaacaggattacataataaagttatgcttatctgatgtgtactgggatttaatattcttgcttgtggtcagacatatcttaagtgttaaattgcttagaatatttgtgatttctgtataaggcattaaagaataggcatcagggactagttagaatttgaacaaaatgtatttataacactttttattgttggaaactcaacttttattctgggttaagcctctagataaaatcttaagtctgccaaactattattccccccaccttttctttccccaactatcaagaccattctaggaagtacgtcactctaccaaaaatgattgagttgtgttgggcctggggaaaaagtcgggcaaaaggagcctttcttgtggctgctgatagttaggttcatccaccaccgcactttgagctcgactagagtcgccatggggtttcatctgtctttgtggggccccacaggtggctcacatggttccactttcaggctgtgccaataggtggtacgcagattatttcgactcaggggcgtcggtgagggagaggagagcgagtcgggtgccactgggcacggtttccagaagttctgcttttgaaacctacactcgggctcctctgaggatttcttccacagatcttggtgtttcagcacatgaatggctcgtgctgatcggatgaagagttcgtggtggtggattgcgtctcctggtggactgcactgtgtatgacagagatgatgtactaaactccacagctcgatttggccaatttcgagttgaaaggatggtactggacccaggcctcataagtagcttgtcatcaagatctaggagcttgtccattagggagagatttcttggctgtagaggcattccatgaaccaagagatcattcacatttggctgatgtctgcttgcttgacagagactcatcttagactgtggcactcgcg

SEQ ID NO: 65795 - DNA, 1683 bp, Homo sapiens
ggcacgaggtaggaaccagtggtctatgtcccgaccactacttggcttgatagggcttaatgaaaaggtgagagagccagctccctggtgccaacccagaagcagtggcaaccacgcacttggtatcaccaagccctgggagaaatgtgtatagaaacaccccacggtggtgaaacagggaaaatgggtcatttactgagcaagtcccatttgtgctttcagtatcacataatcatttaactgttagaagtcagcatgtgtggtagctcacagacacaggataaaggagtgtttcccctaggcagtaagagaaacctttcaaggaaataatgtacctgggtatcagaggacctaagacctaagttctagttctagctctgctataaacaagtcttgagattctggtaaaagaaaggtctggataagatgacccttttaaagtgctttacaatttaaaaattcttgatattcttagtaggatgaagccatattatcccacaagtgcttgcctgaatttcttttttaagggtccaattttagtagacattccattcctccttagagaagaacattcttcaaccctgcagatgacggagggctaatctgccttcccctgcttctctaaccttctgttccactccttgccccacagtatttttctgacctaagaaacagtattgtgaacagccagccaccggagaagcagcaggccatgcacctgtgttttgagaacctgatggaaggcatcgagcgaaatcttcttacgaaaaacagagacaggtgagtataaagcgtcctgcctagaaatctcagacaattgctatttttcaaatcaacgaaacaggcagttgctttaaagtctttgacatctgtgtttggaggccatctaaagcaatgcaatccaatagaaaagtgagccatgttaaacaggcaaaattcattttaataatatattttatttaacccattgtatctaaaatattgtatcagtgtgtaatcagtattttaaaattgtgggttttcacattctttttgtactacatttccaaaatcctgtgtactttacatttaacagcatatctcagttcatacgttttcatcagaaatacttgatctgtatttagatttcataaatttacagttgacaaagtagattcctgtaatacccagattgtttcaaacacacctagggactttccagtaactgcattgagtatctgggctttgcaattaacttttaaattttatttaattttaattaatttaaaacaaggcattttaatttaaaattaagatgcagttggggagctgaatgttaaattgtatttaatttggattcatgttctcagtcacactggccataattcaggggcacggtagccatatgtggttaggcagccgccctattgggacaggcatagcactgcaccacctgggtcttgctggcattaaggaaatgaggatgggcttcattgggctttactggcccttcacgtgtgagggcaacttcctacttctgtcagtgagatttcttttgtgctgccatgagcccaaggtagccctcagggccccagatttgaccagatctctaagccaacttttctcttagagtcttaagactgaaattaactgatctttgaaacagaacccatcaattcatacattctacttcccatgctttaa

SEQ ID NO: 65796 - DNA, 341 bp, Homo sapiens
ggcacgagactcatcagccaattcacacaggagagagaccctatgatgcaatgaaggtcaacaagctttcacccaaaagacaggtctcagtaagcatcgaaaaacttgccatgcaagaatgaaatcttatggatacagtggatgtgggaaggttttgtcctgtaagtcaactctcattatataacagagaacctatacaggtgagaaactcctcaaatgtagcatgtgtaataaagccatcatagttaaatcctgtctcactgtacattagagaattcatacaggagagaaaccatataaatgcagtgattgtaagaaagcattcgctactttgtaaactg

SEQ ID NO: 65797 - DNA, 335 bp, Homo sapiens
ggcacgagattaccattcaggagaaaacctctacttgccctgcttcgcggactctaacccaccagcagaatattcttggacaattaacgggaagtttcagctatcaggacaaaagctctttatcccccacattactacacaccatactgggccctcccccgctctgatcgcaactcacccactggcatgcaaagctccaaattcatgacagtcaacgcctctgctccttcacgaccatgacatcttcctggccttaatccattatagtacccgtgaccccctctctcgctctcatgaatactgccccacagccgctttcactcttcctccaaccg

SEQ ID NO: 65798 - DNA, 1391 bp, Homo sapiens
ttttttttttttttacaactgaagagaaagttcctatttattctcaaatgccctgactaaactgctcaaaagcagtttatattttcaaaccaatgtcatgtcctcaacataaagttcaaattcatttactgtccatgacacttaagcatccagatcaataaattacaatacacatattctgtaagagtcttttataccaagaagcaatgtttttggtcttcggcagtgacatttcctccccattcaccacacaaacgcaggaagctctcgtaacatgaggacaccaaagcgctgccactctcgctgataaatccacagttcctgtgttgtatccaaacaagccaacactgcccctcctttccatgcaatcagccgggggtccatgtcctttaggcctttggatcacatccacattttcaaataatcggcctgaagggatggtgggcattttgttgagaattctgtgctgcaaaaaattcttgaagctttaatgaaaacatcaaaccacctcccaccactaggatgtagctgtacatcttctttttggtgtcgtcagatgaacagcagtctatgctatggaggatggctttatccaggcccagggcttttccttcaaacagcgagatggcagtcttcctggacatcagtgcagtgagggcctcctcggaatcgttgccggccatcaggccatctccctgtgcagaccccaaatctacctcctgggaatggagtctttctggaagatcagaggactggccacgaagatccccttcaaatccaataggtttggatgcagactttcggtcagcagtagcttttgcagactgttcttgtttgctctgtgtggccagcaggtaatgttcatcgtgaggatcctcaggatcgccctgagatctgtgctgcaaagtcgtcattttctgtccaacaattccaaaagttgcggggtaaaacaaagccattggagcctgcagtttttcatctcctaatcgaaactggtaaagcagggcaggagaatcaggatgtcgaatctgaaactcatggtcctgaagcccagagatgtcctgatctaaatgacaaaaagtttctttaaggtgttgcagaagaagacaatccattttatttgttaactggcattctctgtaagggaacccagctcgctgcattagccagtaaaaacatcttgacacatcagatcctccgtatgccagacaaagccgagtattccgatgagacaccccatcctccacacagcatacacttgtcttctggtccccaacgtctacaatacacgtgctgcttaagccacttccataggtggcacacacagactcctgatggaccacaatccctgaaaaacccatcttcattagtatcatattcactctcgtgcc

SEQ ID NO: 65799 - DNA, 3111 bp, Homo sapiens
  misc_feature (1)...(3111): n = a,t,c or g
ttttttttttttcaaagctgtcacgtttattcgcttaaaatacctaagtcctcagaagcagcagggctgctngtggaggggctgcgccctcagtgcccccgtgccttcctccgcacggcctgcaccagcagctccgagtagtgttccagcagggcctgcaggtctgggctggccagggggtacagcgtcggtgtggacgggggtcctgggctggtcagagcctgggctggggccacactagtccccaccaggcattcagcctccagctggctgtggatccacaggaaggtggagaccagctcagtccgtgcctgctgctgcccggtgtccacctggccactggagaccaacacacggtaaaggtcgagggcttcttggaaggtggtctgcagcctgtgcaagatgttccccacccggaggtgggctccaggagggaggcagtgccgccagggatgccaggccgggcctctggaagctgggggttactggggtgggcaggaaggccaggggactcaggagctgggagacttgggcgaaaggcagagccgtggagcctcagggcgctctcttccacagggctaggggctgggaagctcactgcagggacggtgacgccaggctgggtatccacggggggcagcaggagcccatcacaggcacttgacagggtcagtctcaggttggcccgggcctcgtggttgccccaggaacgcagggcaggctcttggccctcactgtccaaactgggtgttgtcgcggtggtgatggcctgaagctcctggcccaaggaggccagctccccaacggacgatggcctacggaggggctgggccagtgtggccacgatagggccctcactgtcaccgagggagatgctgcgtgatatcctggcacgggagctggcagtggcctccatgtaggaacaggtggagggggcatggacaccctgagccaggcctggggtgggtgcagatgtgggcgttgggagattccctgtctgctgggcagacacggaggaagcagggacacaggacgccaggctcgtaaggcagggaggtggtgggcgccaggcctccagggtctcttcagccttccctgcagcgaggacgtgggtcctgtctggggaggcgtagccagtacctgctctgggctggcttccgcctcggtccatgagcttgacctctggagacttcacaaggcactgggttgcccggggagggaaggtatgggtgaacctggatgccttctggaggcttgagaggaactgcgtggagatactcaggcgtgggttgaagaagtggtcttcagcttcagaggcctccacgtctcccagagctctgcagggggactcagtcagtgtctcaaagtggtggcggaggaacttctcctgctccggagtctggggtagggagctgctggggacgctgggtccctcgggcagggacagctcatcttctgtgggaccctcaggcgggctctggtcctttgggctgtcggaggacaccctgaggtaggagtcgccctgctggtctccaggcccggcctccacctccttcctgcaatactggctgtctgtccctgtgactgtcacttctgcctccagagagtagaggatgagctcactggcctcagatgattccttctgctcactcagcaggctggccaggctctgtggctccagtgaatccagaatggagttctccagactctcgggcttcatgggggtaaagtagcaatccaggtcctgggcatccaggatggtcttgaggggctcttggccggcccgctctgcccagcggccgtggggctggtagctgcgcttggcgtggaaggccaagccatctgccacatcatcgtcccctagcagccgctttgcccacagtggcagcttgccgttggttagcaggcaacgaggattgtgtccccagcatcactccatggggccctggcagggactcatccctctggtggacaggcaggggctgccaggacctggggtggccactccgcttcttgtcatttgtgtgctgctgctgctgccggtggtcaatctccagcaagtgctgcttcatgcagttggtgatctccgggcccaggtgccagatgaacacgcagctgtctccagatactgtgatcaagtgatgacagtcataggtgaacttcatgctggtaataatttctgcaaacaaagcagagaggctgcacttgccttcggagtcagagggtgtgggcgggtggggaggcatcccaagcagagaggcacacccacctgaatggccaaacatcttggcaatgcactcgcccgagtaaaagtcaatcactgagatgcttttgtcagagcagctggtggccaggaaggtgcctgaggggtccacatggaccttcagcaaggacccttcgtcaccctgggagcccttgtagcacttcttctgcttcccgttcacagtgttgtagactctcacattgcggtcctggcaggccacggccacgtacttctgggtgatgtcaatgtccatgtcatacaaggtggttttctctgctacgtggtgggtacggacaaagtgtagtccatccgaaccctgctgggcactgcgaaagtagatgctcttgtcagccccacagctgatcatctggatgtctctgttgccagcgaacttgatggcggtgatggaggaggagtggtcatccagcgtctgctccaggttgtagttcttctccacgttcagcacatggatcagccggtcccgactggctgaggccagcaaggtcagccctgtctctggcttggagtactccaggcacagcacctcagcatcatgggcctccaccttgaccagctcgtccatgaagtgcagctcgtggatcagcccctcattcccaatgggcagcaggaggtgccaaggccagggcttctgcccactgccctgagaacctgagctggagctgggaggtgtacactggacactgccagggcccacttgcctcagatttccacttcggtcgcctgaagccaaatgctggccgtcaggactgacctgcatgacccgcaccccggctttcacgtccatgggtgtcccattctcgctcccccggtctgggaagtgtgacatt

SEQ ID NO: 65800 - DNA, 2286 bp, Homo sapiens
ctccgagtcgaatgaaaatgagccacaccttccacatggtgttagcccagagaagaggggtcagggactcttccctggtcgtagctttcatctgtaagcttcacttaaagagaggaaacttcttggtgctcaaagcaaaggagatgggcctcccagttgggacagctgccatcgctcccatcattgctgctgtcaaggacgggaaaagcatcactcatgaaggaagagagattttggctgaagagctgtgtactcctccagatcctggtgctgcttttgtggtggtagaatgtccagatgaaagcttcattcaacccatctgtgagaatgccacctttcagaggtaccaaggaaaggcagatgcccccgtggccttggtggttcacatggccccagcatctgtgcttgtggacagcaggtaccagcagtggatggagaggtttgggcctgacacccagcacttggtcctgaatgagaactgtgcctcagttcacaaccttcgcagccacaagattcaaacccagctcaacctcatccacccggacatcttccccctgctcaccagtttccgctgtaagaaggagggccccaccctcagtgtgcccatggttcagggtgaatgcctcctcaagtaccagctccgtcccaggagggagtggcagagggatgccattattacttgcaatcctgaggaattcatagttgaggcgctgcagcttcccaacttccagcagagcgttgcaggagtacaggaggagtgcgcaggacggcccagccccagcagagaaaagaagtcagtacccagaaatcatcttccttggaacagggtctgccatcccgatgaagattcgaaaatgtcagtgccacacttgtcaaacataagccccgacacgtctctgctactggactgtggtgagggcacatttgggcagctgtgccgttcattacggagaccagggtggacagggtcctggggcaccctgggcttgctgtgtttgtgttccacctgcacggcagattcaccacacgggcttgccaagtatcttgctgcagagagaacgcgccttggcatctttgggaaagccgcttcaccctttgctggtggttgcccccaaccagctcaaagcctggctccagcagtaccacaaccagtgccaggaggtcctgcaccacatcagtatgattcctgccaaatgccttcaggaaggggctgagatctccagtcctgcagtggaaagattgatcagttcgctgttgcgaacatgtgatttggaagagtttcagacctgtctggtgcggcactgcaagcatgcgtttggctgtgcgctggtgcacacctctggctggaaagtggtctattccggggacaccatgccctgcgaggctctggtccggatggggaaagatgccaccctcctgatacatgaagccaccctggaagatggtttggaagaggaagcagtggaaaagacacacagcacaacgtcccaagccatcagcgtggggatgcggatgaacgcggagttcattatgctgaaccacttcagccagcgctatgccaaggtccccctcttcagccccaacttcagcgagaaagtgggagttgcctttgaccacatgaaggtctgctttggagactttccaacaatgcccaagctgattcccccactgaaagccctgtttgctggcgacatcgaggagatggaggagcgcagggagaagcgggagctgcggcaggtgcgggcggccctcctgtccagggagctggcaggcggcctggaggatggggagcctcagcagaagcgggcccacacagaggagccacaggccaagaaggtcagagcccagtgaagatctgggagaccctgaactcagaaggctgtgtgtcttctgccccacgcacgcacccgtatctgccctccttgctggtagaagctgaagagcacggtcccccaggaggcagctcaggataggtggtatggagctgtgccgaggcttgggctcccacataagcactagtctatagatgcctcttaggactggtgcctggcacagccgcgggccaggaggctgccacacggaagcaagcagatgaactaatttcatttcaaggcagtttttaaagaagtcatggaaacagacggcggcacctttcctctaatccagcaaagtgattccctgcacaccagagacaagcagagtaacaggatcagtgggtctaagtgtccgagacttaacgaaaatagtatttcagctgcaataaagattgagtttgcaaaaaaaaaa

SEQ ID NO: 65801 - DNA, 1920 bp, Homo sapiens
ggcacgaggagaaggctgccagtagaggaaaggggaagaattcccagggcgaggaaaacacataagcctttgcgtgtggagctgtgtaaattcaaggtctggccagggggctgtgagatgccgtgtgtgcttggagcacaggaatgagaagtgaggtgaggaagtggctgggccacctcacaaagggcctcaaattctaggctgagaaactcggacttggtcctgagggtaaagggggccgggagaatgttatgcatggtgctgaagttgcattcaacacagctgtgagaagcatctgtcagggtcaggccagtgtgggaggggaactggaggccagggtaccagatatggtggtccaggtgagaaggaaggggccagaacttggcttggagaacggaggtcagtgccctcagggggtggaggtgatggaacttggtgcttgtctggctttggggagtgagggagtgggtggaaatggggacgtccaaagttctagatggtgtggcaagaattttgtctagatggggtggcttcctcatgatcatgtcttggggttgagcaggggttctctttggtggggagctgggtagggaggtaatgcttcacttttggatggggcgatcaaattcattcatgtattcattcaaccaatatcgaattgattccttaccctttcctgaaagacctttgatagattctgagggtagaatgttgaccaggatggagctgggccttggagagtggggaaggcaggcagtaacacagcaggcagtagatcaacgaggccatatcatggattgtgctgtgggatgtgaaggaaatgaacagacggaggacgcagagcagggcacctcgagctaccacggtcactaaaagctgctatgaccaagtgttctgtgagctgaaacctgaaggccaggaaggagtcactcttgtgaggggctgaaaggaacatcacagagaggggaggagctagcacaaaagctctccagatgggagaggctggtgcactgggcaagggaaagccagcaccatggtgcccagaagggaaggcagctggggggccagtctacgcagggccttgcagagtgtctgggtttactctaagggcagaggggaaggttttgatcataacgcactgcagtctgaaactcctgggctcaggcaatcctgtctcagcttcctgggtagttgggactgtaggcaggcaccaccacctctgcctaattattattatcattttttttggagagacagggtctcaatatgttgctgtgtctcagaggggaaggttttaagtcagggaatgattctgtgagcttaaaaaatcacttggaaattgccatagggaagggagggagaaggccaggcatggtggctcatgcctataatcccaggactttgggaggctgaggcaggcggatcgcttgaggccaggagttcgagaccagtctgggcaacagggtgaaaccctgtctcttctaaaattacaaaaaattagccggccatggtggtgcgcgcctgtagtcccagctactcaggaggctgaggcgggagaatcgcttgaacctgggaggtggaggctgcagtgagctgagatcatgccactgtactcaagcctgggcgacagagtgagactctgtctgaaaaaagacacagcaacaaaaaaaacgagaggggagggagagagtgatggaggcggaggctgctgctgctataagctgggcgtaagtggtggtggtttgcgctggggtggcagcggcgatggtgggattacagggaagtgtgtggcttgctgacaggggtcatgtgcactgacccggtgtgggcagaggcaggtgctatcctggccatcccgcctgcggatgtgtgacctcaggccaatcacacgatctctttgagctctgcttccctcatctg

SEQ ID NO: 65802 - DNA, 642 bp, Homo sapiens
tttcggtgtggctggctcatttatttaggcaaaaccatcagccaggtgcagaatgcttgggtgcatatgtgggtatgagggtaggtatgaggtgcaaggccccacccattcttcgaggttctctcgcctgccagcccctgcccctgccctttcctcaagtctgggccctcctcccgtgcttttcctgcctcttccccccaccccgcgcctcagcctcagccaggagccgcgcacgcagctactcactcttcctgtgcctcaggactctcacttctagggaccaagaggagagaagtgacagcggagttaggagggaaagggggccaggatgagactgggacagcaggggacagggagcgggccagggagagcgggcgggggggaagtggagaagagaggaggagcttttctgcccatctgaccctggctcaggctgctctggggccccatgagggtggtccatcgagttcctggcttggctggtgcccctgagggctgggcagggccaccactggctctagcccctagcaagggcctccaccttggcactgggttggggtagggcacccagccctggctgtgctgggtgagggtgtctcgggaagcccagagtatgtttttctctgcccttagcctcgtgcc

SEQ ID NO: 65803 - DNA, 589 bp, Homo sapiens
ttttttttttttaggcattcaggctctttaatgtctgaggatggggggaagaagtcaatggtgaggcttctctgggaaattctgcaggccttgtagttctctaagcccctctagcaacatgtggatatgggctttgatattcatggagtccttggtgaggctgttgctgagccttatgaaaacctatgagttcaacatctgtgaggagagagctcttacgatcaatgaacttgagagcttctgccagtgtcaactccaggaaaaaaccatatcccagggccacatagatgcgtgaagtatctgggaccactgtgtcaacgaagaagttacagcccaaatccacctgcatatataactccgagtgcttagcttcctggagtcgctcaatgacatttctcagttgaaggtatttggccagctgctcatataccttgtctcgatggtccagcacctttcgcaagtcccgctgcagcacgtcactgatgaaggtctcgtagcgcagcactttctcccccgtggcctccaccgcccgccgcttagggggcgtcgccatgatgggctcctggggagtggggagggggaagaccat

SEQ ID NO: 65804 - DNA, 1866 bp, Homo sapiens
  misc_feature (1)...(1866): n = a,t,c or g
ggcacgagcggcgttcagcaggaaatatcccggctgaccaacgagaatctggaccttaaagaactggtagaaaagctggaaaagaatgagaggaagctcaaaaagcaactgaagatttacatgaagaaagcccaggacctagaagctgcccaggcattggcccagagtgagaggaagcgccatgagctcaacaggcaggtcacggtccagcggaaagagaaggatttccagggcatgctggagtaccacaaagaggacgaggccctcctcatccggaacctggtgacagacttgaagccccagatgctgtcgggcacagtgccctgtctccccgcctacatcctctacatgtgcatccggcacgcggactacaccaacgacgatctcaaggtgcactccctgctgacctccaccatcaacggcattaagaaagtcctgaaaaagcacaatgatgactttgagatgacgtcattctggttatccaacacctgccgccttcttcactgtctgaagcagtacagcggggatgagggcttcatgactcataacactgcaaagcagaattgaacactgtcttaagaattttgacctcaccgaataccgtcagtgcctgacgtgacctttccattcagatctaccagcagctcattaaaattgccgagggtgtgttacagccgatgatagtttctgccatgttggaaaattagagcattcagggtctatctggtgtgaagcccactggctcccagaagcactcctccagcatggcagatgaggataactcataccgcctggaagctatcatccgccagatgaatgcctttcatacagtcatgtgtgaccagggcttggacgctgagatcatcctgtaggtattcaaacagctcttctacatgatcaacgcagtgactcttaatgacctgctcctgcggaaggacgtctgctcttggagcacaggcatgcaactcaggtacaatataagtcagcttgaggagtggctttggggaagaaaccttcaccagagtggagtagttcagaccatggaacctctgatccaagcagcccagctcctttgtgcatcacagcagggtccatctgctctgggtccttatgacatgacactattctcagtgtcctggtatgttcccgacactgtacaatggctccaatcagccctactcctgcaagtgtgctcctggtggtctttaactgaagggcactgactgggtcactggtgaagttccccgcaggaactgagtcagaccccatctcagggccctgcacaagataggtacctgctctaaggcgtggaccctcgccacagccctggcccgtcttgacgggcgagggttactgtacttgtcccaaccgtacagatgagaaagctgagactcagggcgagcaacccgggtcccagcggagcgcccggcacgcgccgacacttcagcaccagtcgcggtggccaccactgtgcgcggagatggatgcgacgcgtgcgcaggtaaagtccatccgtgccttgcctcccaccggcgccttccccggcctctggtttttgtccccgccagcggctccgactccatcgcgtcctcttccagtctagtgcttttttccagatctcgatcccaaactccctcctaccagaatctggacccgaatccacccattgtccgttttccgctgccgctggagagaatctctgaggtccccaggagagcctgcctgcacggaagagacgcctcctcggtatggccgcccccggagaggagcgattaagtgcagacctccatgttgctcttgagcctgagcggcttcaggggaattccaccgcacggactaaggtctcgatctcaatnnnnngcctct

SEQ ID NO: 65805 - DNA, 1157 bp, Homo sapiens
ttttttttttttacatttgcaaaacaacatttattcttttaaaaaatctatatacattgccatacaaagataccacattgaagcagttctcaggaaccttccagtgagccttctcttataattgcccgagcaagatttcgtgccagagaaagtctcagcatttccaccttggtggtctctatgtcatcatcctggagctgctcggtatcagattctccatgcacaggtcttcttgacgtcaagtcctccagacaccgcatcaactcataagtctgttctgctgagaaaatcacctgtttctgttccaaaaggggcaaggcatctgtcagcagagtcatccagaaagaccgaggggcaatccgagacgtcatcaaggacagaaggagagaagctgcgtcggcaaaacgcttctccccgtacatacggtggaactcgcgatactttcccaggaatgtcagtcggtcactgagcatcatggctggccccaggttgtcaatgagatccaaatcagaaaagcagcctcgctcacagtaatccctgaggaacctgtctgacacgagcgtggcaaaggcggcatccttagcacggatgctccaagagagggcagaacccaggcgattgttgcggacggctttcatggctaagatcttacaaatgctgcgaacttgttcagtcatctgccgctgctcacagatccgcagcaccttcagggctttctgctcggtgttcagaggtatccgctcaatgtgcagctccagggagactcggcccagctcggggcagtaatcaaagtaatcgacccccagctgccacaggctgggatgagcaaacagtcccgaggcgtactccagcaggaggaactctctcatgttggaaccgaaatagaggttgtgtgactggaggagcttgcagtggtccagcaggtctgtcaggtgggccacaaaccaccagttgctcagggcgatgcttttagctcgatacttttggaggacttgaagggcaccaggaaactgccgacatcttgcccaactcccagtgaagtgcaccccagctgtttcctcttgccagacagcaaggaactggcccgtcttcagaggaagctgtaagccaggagggaagaagggaccctgtggaggactcctgccatctctcgtgcc

SEQ ID NO: 65806 - DNA, 1057 bp, Homo sapiens
tcccctcctcccgcccacgccccgctccccgcccccggagccccgcggacgctacgccgcgacgagtaggagggccgctgcggtgagccttgaagcctatggctttgggcccgggtggagccgccgcaggtgcatgatcttggtggtagtagcaaatattcaaacgagaactggtgggggccgaagtggagaagggttccatgtgaacagcagttgaacatgggtcagtcggtcctgagagatgggcgagcgccgttccgaagggacgggcgatggcctccgttgccctcggccgatcgaaagggagtcgggttcagatccccgaatccggagtggcggagatgggcgccgcgaggcgtccagtgcggtaacgcgaccgatcccggagaagccggcgggagccccggggagagttctcttttctttgtgaagggcagggcgccctggaatgggttcgccccgagagaggggcccgtgccttggaaagcgtcgcggttccggcggcgtccggtgagctctcgctggcccttgaaaatccgggggagagggtgtaaatctcgcgccgggccgtacccatatccgcagcaggtctccaaggtgaacagcctctggcatgttggaacaatgtaggtaagggaagtcggcaagccggatccgtaacttcgggataaggattggctctaagggctgggtcggtcgggctggggcgcagagacaactgcaaggcttctaatggccaatgctggaacaatgacagcaaggaataaataaagtgatatttaattataacccaaagcatactacagctgttcatgatcccatactgacataaataaattgttgaataaattaataaatggagaagaaacaaaccttccaggcagaagaattccaaataatgtatgtagatgctgcacactgagagagataaagcatagctccccactcctaagtgtgggctacacatagtcactttctgctcaagagtacaggatggaaaaaaggaaaaaaagagtaacattccaatcacctgcaccattcaggtgatcgaggtcct

SEQ ID NO: 65807 - DNA, 1386 bp, Homo sapiens
ttttacaacacaagaaatggtactgaatatatttgttacatcctgaatcaacccaatagacggatcttgtaaacaaaatagtaaggtaacacttcaaaaacagatgaacaatttatccaccaagaatgtatatagtaagccaaaagctcactgtggaaatacacttagcatggttattagaaaatcacaaagagtaatgtaacaagttaccaaattttatggtcatgttctgcttgataattcaaataggatggatggtagttacctagttttctaattttgtgttgttttaacatctccattgatttttaatgctttattttttatttgaatttgctggctggcaggtttgctttgcttaatacattgactgcaacacgcttattgttgtgttggtagaataagacatacgagaatatatatagaaaggccatatggaggtttccatggaaagattctgatactccataactctgctgttcagaatttcagctgattgcctgtagttggtgcagcgaacggaacgctggtggcaggtgttgttgctgcagacacagtggtaggtgtagcaccgtgcatcatgggcacaatatttgaagcgggtgccatgcacagtattggccctgcagggataaatgccggctgtgggagctgcaggttagtcagagcctgttggcagtggaaaacagtgggattaaagaccggggtggcaccattgggcttttccagtgctgatctctttggtatcagttgcagtgtaccaggctgcagggccatggcagaggcagctgaatggttcatctgatgatgagctgccttgagtctggcttgcaagtgtgcaggaggatgaaagtacttgcatttctcccgcgagcatcgacctttgatgtaatccatgcagattgtcacagtattatcactcgcttcaatcatggaagcatcagtagggtgagcatagcggcaatcattctcccccacgggtacaatttccacgctgaaattctcggcaaacctccagtttatctgaacgcatcagttttgggccaacagctcctggcattgcaagaggtgggtttccaggaatcagaacaggtgtatttggtacaagttctgcaggaacgaggcccatcccaggatgtggtatgtaaggattgaaagccatgggaggattagctggaattgatggagtcataggaaaagaaccaagtgatgacatttgagcgttttggagcataagctgcatctgctgggcgaacatggctgcggcagtcttctgttgaatcagattgttccgcccattaatctccagctgcgtttttaagtgtggaggagggtgaaggtacttgcagttctctcgggtacaccgaccctgatcccacgcgtccg

SEQ ID NO: 65808 - DNA, 875 bp, Homo sapiens
ggcacgagcgacgctggtcagaaacattttggggctactgtgtgcaagtcttgtggtatgatatatactgcttccaaccctgaagatgaaatgcagcatgtacagcatcaccacaggtttctggaaggaatcaaatatgtgggttggaagaaagaacgtgtagtagcagagttttgggatgggaaaatcgtgttggttctgccacatgatccaagctttgctatcaaaaaggtagaagatgtccaagaacttgttgataatgaattgggcttccagcaagttgttcctaaatgtccaaacaaaataaaaacttttctttttatatctgatgaaaagagagtagttgggtgtttaattgcagaacccatcaaacaggcatttcgtgtcctgtctgaaccaattggtccagaatccccaagctctacggaatgtcctagggcttggcaatgttcagatgtaccagaacctgcagtctgtgggataagtagaatctgggttttcagactgaagagaagaaagcgcattgcaagacgactggttgataccctcaggaattgcttcatgtttggctgttttctcagcactgatgaaatagcattttctgacccaacaccagatggcaagttatttgcaaccaagtactgcaacacccctaatttcctcgtatataattttaatagttaaagctgatttcagttataaaggagttactatctggataagttcaaagagctccttattataaaatacaaactatttaataaatatcaaaataaaaaatacccgagactcacactcatacacacacacacacacacacacacacacacatatcacagttttggttccttatgagttgaaaagtcaggaataaa

SEQ ID NO: 65809 - DNA, 1519 bp, Homo sapiens
ttttttttttttgagcttttgatcattttattcacaaaatataagcgagacttacatccctttctggtgaaagttttcaaataattttatgggtagggccttgagatgtatcaattataaaacatgttaaaatgaaaacattttttaaatttacaaatacaaaccaatactttatacaagaattctctataaagttcgtcaaagtaaaaaataatttgtttcaactgaatataaggcatgtccagtttatgtcattttgtagaattatttttgttttgctggagacttttctcttcgccggtcctgatttttctttgattctctggattgttcagagtatctgctagatttttcccatcgtctctcggcaccattttgatatctatcttcatcacttcttgagcctgagtgctttctattcatttcctttgactttgatctatcttttcttctgaaattttcactgtctttaattcggtgtgtatgcttctcattttcagaaaaagaatttcttctctctcctctcttctttttgggatcaccatgcttattttccaaatctatatgcatttcttggtctctgtcattcgcaactctactgtagttatttcgttcagaaggaacatctttgtctgatgtgtactttgttataggatctctccaatttgaaccacttgaattttgatctctgtgtttttctgaccttctttctctctcagtccttgtttcctggtgcccgtgttcttgtcttctttctttttgtttcctatcatttgtttgctggtttctgatcaatttatctacctctttacttctggtcttcccatgtcccttctttcttacatcattagctgaggcagagctatgactactgatggatgaagagtcgctctcttcactggaagactctgaactgctatcactgctgtcagaatcagagtcggatgagtcagactctgaagaggaggacgctgaagaggaagaggatggggaggatttattttgctcaacatctggtttctgcgccacaatgacctttggtgtatttttgagatgctcccgcagttcatccgttaaacctccaagacctatagaagtaaagaagttgatggcaaaccgagtgtttcttggattatctcggggtaataatccttcaaagaatggctgcagagtttcatcctttaatcttgcattaagtttaggaagacccatgtattcacacagttcctggaaaaatattttgacaaaaattctactggatgatgtagtggtttcttcactcagttttatacattcaagaacactccatggaagtgaatcagtgtataaaaggtgagcaaacatcttagcaacatttcgcaacttgtttgtttccaagcgatggatggtatcatactgttctttgaatataccttcaaaggattccatgtactcctttctttagcatgcaaaatccgccccagctattaagccaaaaaattttcgtatgtctttggtgggcacaacaatcaagattcat

SEQ ID NO: 65810 - DNA, 338 bp, Homo sapiens
ggcacgagctggaagaataattaaagatctttttttgggttttttttggggggcctttagcaaaaaaaattaattattggatggctggcaaaaaaaaccctatccttgaaggcttggcataagggccagggacctaaggggaatcggggggacggggcatgggccactccagcccccatttttggccagaaacccggcccctaggggggaaatttttgcccaaagggcttggcaaaaccggccacaacccctttaccagggacctgaaagtcttagggtaccactggccccttgacaccatgcagtgactcaggggggaaaacggccccccgaaactc

SEQ ID NO: 65811 - DNA, 5542 bp, Homo sapiens
  misc_feature (1)...(5542): n = a,t,c or g
ttttttttttttctttgaatgtttactaagcagtcagaaggtgacttactccattcccccaagttccaagncccctgagcatagaggggtttaaggggttagggaggagtaccacaggactgaagaggaagtagagttaagggcttggcaagttgcccactcctatccctcggtctagctgcctcagaactaaaggaggcctggaactaacaagtcactccccttcccagattaagatgaagccagctggcctttggatgcccccagggaagagcgtggtggcagcacgtggcatcgagggatccctcgtgtaagctccacagtgccaggtcagtctgcactcggattagatgtccagtttcaaagttgtgcagtcatcgggtatctcttccctctgtctcctgctcctttcagctcctccagcttggagagaggggctgttgggaggagttgtgaccccgggaatctgagggaggcagcaggggggtgtccgggcaatgggtgagttcttgcactccagcaagaaccttttcgtcgtagatgattctggtgcctctggttaggagaggccaccatcggccgtccaattctcttcttcggtctggttagctgaggtgatgggatttcccctttgagagcagggactgaaggaagcagactggcctataaaagggcaagtcagcacactgtagccacaataggtttaaagggtcttaaaacattaataattttattggtagcggaattttattacattgaacacaagttgaaataagtgggtccagaaaccttgatgatgtagtttcattcctatagtttcatttcactgggtttgatctataccttagcaggatgtttcttcacaacttgaaggctcactaaagatgtgcaaggtcttcttctgcctccactaaaatctcaatactggcccccataataatggcaggatttatttcgattccttatcagaaccaatgctaggggctctcaaatctcagcactgtaaacaatctaatggcttcaaatatttccatatcttatattctcattcacaagaagaaatcctgtgttagaactagaagactcttgagttcaatttcagatgagaaaagtgaaacccagaaaggtgagatgatttgcctaaggccataaagcttcaagcggcagaaatgaaaatagaatttaggctctgactactgactactgctccactgtatccatgctgtctcctcccatatcccttgtatattttgaaagtaattaagttcttacctgagctaggttttatccaaatgttcaggttggtaaaatagcagtaaagtagtgccaggaagaggcaggcagaggaagaagagatttagcaggtgaaatgaggttgggagcaggctactgggatccaaatagtcagaaagaaaggaaggaagtgctggtaagaaggaagggaggagcgtatcctaaagaactactcccaactatacaactgttgttttcctcccaattttcctagggattcctcataattatctcctttctcttcataaattctacttactgacctgaaataaaatttctcatttggttgtcctcaaggtgcagaatatggacttaaggctcctccagacaattcaaatgtattgtagacagttaagatagaataaaactcacctttttgtcccactgaataatttatttaatattatttctcactagtatatatttcatcaagagtagtttcattcatttcaccaattttaggtgatttttcttgttgctgttaatggtaagtggaaacagcaagatacacaggtgatccaaggagtcttttgtgccccacccaactgcccccacaaaggtcaaggggccccttaatgatacttgatgtggttatcaatcactacaaagtagtagcttcaataaacaacactttcaaaatccattcaaaacaaaacataagacataagcttaattaaggaagctttctcatatgtaagatgatatagaagattaaagaagcaggtatatctgacacagaacaaacatggtgtgtctgatgtggtcctggctttaggacctgggcagagaaaattaagaattcctgttggcataagtgtagaaaggtgctgctaatatagttctgtccctagttactactctttctctgtgcatccttctttgccttcatatgagttttggcttctccatcagctccaaacattttcttgttttcttttctgtattgcctatactgaccaggaaaaattcagctatattaaaacacaaataagttgatgactatacttttcagtgggataacttttccttctctatgctgattctcggcatagcctatggtttggccaaagcagcccattccagggttcctctgtttagcttgttaaacatattgactctccatgcttagggccatggaactaagcctggaattactcacatatttataaatattactcagctgattcaataatacaacagaatgacaggagtcacctccttatgtcccaactcatataaagcttaaaatatctataaccagacaaatctttcagataaaaaaggtcaggaagcacagaaggaacctgaagttgataatttgggtgtccctacatttgtttagtgtcatctgatttaaatccaattgttcttattgacattctcatgatccatagagaaaaaacctatcagtggcctatctgctagctaaagtcagataagacacattgccagagcttgaaactttctcatatgttaaaggattatggaagacaacaagggaacaaggaatgtttaacacagaataaataggtaaatagtcttaaaagtgcttttttaaggcagtctaagaagggactcaagtgttaaatgtgagaagcctgttacaaatatagtattaaccatctggttcaatataatgtggattgagtggtacctgcatgaccactgaaaggatcacaccccacttctaaagactgttcatctttttattgaatattctggtaaatatttcacattaatacaggctacattacgtagagccactatatgacaagaaatttactcaactttttccttttaagtatgtaaacaattatacatgtatttatcaccctaaaaggttcgaaacatgtaatcaactaattctcttctgcatacaagtagtattctggtatgtttagccaaaaagcactaaggtcatatgaatcttaagttcaaaatgggctaaactacccagagaacataatcagggtggataggaaatcaatttggttcttatacatgggggcaatcaaattttccatttgctaaaagcctcaggggaaaatttccttaagggcacattaaaaaaaaaaatcccccatgggttcttcccaaggtcataggtttcttaaacaaggctaaagagtaaagaccttctaacttaggttgacatatttgagatgcatggttccaatatgaggtgcccacgtgccaggccaaatctgaaaagggggaggaaaaattggaatttctaattaggaatctttagacagttacaaaatgaatatataaatgcaatggcaattcactgtttctgcctaggaagaatacacatatattaaataaagtgttcagtagcatcatcttgatattgaaaaagcaatccagatcgaaatggtcaattatgacttttgatattcagtacttatacttctcacaaaacaaaaagaatgatgtgacaaatctaaaaaacaaaagagcattaagcccattttacctgctgggcatcagtgcattcagttgaattttggataacttttatcatagggttccaagcaggatctggattgtgaagtccattaaacagagggcctcctggaacatcagcaagctgaggatgagagggtattatggtgcctccatacatggaaattggcagacctttagaaaaatccacaaaaccacttgccataggctgatgaaaaatgttagagggggctaccattccagaatcatctctctccattggctgatgttgggagaatgtgcttgggtctgataattgttgatgcattggatggttccccatcacagattgcgaccaacctgataagccttctgacacagcattgacaccaaatgaccagattccactgtgtccaacgggagcgacaaaactggtccccgccggggcttgtgcaacagaccctccttgccgaattcgggccagtctctctgttccaattgggggaggtatctttcgatcttgactggcactgactccttttggttggcccaacgttggtggggcagaagtggctgaaagaggtgaagatgatcccgaagaaacagatggaataggagagtcacatgagtttgaggcgcttgtccaaggatggggagaaaaatgttgtctgttgaaactaggagtcccaacaggagctggcccttgcaggaaaacccttgttcctggtatgccggaaaaacttgccagaggagcagaagaggaagatggggagctgcctgatgggtcaatggatggtaacccaactggaactaattagaaactcgcctgggaaaggtggtctgaaacccaggtgcctttgagttatccagggtgccatgttttccaagtgtcccaagccactgagttaccccaggaaacgctgacctgaacagtgaaagaggcatctgtagcaactcgtgaggacagtggaccatctccccagccctggttagctggcacctgactactatcaaaaagactgctgaagtgattgaaaagtgtggctgggccaaatgtaggtggcaaagacttatttgctgggtttatgtgcatctgagaaccattcataatgttcacagctgaagaaacgtgcactgcagctggtgggccttgaggtggtgttaaagtaactggattcgtaacaaaaatagactggggatcctggtgaatagttgcatttggtaccatggagtaaaaagaacctctgggctgcattcgatcgcaagggggaaactcgaggtgctggtacagctaactgaggtaaattactggtgtcctgattatcagcagcaaccatttctgggtgatgtcaaagtcaatggagcaggttctgagttagatgcaaaaggcattgacataggacttaaatcagacacactggatggctgtgcctcctcttgtgtgttactggaagtaggagtgggactactggatgggtgagtttctggagctcccggggtgttgctggcagagctactgcaactgtttgcagttgaagatggggtacataggtttgccatgggctggtcctgtgtggacactttctctttggtgggtggcacagcagagaaagactccatcttttgtgaagaaagctgtgcttgaggaagtacttgcaggtaggaaatgtgggtggggagcttgccccgcttagtgattaggtgcagagggagacagaaggccagggaactacaagtgcttgtcacagaagaaatcactgttgctggaggacttgtcttaggcacacaggcaaacaactgc

SEQ ID NO: 65812 - DNA, 676 bp, Homo sapiens
ggcacgaggagaatactattcttaaagctgctgaagtgcaggtcccaccaaaatgagtagtaacacctgaagcaaaggcgtttatttgacgatgtttggcctaccaaaaggaggactgcattgatgcccagcaactggcctgtgaccccctacttgctgcattatatccaaaaattggtctttgtgagtagccctgctggggctgctattgcatcaacctttggggtgtccaacagctgttcttcgaattgagactgactccaaggccacaaactgttcaacacacacaaagtggacaaatagcatttagcagcaggtttggaacgtagagaatctgaatggatctgatgaaacctgaaccaggtgcttattttgttgcttttttcccatccactgagcatgacagcatggattctctttaaggagaaaccatgggcagctccagccaggcctcataggaaaaggcccggcatgaggttctggcgtcaatggccactgtgtatggctgctctgagtgaggaaaaaactaaaaagaaaaactggttccatgtactgtgaacttgaaaacatgcagactcacgggggttcctgatgcaatgcttcagatgaagattgtggacttgaaaatacagactagaaggccgggcacagtggctcatgcctgtaatctcagcac

SEQ ID NO: 65813 - DNA, 1315 bp, Homo sapiens
ttttttttttttgaagttcatcatctttagacttaaggaattaacaagggtcagggagactacaccaggctgagggcttcttggttcctggagacatgcccagctacagcaaacacagggaaacacgaagggggcagctggaagatttggtcttgaacttggggggtgggtaagtgatgatccccacgactggagcagcaggaagaagttgtgtctgaggaagtgctgggccgcccagagggacagccctgccctggagcttgtcgccgggagggaagggaaacaagccccctccctcagtgctgaggaaaaggcacttggctgggtctcctcctgccctctccccatccgtgggagagacggggtccttgcctccttgcccctttcagccgcccagaagccggtcctggttcagcctctggaagaagcttttgccgaactcataggtgctgatcatgatggcacaggagggggcagccttgatgatccgaggaaggaagcctgcaaagagtcccttggtgcccgactcggcccggatcctccgcagcagcagccaggtggagtccacatgcagggggttcactctcacagcctccatcgctcccagagcgacctggcgttgggtctttaccacgtcaaagggtagagtcagcactgcagccaccgtccctgagatgccaccagccacaaagctcatgcccacagaagtctggtccttcggcctgagcccattgagccagctcttcaccagctcatagttgaaccagtacagggcttggggtgggggatgcactgagaagggcacatctcgaagggcagtggggccccagcccagccacagtgagcgccagccaccctgagccactgcagttcgaacacaggcacccagctcccggtacgacacatgctgagcctgcagctttgtccgcataagctccagggggctgatcacagtcacggtgcccactgtgtggggattgggggtgacaatggggagaagtgagatcacaggtcttacatggcatcacctacctgctgtcccaggtctggggacctagaacacccccctatccctaggctggcagaggttggggctgggagctgggactgactgggtttgggcagaggtggggacagagggaggtcaaaggcccaagactatgctcacggcgggccagcgcgccagccaccatgggtgcgtagaggtcagaggtcagggctcgaccacacaggaaggccttcagttggtcataggcagtgaagtagatggcggtagctggcacagtcatcaccagggtggcggggagctcgtgcc

SEQ ID NO: 65814 - DNA, 1337 bp, Homo sapiens
tggaaaagcatgctcattgcacatcagcgatttttttctggggagaaaccttatatatgcaatgagggtggaaagggcttcaccatgaggagtactctcagtatacatcagcaaactcatactggagagaagccatacaaatgcaatgaatgtgataaaaccttcaggaagaagacatgcctcatacaacatcagcgatttcacacaggaaagacttcctttgcatgtactgaatgtggaaaattctctttgcgcaaaaatgatcttattacacatcagagaattcacacaggagagaaaccgtacaaatgcagtgactgcgggaaagccttcactacaaaatcagggctcaatgttcatcaaagaaaacatacaggagagaggccctatggatgtagtgattgtgggaaagcttttgcgcacttgtctatccttgttaaacacaagagaattcacaggtagtcattttgggaaagcctcttgccagatgtaggcccttaagatatctgcaaagaagagtaatttcatgaatgcagactacatggttgtttatttagtgatcagttacttcatgttttgtgtcagagaaaacatgtacaaaacatttgagaaaatattttaggacattatgtctaaaaattgtatactgagaaaaatcctatgaatgtggcagactataaaagcctttggtgggaagataaaccccctcagaagtgatcatagatcatgaataaactactaattcgtggaaatgtaataattataggaacgtctttgcccaaaaataaaacctcaacagattgagagagttcacactggagaaatactttcctctggcagtgaatgtggcagggttttcagtaaaatgttttgcctcatcgtgtgctaggaaataatgcagaaaaaaactaatgaaaacattcaatgtagaagacttttaggaaaacaacagagaatttaatgaaggaaagaagccttggcaaaatgatggatgagagctttctgtcacaattctaaccttaacagataatatgcctcatgtgcatttgggaacaggatagcttgagccatattcctagttgccttgtcactgattttatacattttaaattgtgacttcctctaatcacgaactaaaatttaatattgtatataataccggagtattttatgcctgcctcattttattatatgattagctcctgcatttctttagttctaagtttgtgttatttcagaataactaaagtacttcagaatgaaactggatacagtatattcaattcataagtgtaattgaccatacttgaatatgtttaagtttataagtaacatct
